(19) United States
(12) Patent Application Publication
(10) Pub. No.: US 2012/0159672 A1
(43) Pub. Date: Jun. 21, 2012

(54) Sequence-determined DNA fragments and corresponding polypeptides encoded thereby

(76) Inventors: Nickolai Alexandrov, Thousand Oaks, CA (US); Vyacheslav Brover, Simi Valley, CA (US)

(21) Appl. No.: 11/053,711

(22) Filed: Feb. 7, 2005

Related U.S. Application Data
(60) Provisional application No. 60/542,691, filed on Feb. 6, 2004.

(51) Int. Cl. C12N 15/29; C07K 14/415; C07K 16/16; C40B 30/04; A01H 5/00; C12N 5/10; C12N 15/113; G01N 33/50; C12N 15/82; C12Q 1/68

(52) U.S. Cl. 800/298; 536/23.6; 435/320.1; 530/370; 530/389.1; 435/468; 435/6.11; 435/419; 536/24.1; 435/6.12; 436/94; 506/9

(57) ABSTRACT

The present invention provides DNA molecules that constitute fragments of the genome of a plant, and polypeptides encoded thereby. The DNA molecules are useful for specifying a gene product in cells, either as a promoter or as a protein coding sequence or as an UTR or as a 3′ termination sequence, and are also useful in controlling the behavior of a gene in the chromosome, in controlling the expression of a gene or as tools for genetic mapping, recognizing or isolating identical or related DNA fragments, or identification of a particular individual organism, or for clustering of a group of organisms with a common trait. One of ordinary skill in the art, having this data, can obtain cloned DNA fragments, synthetic DNA fragments or polypeptides constituting desired sequences by recombinant methodology known in the art or described herein.

[0001] This Nonprovisional application claims priority under 35 U.S.C. §119(e) on U.S. Provisional Application No(s). 60/542,691 filed on Feb. 6, 2004, the entire contents of which are hereby incorporated by reference.

[0002] This application contains a CDR, the entire contents of which are hereby incorporated by reference. The CDR contains the following files:

| | Date of | |
|---|---|---|
| File Name | Creation | File Size |
| Sequence Listing (1 of 4).doc | Feb. 7, 2005 | 51,582 KB |
| Sequence Listing (2 of 4).doc | Feb. 7, 2005 | 103,778 KB |
| Sequence Listing (3 of 4).doc | Feb. 7, 2005 | 63,718 KB |
| Sequence Listing (4 of 4).doc | Feb. 7, 2005 | 101,436 KB |
| Sequence Listing - Miscellaneous Features | Feb. 7, 2005 | 72,430 KB |
| (1 of 7).doc | | |
| Sequence Listing - Miscellaneous Features | Feb. 7, 2005 | 68,872 KB |
| (2 of 7).doc | | |
| Sequence Listing - Miscellaneous Features | Feb. 7, 2005 | 36,704 KB |
| (3 of 7).doc | | |
| Sequence Listing - Miscellaneous Features | Feb. 7, 2005 | 47,835 KB |
| (4 of 7).doc | | |
| Sequence Listing - Miscellaneous Features | Feb. 7, 2005 | 64,502 KB |
| (5 of 7).doc | | |
| Sequence Listing - Miscellaneous Features | Feb. 7, 2005 | 21,852 KB |
| (6 of 7).doc | | |
| Sequence Listing - Miscellaneous Features | Feb. 7, 2005 | 12,991 KB |
| (7 of 7).doc | | |

### FIELD OF THE INVENTION

[0003] The present invention relates to isolated polynucleotides from plants that include a complete coding sequence, or a fragment thereof, that is expressed. In addition, the present invention relates to the polypeptide or protein corresponding to the coding sequence of these polynucleotides. The present invention further relates to the use of these isolated polynucleotides and polypeptides and proteins.

### BACKGROUND OF THE INVENTION

[0004] There are more than 300,000 species of plants. They show a wide diversity of forms, ranging from delicate liverworts, adapted for life in a damp habitat, to cacti, capable of surviving in the desert. The plant kingdom includes herbaceous plants, such as corn, whose life cycle is measured in months, to the giant redwood tree, which can live for thousands of years. This diversity reflects the adaptations of plants to survive in a wide range of habitats. This is seen most clearly in the flowering plants (phylum Angiospermophyta), which are the most numerous with over 250,000 species. They are also the most widespread, being found from the tropics to the arctic.

[0005] The process of plant breeding involving man's intervention in natural breeding and selection is some 20,000 years old. It has produced remarkable advances in adapting existing species to serve new purposes. The world's economics was largely based on the successes of agriculture for most of these 20,000 years.

[0006] Plant breeding involves choosing parents, making crosses to allow recombination of genes (alleles) and searching for and selecting improved forms. Success depends on the genes/alleles available, the combinations required and the ability to create and find the correct combinations necessary to give the desired properties to the plant. Molecular genetics technologies are now capable of providing new genes, new alleles and the means of creating and selecting plants with the new, desired characteristics.

[0007] When the molecular and genetic basis for different plant characteristics are understood, a wide variety of polynucleotides, both endogenous polynucleotides and created variants, polypeptides, cells, and whole organisms, can be exploited to engineer old and new plant traits in a vast range of organisms including plants. These traits can range from observable morphological characteristics, through adaptation to specific environments to biochemical composition and to molecules that the plants (organisms) exude. Such engineering can involve tailoring existing traits, such as increasing the production of taxol in yew trees, to combining traits from two different plants into a single organism, such as inserting the drought tolerance of a cactus into a corn plant. Molecular and genetic knowledge also allows the creation of new traits. For example, the production of chemicals and pharmaceuticals that are not native to a particular species or the plant kingdom as a whole.

[0008] The achievements described in this application were possible because of the results from a cluster of technologies, a genomic engine, depicted below in Schematic 1, that allows information on each gene to be integrated to provide a more comprehensive understanding of gene structure and function and the deployment of genes and gene components to make new products.

### I. THE DISCOVERIES OF THE INSTANT APPLICATION

[0009] Applicants have isolated and identified genes, gene components and their products and promoters. Specific genes were isolated and/or characterized from Arabidopsis, soybean, maize, wheat and rice. These species were selected because of their economic value and scientific importance and were deliberately chosen to include representatives of the evolutionary divergent dicotyledonous and monocotyledonous groups of the plant kingdom.

[0010] The techniques used initially to isolate and characterize most of the genes, namely sequencing of full-length cDNAs, were deliberately chosen to provide information on complete coding sequences and on the complete sequences of their protein products.

[0011] Applicants have identified that gene components and products include exons, introns, coding sequences, antisense sequences and terminators. The exons are characterized by the proteins they encode and Arabidopsis.

[0012] Further exploitation of molecular genetics technologies enables one to understand the functions and characteristics of each gene and its role in a plant. Three powerful molecular genetics approaches are used to this end:
[0013] (a) Analyses of the phenotypic changes when the particular gene sequence is activated differentially; (Arabidopsis)
[0014] (b) Analyses of in what plant organs, to what extent, and in response to what environmental signals mRNA is synthesized from the gene; (Arabidopsis and maize) and
[0015] (c) Analysis of the gene sequence and its relatives. (all species)

[0016] These are conducted using the genomics engine depicted in FIG. 1 that allows information on each gene to be integrated to provide a more comprehensive understanding of gene structure and function and linkage to potential products.

[0017] The species Arabidopsis is used extensively in these studies for several reasons: (1) the complete genomic sequence, though poorly annotated in terms of gene recognition, is being produced and published by others and (2) genetic experiments to determine the role of the genes in planta are much quicker to complete.

[0018] The phenotypic tables, MA tables, and reference tables and sequence tables indicate the results of these analyses and thus the specific functions and characteristics that are ascribed to the genes and gene components and products.

### II. INTEGRATION OF DISCOVERIES TO PROVIDE SCIENTIFIC Understanding

[0019] From the discoveries made, Applicants deduce the biochemical activities, pathways, cellular roles, and developmental and physiological processes that can be modulated using these components. These are discussed and summarized in sections based on the gene function characteristics from the analyses and role in determining phenotypes. These sections illustrate and emphasize that each gene, gene component or product influences biochemical activities, cells or organisms in complex ways, from which there can be many phenotypic consequences.

[0020] An illustration of how the discoveries on gene structure, function, expression and phenotypic observation can be integrated together to understand complex phenotypes is provided in schematic 2. This sort of understanding enables conclusions to be made as to how the genes, gene components and product are useful for changing the properties of plants and other organisms. This example also illustrates how single gene changes in, for example, a metabolic pathway can cause gross phenotypic changes.

[0021] Furthermore, the development and properties of one part of the plant can be interconnected with other parts. The dependence of shoot and leaf development on root cells is a classic example. Here, shoot growth and development require nutrients supplied from roots, so the protein complement of root cells can affect plant development, including flowers and seed production. Similarly, root development is dependent on the products of photosynthesis from leaves. Therefore, proteins in leaves can influence root developmental physiology and biochemistry.

[0022] Thus, the following sections describe both the functions and characteristics of the genes, gene components and products and also the multiplicity of biochemical activities, cellular functions, and the developmental and physiological processes influenced by them.

[0023] A. Analyses To Reveal Function And In Vivo Roles Of Single Genes In One Plant Species

[0024] The genomics engine focuses on individual genes to reveal the multiple functions or characteristics that are associated with each gene, gene components and products of the instant invention in the living plant. For example, the biochemical activity of a protein is deduced based on its similarity to a protein of known function. In this case, the protein may be ascribed with, for example, an oxidase activity. Where and when this same protein is active can be uncovered from differential expression experiments, which show that the mRNA encoding the protein is differentially expressed in response to drought and in seeds but not roots.

[0025] Thus, this protein is characterized as a seed protein and drought-responsive oxidase.

[0026] B. Analyses To Reveal Function And Roles Of Single Genes In Different Species

[0027] The genomics engine is used to extrapolate knowledge from one species to many plant species. For example, proteins from different species, capable of performing identical or similar functions, preserve many features of amino acid sequence and structure during evolution. Complete protein sequences are compared and contrasted within and between species to determine the functionally vital domains and signatures characteristic of each of the proteins that is the subject of this application. Thus, functions and characteristics of Arabidopsis proteins are extrapolated to proteins containing similar domains and signatures of corn, soybean, rice and wheat and by implication to all other (plant) species.

[0028] Schematic 3 provides an example. Two proteins with related structures, one from corn, a monocot, and one from Arabidopsis, a dicot, have been concluded to be orthologs. The known characteristics of the Arabidopsis protein (seed protein, drought responsive oxidase) can then be attributed to the corn protein.

[0029] C. Analyses Over Multiple Experiments To Reveal Gene Networks And Links Across Species

[0030] The genomics engine can identify networks or pathways of genes concerned with the same process and hence linked to the same phenotype(s). Genes specifying functions of the same pathway or developmental environmental responses are frequently co-regulated i.e. they are regulated by mechanisms that result in coincident increases or decreases for all gene members in the group. The Applicants have divided the genes of Arabidopsis and maize into such co-regulated groups on the basis of their expression patterns and the function of each group has been deduced. This process has provided considerable insight into the function and role of thousands of the plant genes in diverse species included in this application.

[0031] D. Applications Of Applicant's Discoveries

[0032] It will be appreciated while reading the sections that the different experimental molecular genetic approaches focused on different aspects of the pathway from gene and gene product through to the properties of tissues, organs and whole organisms growing in specific environments. For each endogenous gene, these pathways are delineated within the existing biology of the species. However, Applicants' inventions allow gene components or products to be mixed and matched to create new genes and placed in other cellular contexts and species, to exhibit new combinations of functions and characteristics not found in nature, or to enhance and modify existing ones. For instance, gene components can be used to achieve expression of a specific protein in a new cell type to introduce new biochemical activities, cellular attributes or developmental and physiological processes. Such cell-specific targeting can be achieved by combining polynucleotides encoding proteins with any one of a large array of promoters to facilitate synthesis of proteins in a selective set of plant cells. This emphasizes that each gene, component and protein can be used to cause multiple and different phenotypic effects depending on the biological context. The utilities are therefore not limited to the existing in vivo roles of the genes, gene components, and gene products.

[0033] While the genes, gene components and products disclosed herein can act alone, combinations are useful to modify or modulate different traits. Useful combinations include different polynucleotides and/or gene components or products that have (1) an effect in the same or similar developmental or biochemical pathways; (2) similar biological activities; (3) similar transcription profiles; or (4) similar physiological consequences.

[0034] Of particular interest are the transcription factors and key factors in regulatory transduction pathways, which are able to control entire pathways, segments of pathways or large groups of functionally related genes. Therefore, manipulation of such proteins, alone or in combination is especially useful for altering phenotypes or biochemical activities in plants. Because interactions exist between hormone, nutrition, and developmental pathways, combinations of genes and/or gene products from these pathways also are useful to produce more complex changes. In addition to using polynucleotides having similar transcription profiles and/or biological activities, useful combinations include polynucleotides that may exhibit different transcription profiles but which participate in common or overlapping pathways. Also, polynucleotides encoding selected enzymes can be combined in novel ways in a plant to create new metabolic pathways and hence new metabolic products.

[0035] The utilities of the various genes, gene components and products of the Application are described below in the sections entitled as follows:

### III.A. Organ Affecting Genes, Gene Components, Products (Including Differentiation Function)

[0036] III.A.1. Root Genes, Gene Components And Products
[0037] III.A.2. Root Hair Genes, Gene Components And Products
[0038] III.A.3. Leaf Genes, Gene Components And Products
[0039] III.A.4. Trichome Genes And Gene Components
[0040] III.A.5. Chloroplast Genes And Gene Components
[0041] III.A.6. Reproduction Genes, Gene Components And Products
[0042] III.A.7. Ovule Genes, Gene Components And Products
[0043] III.A.8. Seed And Fruit Development Genes, Gene Components And Products

### III.B. Development Genes, Gene Components And Products

[0044] III.B.1. Imbibition and Germination Responsive Genes, Gene Components. And Products
[0045] III.B.2. Early Seedling Phase Genes, Gene Components And Products
[0046] III.B.3. Size and Stature Genes, Gene Components And Products
[0047] III.B.4. Shoot-Apical Meristem Genes, Gene Components And Products
[0048] III.B.5. Vegetative-Phase Specific Responsive Genes, Gene Components And Products

### III.C.Hormones Responsive Genes, Gene Components And Products

[0049] III.C.1. Abscissic Acid Responsive Genes, Gene Components And Products
[0050] III.C.2. Auxin Responsive Genes, Gene Components And Products
[0051] III.C.3. Brassinosteroid Responsive Genes, Gene Components And Products
[0052] III.C.4. Cytokinin Responsive Genes, Gene Components And Products
[0053] III.C.5. Gibberellic Acid Responsive Genes, Gene Components And Products

### III.D. Metabolism Affecting Genes, Gene Components And Products

[0054] III.D.1. Nitrogen Responsive Genes, Gene Components And Products
[0055] III.D.2. Circadian Rhythm Responsive Genes, Gene Components And Products
[0056] III.D.3. Blue Light (Phototropism) Responsive Genes, Gene Components And Products
[0057] III.D.4. CO₂ Responsive Genes, Gene Components And Products
[0058] III.D.5. Mitochondria Electron Transport Genes, Gene Components And Products
[0059] III.D.6. Protein Degradation Genes, Gene Components And Products
[0060] III.D.7. Carotenogenesis Responsive Genes, Gene Components And Products
[0061] III.D.8. Viability Genes, Gene Components And Products
[0062] III.D.9. Histone Deacetylase (Axel) Responsive Genes, Gene Components And Products

### III.E. Stress Responsive Genes, Gene Components And Products

[0063] III.E.1. Cold Responsive Genes, Gene Components And Products
[0064] III.E.2. Heat Responsive Genes, Gene Components And Products
[0065] III.E.3. Drought Responsive Genes, Gene Components And Products
[0066] III.E.4. Wounding Responsive Genes, Gene Components And Products
[0067] III.E.5. Methyl Jasmonate Responsive Genes, Gene Components And Products
[0068] III.E.6. Reactive Oxygen Responsive Genes, Gene Components And H₂O₂ Products

[0069] III.E.7. Salicylic Acid Responsive Genes, Gene Components And Products
[0070] III.E.8. Nitric Oxide Responsive Genes, Gene Components And Products
[0071] III.E.9. Osmotic Stress Responsive Genes, Gene Components And Products
[0072] III.E.10. Aluminum Responsive Genes, Gene Components And Products
[0073] III.E.11. Cadmium Responsive Genes, Gene Components And Products
[0074] III.E.12. Disease Responsive Genes, Gene Components And Products
[0075] III.E.13. Defense Responsive Genes, Gene Components And Products
[0076] III.E.14. Iron Responsive Genes, Gene Components And Products
[0077] III.E.15. Shade Responsive Genes, Gene Components And Products
[0078] III.E.16. Sulfur Responsive Genes, Gene Components And Products
[0079] III.E.17. Zinc Responsive Genes, Gene Components And Products
[0080] III.E.18. Vigor Responsive Genes, Gene Components And Products
[0081] III.E.19. Sterol Responsive Genes, Gene Components And Products
[0082] III.E.20. Branching Responsive Genes, Gene Components And Products
[0083] III.E.21 Brittle-Snap Responsive Genes, Gene Components And Products
[0084] III.E.22. pH Responsive Genes, Gene Components And Products
[0085] III.E.23. Guard Cell Responsive Genes, Gene Components And Products

### V. Enhanced Foods

### SUMMARY OF THE INVENTION

[0086] The present invention comprises polynucleotides, such as complete cDNA sequences and/or sequences of genomic DNA encompassing complete genes, fragments of genes, and/or regulatory elements of genes and/or regions with other functions and/or intergenic regions, hereinafter collectively referred to as Sequence-Determined DNA Fragments (SDFs) or sometimes collectively referred to as “genes or gene components”, or sometimes as “genes, gene components or products”, from different plant species, particularly corn, wheat, soybean, rice and Arabidopsis thaliana, and other plants and or mutants, variants, fragments or fusions of said SDFs and polypeptides or proteins derived therefrom. In some instances, the SDFs span the entirety of a protein-coding segment. In some instances, the entirety of an mRNA is represented. Complements of any sequence of the invention are also considered part of the invention.

[0087] Other objects of the invention are polynucleotides comprising exon sequences, polynucleotides comprising intron sequences, polynucleotides comprising introns together with exons, intron/exon junction sequences, 5′ untranslated sequences, and 3′ untranslated sequences of the SDFs of the present invention. Polynucleotides representing the joinder of any exons described herein, in any arrangement, for example, to produce a sequence encoding any desirable amino acid sequence are within the scope of the invention.

[0088] The present invention also resides in probes useful for isolating and identifying nucleic acids that hybridize to an SDF of the invention. The probes can be of any length, but more typically are 12-2000 nucleotides in length; more typically, 15 to 200 nucleotides long; even more typically, 18 to 100 nucleotides long.

[0089] Yet another object of the invention is a method of isolating and/or identifying nucleic acids using the following steps:

[0090] (a) contacting a probe of the instant invention with a polynucleotide sample under conditions that permit hybridization and, formation of a polynucleotide duplex; and

[0091] (b) detecting and/or isolating the duplex of step (a).

[0092] The conditions for hybridization can be from low to moderate to high stringency conditions. The sample can include a polynucleotide having a sequence unique in a plant genome. Probes and methods of the invention are useful, for example, without limitation, for mapping of genetic traits and/or for positional cloning of a desired fragment of genomic DNA.

[0093] Probes and methods of the invention can also be used for detecting alternatively spliced messages within a species. Probes and methods of the invention can further be used to detect or isolate related genes in other plant species using genomic DNA (gDNA) and/or cDNA libraries. In some instances, especially when longer probes and low to moderate stringency hybridization conditions are used, the probe will hybridize to a plurality of cDNA and/or gDNA sequences of a plant. This approach is useful for isolating representatives of gene families which are identifiable by possession of a common functional domain in the gene product or which have common cis-acting regulatory sequences. This approach is also useful for identifying orthologous genes from other organisms.

[0094] The present invention also resides in constructs for modulating the expression of the genes comprised of all or a fragment of an SDF. The constructs comprise all or a fragment of the expressed SDF, or of a complementary sequence. Examples of constructs include ribozymes comprising RNA encoded by an SDF or by a sequence complementary thereto, antisense constructs, constructs comprising coding regions or parts thereof. Such constructs can be constructed using viral, plasmid, bacterial artificial chromosomes (BACs), plasmid artificial chromosomes (PACs), autonomous plant plasmids, plant artificial chromosomes or other types of vectors and exist in the plant as autonomous replicating sequences or as DNA integrated into the genome. When inserted into a host cell the construct is, preferably, functionally integrated with, or operatively linked to, a heterologous polynucleotide. For instance, a coding region from an SDF might be operably linked to a promoter that is functional in a plant.

[0095] The present invention also resides in host cells, including bacterial or yeast cells or plant cells, and plants that harbor constructs such as described above. Another aspect of the invention relates to methods for modulating expression of specific genes in plants by expression of the coding sequence of the constructs, by regulation of expression of one or more endogenous genes in a plant or by suppression of expression of the polynucleotides of the invention in a plant. Methods of modulation of gene expression include without limitation (1) inserting into a host cell additional copies of a polynucleotide comprising a coding sequence; (2) inserting antisense or ribozyme constructs into a host cell and (3) inserting into a host cell a polynucleotide comprising a sequence encoding a variant, fragment, or fusion of the native polypeptides of the instant invention.

### DETAILED DESCRIPTION OF THE INVENTION

[0096] I. DESCRIPTION OF THE TABLES

[0097] As noted above, the Applicants have obtained and analyzed an extensive amount of information on a large number of genes by use of the Ceres Genomic Engine. This information can be categorized into three basic types:

[0098] A. Sequence Information for the Inventions

[0099] B. Transcriptional Information for the Inventions

[0100] C. Phenotypic Information for the Inventions

[0101] I.A. Sequence Information

[0102] To harness the potential of the plant genome, Applicants began by elucidating a large number gene sequences, including the sequences of gene components and products, and analyzing the data. The list of sequences and associated data are presented in the Reference and Sequence Tables of the present application (sometimes referred to as the “REF” and “SEQ” Tables). The Reference and Sequence tables include:
[0103] cDNA sequence;
[0104] coding sequence;
[0105] 5′ & 3′ UTR;
[0106] transcription start sites;
[0107] exon and intron boundaries in genomic sequence; and
[0108] protein sequence.

[0109] The Reference and Sequence Tables also include computer-based, comparative analyses between the protein sequences of the invention and sequences with known function. Proteins with similar sequences typically exhibit similar biochemical activities. The Reference table notes:
[0110] sequences of known function that are similar to the Applicants' proteins; and
[0111] biochemical activity that is associated with Applicants' proteins.

[0112] Also, by analyzing the protein sequences, Applicants were able to group the protein sequences into groups, wherein all the sequences in the group contain a signature sequence. The groups are presented in the Protein Group Table. The signature sequences are reported in the Protein Group Table. More detailed analyses of the signature sequences are shown in the Protein Group Matrix Table.

[0113] To identify gene components and products, Applicants took a cDNA/coding sequence approach. That is, Applicants initiated their studies either by isolating cDNAs and determining their sequences experimentally, or by identifying the coding sequence from genomic sequence with the aid of predictive algorithms. The cDNA sequences and coding sequences also are referred to as “Maximum Length Sequences” in the Reference tables. The cDNA and coding sequences were given this designation to indicate these were the maximum length of coding sequences identified by Applicants.

[0114] Due to this cDNA/coding sequence focus of the present application, the Reference and Sequence Tables were organized around cDNA and coding sequences. Each of these Maximum Length Sequences was assigned a unique identifier: Ceres Sequence ID NO, which is reported in the Tables.

[0115] All data that relate to these Maximum Length Sequences are grouped together, including 5′ & 3′ UTRs; transcription start sites; exon and intron boundaries in genomic sequence; protein sequence, etc.

[0116] Below, a more detailed explanation of the organization of the Reference and Sequence

[0117] Tables and how the data in the tables were generated is provided.

[0118] a. cDNA

[0119] Applicants have ascertained the sequences of mRNAs from different organisms by reverse transcription of mRNA to DNA, which was cloned and then sequenced. These complementary DNA or cDNA sequences also are referred to as Maximum Length Sequences in the Reference Tables, which contain details on each of the sequences in the Sequence Tables.

[0120] Each sequence was assigned a Pat. Appln. Sequence ID NO: and an internal Ceres Sequence ID NO: as reported in the Reference Table, the section labeled “(Ac) cDNA Sequence.” An example is shown below:
[0121] Max Len. Seq.:
[0122] (Ac) cDNA Sequence
   [0123] Pat. Appln. Sequence ID NO: 174538
   [0124] Ceres Sequence ID NO: 5673127

[0125] Both numbers are included in the Sequence Table to aid in tracking of information, as shown below:

<210> 174538 (Pat. Appln. Sequence ID NO:)
<211> 1846
<212> DNA (genomic)
<213> Arabidopsisthaliana
<220>
<221> misc_feature
<222> (1) . . . (1846)
<223> Ceres Seq. ID no. 5673127
<220>
<221> misc_feature
<222> () . . . ()
<223> n is a, c, t, g, unknown, or other
<400> 174538
acaagaacaa caaaacagag gaagaagaag aagaagatga agcttctggc tctgtttcca 60
tttctagcga tcgtgatcca actcagctgt . . . etc.

[0126] The Sequence Table and Miscellaneous Feature—Reference Tables are divided into sections by organism: Arabidopsis thaliana, Brassica napus, Glycine max, Zea mays, Triticum aestivum; and Oryza sativa.

[0127] b. Coding Sequence

[0128] The coding sequence portion of the cDNA was identified by using computer-based algorithms and comparative biology. The sequence of each coding sequence of the cDNA is reported in the “PolyP Sequence” section of the Reference Tables, which are also divided into sections by organism. An example shown below for the peptides that relate to the cDNA sequence above

### PolyP Sequence

[0129] Pat. Appln. Sequence ID NO 174539

[0130] Ceres Sequence ID NO 5673128

[0131] Loc. Sequence ID NO 174538: @ 1 nt.

[0132] Loc. Sig. P. Sequence ID NO 174539: @ 37 aa.

The polypeptide sequence can be found in the Sequence Tables by either the Pat. Appln. Sequence ID NO or by the Ceres Sequence ID NO: as shown below:

<210> 174539 (Pat. Appln. Sequence ID NO)
<211> 443
<212> PRT
<213> Arabidopsis thaliana
<220>
<221> peptide
<222> (1) . . . (443)
<223> Ceres Seq. ID no. 5673128
<220>
<221> misc feature
<222> () . . . ()
<223> xaa is any aa, unknown or other
<400> 174539
Thr Arg Thr Thr Lys Gln Arg Lys Lys Lys Lys Lys Met Lys Leu Leu
1 5 10 15
Ala Leu Phe Pro Phe Leu Ala Ile . . . etc.
25

[0133] The PolyP section also indicates where the coding region begins in the Maximum Length Sequence. More than one coding region may be indicated for a single polypeptide due to multiple potential translation start codons. Coding sequences were identified also by analyzing genomic sequence by predictive algorithms, without the actual cloning of a cDNA molecule from an mRNA. By default, the cDNA sequence was considered the same as the coding sequence, when Maximum Length Sequence was spliced together from a genomic annotation.

[0134] c. 5′ and 3′ UTR

[0135] The 5′ UTR can be identified as any sequence 5′ of the initiating codon of the coding sequence in the cDNA sequence. Similarly, the 3′ UTR is any sequence 3′ of the terminating codon of the coding sequence.

[0136] d. Transcription Start Sites

[0137] Applicants cloned a number of cDNAs that encompassed the same coding sequence but comprised 5′ UTRs of different lengths. These different lengths revealed the multiple transcription start sites of the gene that corresponded to the cDNA. These multiple transcription start sites are reported in the “Sequence # w. TSS” section” of the Reference Tables.

[0138] e. Exons & Introns

[0139] Alignment of the cDNA sequences and coding portions to genomic sequence permitted Applicants to pinpoint the exon/intron boundaries. These boundaries are identified in the Reference Table under the “Pub gDNA” section. That section reports the gi number of the public BAC sequence that contains the introns and exons of interest. An example is shown below:

[0140] Max Len. Seq.:

[0141] Pub gDNA:
[0142] gi No: 1000000005
[0143] Gen. seq. in cDNA:
   [0144] 115777 . . . 115448 by Method #1
   [0145] 115105 . . . 114911 by Method #1
   [0146] 114822 . . . 114700 by Method #1
   [0147] 114588 . . . 114386 by Method #1
   [0148] 114295 . . . 113851 by Method #1
   [0149] 115777 . . . 115448 by Method #2
   [0150] 115105 . . . 114911 by Method #2
   [0151] 114822 . . . 114700 by Method #2
   [0152] 114588 . . . 114386 by Method #2
   [0153] 114295 . . . 113851 by Method #2
   [0154] 115813 . . . 115448 by Method #3
   [0155] 115105 . . . 114911 by Method #3
   [0156] 114822 . . . 114700 by Method #3
   [0157] 114588 . . . 114386 by Method #3
   [0158] 114295 . . . 113337 by Method #3

[0159] (Ac) cDNA Sequence

[0160] All the gi numbers were assigned by Genbank to track the public genomic sequences except:

gi 1000000001
gi 1000000002
gi 1000000003
gi 1000000004; and
gi 1000000005.

[0161] These gi numbers were assigned by Applicants to the five Arabidopsis chromosome sequences that were published by the Institute of Genome Research (TIGR). Gi 1000000001 corresponds to chromosome 1, Gi 1000000002 to chromosome 2, etc.

[0162] The method of annotation is indicated as well as any similar public annotations.

[0163] f. Promoters & Terminators

Promoter sequences are 5′ of the translational start site in a gene; more typically, 5′ of the transcriptional start site or sites. Terminator sequences are 3′ of the translational terminator codon; more typically, 3′ of the end of the 3′ UTR.

[0164] For even more specifics of the Reference and Sequence Tables, see the section below titled “Brief Description of the Tables.”

[0165] I.B. Transcriptional (Differential Expression) Information—Introduction to Differential Expression Data & Analyses

[0166] A major way that a cell controls its response to internal or external stimuli is by regulating the rate of transcription of specific genes. For example, the differentiation of cells during organogenensis into forms characteristic of the organ is associated with the selective activation and repression of large numbers of genes. Thus, specific organs, tissues and cells are functionally distinct due to the different populations of mRNAs and protein products they possess. Internal signals program the selective activation and repression programs. For example, internally synthesized hormones produce such signals. The level of hormone can be raised by increasing the level of transcription of genes encoding proteins concerned with hormone synthesis.

[0167] To measure how a cell reacts to internal and/or external stimuli, individual mRNA levels can be measured and used as an indicator for the extent of transcription of the gene. Cells can be exposed to a stimulus, and mRNA can be isolated and assayed at different time points after stimulation. The mRNA from the stimulated cells can be compared to control cells that were not stimulated. The mRNA levels of particular Maxiumum Length Sequences that are higher in the stimulated cell versus the control indicate a stimulus-specific response of the cell. The same is true of mRNA levels that are lower in stimulated cells versus the control condition.

[0168] Similar studies can be performed with cells taken from an organism with a defined mutation in their genome as compared with cells without the mutation. Altered mRNA levels in the mutated cells indicate how the mutation causes transcriptional changes. These transcriptional changes are associated with the phenotype that the mutated cells exhibit that is different from the phenotype exhibited by the control cells.

[0169] Applicants use microarray techniques to measure the levels of mRNAs in cells from mutant plants, stimulated plants, and/or selected from specific organs. The differential expression of various genes in the samples versus controls are listed in the MA Tables.

[0170] a. Experimental Detail

[0171] A microarray is a small solid support, usually the size of a microscope slide, onto which a number of polynucleotides have been spotted onto or synthesized in distinct positions on the slide (also referred to as a chip). Typically, the polynucleotides are spotted in a grid formation. The polynucleotides can either be Maximum Length Sequences or shorter synthetic oligonucleotides, whose sequence is complementary to specific Maximum Length Sequence entities. A typical chip format is as follows:

| | | |
|---|---|---|
| Oligo #1 | Oligo #2 | Oligo #3 |
| Oligo #4 | Oligo #5 | Oligo #6 |
| Oligo #7 | Oligo #8 | Oligo #9 |

[0172] For Applicants' experiments, samples are hybridized to the chips using the “two-color” microarray procedure. A fluorescent dye is used to label cDNA reverse-transcribed from mRNA isolated from cells that had been stimulated, mutated, or collected from a specific organ or developmental stage. A second fluorescent dye of another color is used to label cDNA prepared from control cells.

[0173] The two differentially-labeled cDNAs are mixed together. Microarray chips are incubated with this mixture. For Applicants' experiments, the two dyes that are used are Cy3, which fluoresces in the red color range, and Cy5, which fluoresces in the green/blue color range. Thus, if:

[0174] cDNA#1 binds to Oligo #1;

[0175] cDNA#1 from the sample is labeled red;

[0176] cDNA#1 from the control is labeled green, and

[0177] cDNA#1 is in both the sample and control,

then cDNA#1 from both the sample and control will bind to Oligo#1 on the chip. If the sample has 10 times more cDNA#1 than the control, then 10 times more of the cDNA#1 would be hybridized to Oligo#1. Thus, the spot on the chip with Oligo#1 spot would look red.

[chemical structure]

If the situation were reversed, the spot would appear green. If the sample has approximately the same amount of cDNA#1 as the control, then the Oligo#1 spot on the chip would look yellow. These color differentials are measured quantitatively and used to deduce the relative concentration of mRNAs from individual genes in particular samples.

[0178] b. MA Table

To generate data, Applicants label and hybridize the sample and control mRNA in duplicate experiments. One chip is exposed to a mixture of cDNAs from both a sample and control, where the sample cDNA is labeled with Cy3, and the control is labeled with Cy5 dye. For the second labeling and chip hybridization experiments, the fluorescent labels are reversed; that is, the Cy5 dye is used for the sample, and the Cy3 dye is used for the control.

[0179] Whether Cy5 or Cy3 is used to label the sample, the fluorescence produced by the sample is divided by the fluorescence of the control. A cDNA is determined to be differentially expressed in response to the stimulus in question if a statistically-significantly ratio difference in the sample versus the control is measured by both chip hybridization experiments.

[0180] The MA tables show which cDNA is significantly up-regulated as designated by a “+” and which is significantly down-regulated as designated by a “−” for each pair of chips using the same sample and control.

[0181] I.C. PHENOTYPIC INFORMATION

[0182] One means of determining the phenotypic effect of a gene is either to insert extra active copies of the gene or coding sequence, or to disrupt an existing copy of the gene in a cell or organism and measure the effects of the genetic change on one or more phenotypic characters or traits. “Knock-in” is used herein to refer to insertion of additional active copies of a gene or coding sequence. Applicants use the addition of an additional copy(ies) to determine the phenotypic effects of the gene or gene products to discover the function of the genes and their utilities.

### Knock-in Results

[0183] The coding sequence of a desired protein can be functionally linked to a heterologous promoter to facilitate expression. Here, Applicants operably link a number of coding sequences to any one of the promoters listed below:

| | Specific Promoter | Plant Line |
|---|---|---|
| GFP Pattern | activity | Descriptor |
| Root epidermis/mostly toward the lower | Specific to the root basal | Root basal |
| region of root (more intense than CS9094) | region. | |
| Root-endodermis/cortex (initials sharp); | Specific to the root | Root/Petiole/Flowers |
| shoot-mesophyll of one leaf, sharp guard cell | endodermis-cortex | |
| marking. New leaf petioles near tip of | region, leaf petiole, and | |
| primary inflorescence; floral stems; in | flowers. | |
| flowers at base of sepal, anther stems, and | | |
| pistil | | |
| Broad root exp. (some dermal, some cortical, | Specific to root and stem. | Root/Stem1 |
| some vascular); shoot apex. Faintly in | | |
| petiole; stem | | |
| High expression in stem, excluded from 1st | Specific to stem and root. | Root/Stem2 |
| true leaves/High in root. Faint expression in | | |
| stem | | |
| Shoot meristem/whole root region; little bit | Specific to roots, shoot | Root/Stem/Leaves/Flowers |
| on cotyledons. Base of leaves(axillary | meristem, base of leaves | |
| meristem?); base of sepals; inflorescence | and flowers. | |
| meristem; small amount in unfertilized pistil. | | |
| root tip vascular initials; vascular system | Specific to vascular | Vascular/Ovule/Young |
| throughout plant; Bud petal vasculature and | systems. | Seed/Embryo |
| pistil septum; Flower petal vascualture; | | |
| Flower pistil septum; Pre fertilization ovules; | | |
| Post fertilization ovule at chalazal end; | | |
| Developing seed (young, maturing siliques); | | |
| Seed coat and young embryos. GFP not | | |
| observed in mature embryos. | | |
| Flower, sepal/vascular tissue of root, stem, | Specific to flowers, seed | Flowers/Seed/Vasculature/ |
| and cotyledons. Stems of new flowers; | and vasculature. | Embryo |
| vasculature or petals, anthers, sepals, and | | |
| pistil/silique; Vasculature throughtout | | |
| seedling: root, hypocotyl, petioles, stem, | | |
| cotyledons, first true leaves; Rosette | | |
| vasculature; Cauline leaf vasculature; Bud | | |
| pedicel vasculature; Flower vasculature: | | |
| (sepals, petals, filaments, pistil); Bud | | |
| vasculature (sepal, petal, filament, pistil); | | |
| Funiculus in both flower and bud; Some | | |
| possible seed coat expression; Silique | | |
| funiculus; Very faint fluorescence in mature | | |
| embryo (auto fluorescence perhaps); | | |
| Root expression - primarily in cortex (upper | Specific to root. | Roots2 |
| refion of the root). No shoot expression | | |
| Root expression - less intense in whole root | Specific to root and shoot | Root/SAM |
| of young seedling. Shoot apical meristem; | apical meristem. | |
| organ primordia in SAM region. | | |
| Root epidermis/tip; shoot epidermis/vascular; | Specific to seed and to | Seed/Epidermis/Ovary/ |
| leaf epidermis; expression in developing | epidermal layers of roots, | Fruit |
| seed/ovule - mature embryo; Primary and | shoots and leaves. | |
| lateral root cortex; Very strong in root cap; | | |
| Base of flower bud and epidermis of carpels; | | |
| Base of flower, epidermis of filaments, | | |
| epidermis of carpels; Trichomes; Weak | | |
| (hardly detectable) gfp expression in | | |
| vasculature throughout seedling; Strong | | |
| expression in trichomes; POST-fertilization | | |
| SEED only; GFP strength increases as | | |
| silique matures; Weak at suspensor end of | | |
| the embryo; GFP observed in seed coat; Root | | |
| and post fertilization seed specific gfp | | |
| expression; Expression in seed coat. | | |
| Young root dermis; dermal/cortical?/vascular | Specific to roots, shoots, | Roots/Shoots/Ovule |
| in older root; general (epidermal?) shoot | and ovules. | |
| expression; ovules. some in sepals; | | |
| vasculature of stem | | |
| Vascular tissue of root; Meristem tissues: | Specific to root structural | Vasculature/Meristem |
| axillary meristems, floral meristems, base of | leaf vascular region and | |
| flowers/sepals; Weak expression in | to floral buds and axillary | |
| hypocotyl, petiole and cotyledon vasculature. | meristem | |

[0184] The chimeric constructs are transformed into Arabidopsis thaliana. The resulting transformed lines are screened to determine what phenotypes are changed due to the introduced transgene. The phenotype changes, relative to the control, are reported in the Knock-in tables.

[0185] I.D. Brief Description of the Sequence Miscellaneous Features

### 1. Sequence Miscellaneous Feature—Reference Table and Sequence Table

[0186] The sequences of exemplary SDFs and polypeptides corresponding to the coding sequences of the instant invention are described in the Miscellaneous Feature—Reference Table and Sequence Table, which are sometimes referred to as the REF and SEQ Tables. The Reference Table refers to a number of “Maximum Length Sequences” or “MLS.” Each MLS corresponds to the longest cDNA obtained, either by cloning or by the prediction from genomic sequence. The sequence of the MLS is the cDNA sequence as described in the Av subsection of the Reference Table.

[0187] The Reference Table includes the following information relating to each MLS:

[0188] I. cDNA Sequence
[0189] A. 5′ UTR
[0190] B. Coding Sequence
[0191] C. 3′ UTR

[0192] II. Genomic Sequence
[0193] A. Exons
[0194] B. Introns
[0195] C. Promoters

[0196] III. Link of cDNA Sequences to Clone IDs

[0197] IV. Multiple Transcription Start Sites

[0198] V. Polypeptide Sequences
[0199] A. Signal Peptide
[0200] B. Domains
[0201] C. Related Polypeptides

[0202] VI. Related Polynucleotide Sequences

[0203] I. cDNA Sequence

[0204] The Reference Table indicates which sequence in the Sequence Table represents the sequence of each MLS. The MLS sequence can comprise 5′ and ˜3′ UTR as well as coding sequences. In addition, specific cDNA clone numbers also are included in the Reference Table when the MLS sequence relates to a specific cDNA clone.

[0205] A. 5′ UTR

[0206] The location of the 5′ UTR can be determined by comparing the most 5′ MLS sequence with the corresponding genomic sequence as indicated in the Reference Table. The sequence that matches, beginning at any of the transcriptional start sites and ending at the last nucleotide before any of the translational start sites corresponds to the 5′ UTR.

[0207] B. Coding Region

[0208] The coding region is the sequence in any open reading frame found in the MLS. Coding regions of interest are indicated in the PolyP SEQ subsection of the Reference Table.

[0209] C. 3′ UTR

[0210] The location of the 3′ UTR can be determined by comparing the most 3′ MLS sequence with the corresponding genomic sequence as indicated in the Reference Table. The sequence that matches, beginning at the translational stop site and ending at the last nucleotide of the MLS corresponds to the 3′ UTR.

[0211] II. Genomic Sequence

[0212] Further, the Reference Table indicates the specific “gi” number of the genomic sequence if the sequence resides in a public databank. For each genomic sequence, Reference tables indicate which regions are included in the MLS. These regions can include the 5′ and 3′ UTRs as well as the coding sequence of the MLS. See, for example, the scheme below:

[0213] The Reference Table reports the first and last base of each region that is included in an MLS sequence. An example is shown below:

[0214] gi No. 47000:

[0215] 37102 . . . 37497

[0216] 37593 . . . 37925

[0217] The numbers indicate that the MLS contains the following sequences from two regions of gi No. 47000; a first region including bases 37102-37497, and a second region including bases 37593-37925.

[0218] A. Exon Sequences

[0219] The location of the exons can be determined by comparing the sequence of the regions from the genomic sequences with the corresponding MLS sequence as indicated by the Reference Table.

[0220] i. Initial Exon

[0221] To determine the location of the initial exon, information from the

[0222] (1) polypeptide sequence section;

[0223] (2) cDNA polynucleotide section; and

[0224] (3) the genomic sequence section

[0225] of the Reference Table is used. First, the polypeptide section indicates where the translational start site is located in the MLS sequence. The MLS sequence can be matched to the genomic sequence that corresponds to the MLS. Based on the match between the MLS and corresponding genomic sequences, the location of the translational start site can be determined in one of the regions of the genomic sequence. The location of this translational start site is the start of the first exon.

[0226] Generally, the last base of the exon of the corresponding genomic region, in which the translational start site is located, will represent the end of the initial exon. In some cases, the initial exon ends with a stop codon, when the initial exon is the only exon.

[0227] In the case when sequences representing the MLS are in the positive strand of the corresponding genomic sequence, the last base will be a larger number than the first base. When the sequences representing the MLS are in the negative strand of the corresponding genomic sequence, then the last base will be a smaller number than the first base.

[0228] ii. Internal Exons

[0229] Except for the regions that comprise the 5′ and 3′ UTRs, initial exon, and terminal exon, the remaining genomic regions that match the MLS sequence are the internal exons. Specifically, the bases defining the boundaries of the remaining regions also define the intron/exon junctions of the internal exons.

[0230] iii. Terminal Exon

[0231] As with the initial exon, the location of the terminal exon is determined with information from the

[0232] (1) polypeptide sequence section;

[0233] (2) cDNA polynucleotide section; and

[0234] (3) the genomic sequence section

[0235] of the Reference Table. The polypeptide section will indicate where the stop codon is located in the MLS sequence. The MLS sequence can be matched to the corresponding genomic sequence. Based on the match between MLS and corresponding genomic sequences, the location of the stop codon can be determined in one of the regions of the genomic sequence. The location of this stop codon is the end of the terminal exon. Generally, the first base of the exon of the corresponding genomic region that matches the cDNA sequence, in which the stop codon is located, will represent the beginning of the terminal exon. In some cases, the translational start site represents the start of the terminal exon, which is the only exon.

[0236] In the case when the MLS sequences are in the positive strand of the corresponding genomic sequence, the last base will be a larger number than the first base. When the MLS sequences are in the negative strand of the corresponding genomic sequence, then the last base will be a smaller number than the first base.

[0237] B. Intron Sequences

[0238] In addition, the introns corresponding to the MLS are defined by identifying the genomic sequence located between the regions where the genomic sequence comprises exons. Thus, introns are defined as starting one base downstream of a genomic region comprising an exon, and end one base upstream from a genomic region comprising an exon.

[0239] C. Promoter Sequences

[0240] As indicated below, promoter sequences corresponding to the MLS are defined as sequences upstream of the first exon; more usually, as sequences upstream of the first of multiple transcription start sites; even more usually as sequences about 2,000 nucleotides upstream of the first of multiple transcription start sites.

[0241] III. Link of cDNA Sequences to Clone Ids

[0242] As noted above, the Reference Table identifies the cDNA clone(s) that relate to each MLS. The MLS sequence can be longer than the sequences included in the cDNA clones. In such a case, the Reference Table indicates the region of the MLS that is included in the clone. If either the 5′ or 3′ termini of the cDNA clone sequence is the same as the MLS sequence, no mention will be made.

[0243] IV. Multiple Transcription Start Sites

[0244] Initiation of transcription can occur at a number of sites of the gene. The Reference Table indicates the possible multiple transcription sites for each gene. In the Reference Table, the location of the transcription start sites can be either a positive or negative number.

[0245] The positions indicated by positive numbers refer to the transcription start sites as located in the MLS sequence. The negative numbers indicate the transcription start site within the genomic sequence that corresponds to the MLS.

[0246] To determine the location of the transcription start sites with the negative numbers, the MLS sequence is aligned with the corresponding genomic sequence. In the instances when a public genomic sequence is referenced, the relevant corresponding genomic sequence can be found by direct reference to the nucleotide sequence indicated by the “gi” number shown in the public genomic DNA section of the Reference Table. When the position is a negative number, the transcription start site is located in the corresponding genomic sequence upstream of the base that matches the beginning of the MLS sequence in the alignment. The negative number is relative to the first base of the MLS sequence that matches the genomic sequence corresponding to the relevant “gi” number.

[0247] In the instances when no public genomic DNA is referenced, the relevant nucleotide sequence for alignment is the nucleotide sequence associated with the amino acid sequence designated by “gi” number of the later PolyP SEQ subsection.

[0248] V. Polypeptide Sequences

[0249] The PolyP SEQ subsection lists SEQ ID NOs and Ceres SEQ ID NO for polypeptide sequences corresponding to the coding sequence of the MLS sequence and the location of the translational start site with the coding sequence of the MLS sequence.

[0250] The MLS sequence can have multiple translational start sites and can be capable of producing more than one polypeptide sequence.

[0251] A. Signal Peptide

[0252] The Reference tables also indicate in subsection (B) the cleavage site of the putative signal peptide of the polypeptide corresponding to the coding sequence of the MLS sequence. Typically, signal peptide coding sequences comprise a sequence encoding the first residue of the polypeptide to the cleavage site residue.

[0253] B. Domains

[0254] Subsection (C) provides information regarding identified domains (where present) within the polypeptide and (where present) a name for the polypeptide domain.

[0255] C. Related Polypeptides

[0256] Subsection (Dp) provides (where present) information concerning amino acid sequences that are found to be related and have some percentage of sequence identity to the polypeptide sequences of the Reference and Sequence Tables. Each of these related sequences is identified by a “gi” number.

[0257] VI. Related Polynucleotide Sequences

[0258] Subsection (Dn) provides polynucleotide sequences (where present) that are related to and have some percentage of sequence identity to the MLS or corresponding genomic sequence.

| Abbreviation | Description |
|---|---|
| Max Len. Seq. | Maximum Length Sequence |
| rel to | Related to |
| Clone Ids | Clone ID numbers |
| Pub gDNA | Public Genomic DNA |
| gi No. | gi number |
| Gen. Seq. in Cdna | Genomic Sequence in cDNA |
| | (Each region for a single gene prediction is |
| | listed on a separate line. |
| | In the case of multiple gene predictions, the |
| | group of regions relating to a single prediction |
| | are separated by a blank line) |
| (Ac) cDNA SEQ | cDNA sequence |
| Pat. Appln. SEQ ID NO | Patent Application SEQ ID NO: |
| Ceres SEQ ID NO: | Ceres SEQ ID NO: |
| 1673877 | |
| SEQ # w. TSS | Location within the cDNA sequence, SEQ ID |
| | NO:, of Transcription Start Sites which are |
| | listed below |
| Clone ID #: # -> # | Clone ID comprises bases # to # of the cDNA |
| | Sequence |
| PolyP SEQ | Polypeptide Sequence |
| Pat. Appln. SEQ ID NO: | Patent Application SEQ ID NO: |
| Ceres SEQ ID NO | Ceres SEQ ID NO: |
| Loc. SEQ ID NO: @ nt. | Location of translational start site in cDNA of |
| | SEQ ID NO: at nucleotide number |
| (C) Pred. PP Nom. & | Nomination and Annotation of Domains within |
| Annot. | Predicted Polypeptide(s) |
| (Title) | Name of Domain |
| Loc. SEQ ID NO #: | Location of the domain within the polypeptide |
| # -> # aa. | of SEQ ID NO: from # to # amino acid |
| | residues. |
| (Dp) Rel. AA SEQ | Related Amino Acid Sequences |
| Align. NO | Alignment number |
| gi No | Gi number |
| Desp. | Description |
| % Idnt. | Percent identity |
| Align. Len. | Alignment Length |
| Loc. SEQ ID NO: | Location within SEQ ID NO: from # to # |
| # -> # aa | amino acid residue. |

### 2. Sequence Miscellaneous Feature—MA_Table

[0259] The MA Table presents the results of the differential expression experiments for the mRNAs, as reported by their corresponding cDNA ID number, that were differentially transcribed under a particular set of conditions as compared to a control sample. The cDNA ID numbers correspond to those utilized in the Reference and Sequence Tables. Increases in mRNA abundance levels in experimental plants versus the controls are denoted with the plus sign (+). Likewise, reductions in mRNA abundance levels in the experimental plants are denoted with the minus (−) sign.

[0260] The “cDNA_ID” provides the identifier number for the cDNA tracked in the experiment. The column headed “SHORT_NAME” (e.g. At_{—}0.001%_MeJA_cDNA_P) provides a short description of the experimental conditions used. The column headed “EXPT_REP_ID” provides an identifier number for the particular experiment conducted. The values in the column headed “Differential” indicate whether expression of the cDNA was increased (+) or decreased (−) compared to the control.

[0261] The data following the expression results provides the experimental parameters used in conducting the microarray experiment. Again, the “SHORT_NAME” identifies the experiment (e.g. At_{—}0.001% MeJA_cDNA_P). The first column, “EXPT_REP_JD,” indicates the individual experiment. (e.g. 108569). The second column, “PARAM_NAME,” identifies the parameter used(e.g. Timepoint (hr)), while the third column, “VALUE” provides the descriptor for the particular parameter (e.g. “6”). As an example, when read together one understands that the “Methyl Jasmonate” section of the Specification provides information pertinent to the 0.001% MeJA (methyl jasmonate) experiment 108569, which contains data taken from a 6 hr Timepoint.

### 3. Sequence Miscellaneous Feature—MA_PARAMETERS Table

[0262] This table provides the experimental parameters used in conducting the microarray experiments. The first entry provides the “Short Name” for the experiment (e.g. At_{—}0.001%_MeJA_cDNA_P). The next entry is the “Experiment ID” number. The third entry is the particular parameter being described (e.g. Timepoint (hr)). The last entry is the descriptor for the particular parameter (e.g. “6”). As an example, when read together one understands that the 0.001% MeJA (methyl jasmonate) experiment 108569 contains data taken from a 6 hr Timepoint.

### 4. Sequence Miscellaneous Feature—Ortholog List Table

[0263] This table lists pairs of orthologs. The left column contains a cDNA_id number corresponding to a sequence from Arabidopsis, wheat, corn, soybean or canola. The right column contains the cDNA_id number of the orthologous sequence, based on sequence identity at the protein level, from Arabidopsis, soybean or maize.

### 5. Sequence Miscellaneous Feature —PHENO_DATA Table

[0264] This table provides information regarding the phenotype associated with expression of particular cDNAs. The first column identifies the cDNA_id or clone_id number of the sequence associated with the experiment.

[0265] The “promoter” column identifies the promoter used to drive expression of the cDNA. “35S” refers to the Cauliflower Mosaic Virus (CMV) 35S promoter while the remaining entries signify a particular cDNA_id number. The endogenous promoter for the identified cDNA sequence, located immediately upstream from the cDNA start site, was used.

[0266] The “line_id” column gives the identifier number associated with the transformed plant.

[0267] The “phenotype present?” column identifies whether a gross visual phenotype was present.

[0268] The “phenotype observed” column describes the phenotype associated with the plant transformed with the particular cDNA_id or clone_id. The term “[NULL]” appears when no gross visual phenotype was present.

### II. HOW THE INVENTIONS REVEAL HOW GENES, GENE COMPONENTS AND PRODUCTS FUNCTION

[0269] The different experimental molecular genetic approaches focused on different aspects of genes, gene components, and gene products of the inventions. The variety of the data demonstrates the multiple functions and characteristics of single genes, gene components, and products. The data also explain the pathways and networks in which individual genes and products participate and interact. As a result, the circumstances or conditions are now known when these genes and networks are active. These new understandings of biology are relevant for many plant species. The following section describes the process by which Applicants analyze the experimental results relavent to the present invention.

[0270] II.A. Experimental Results Reveal Many Facets of a Single Gene

[0271] The experimental results are used to dissect the function of individual components and products of the genes. For example, the biochemical activity of the encoded protein is surmised from sequence analyses, and promoter specificity is identified through transcriptional analyses. Generally, the data presented herein is used to functionally annotate either the protein sequence and/or the regulatory sequence that controls transcription and translation.

[0272] II.A.1. Functions of Coding Sequences Revealed by the Ceres Genomic Engine

[0273] II.A.1.a. Sequence Similarity To Proteins Of Known Function Can Be Used To Associate Biochemical Activities And Molecular Interaction To The Proteins Of The Invention

[0274] The protein sequences of the invention are analyzed to determine if they shared any sequence characteristics with proteins of known activity. Proteins are grouped together based on sequence similarity, either localized or throughout the length of the proteins. Typically, such groups of proteins exhibit common biochemical activities or interact with similar molecules.

[0275] II.A.1.a. 1. Presence Of Amino Acid Motifs Indicates Biological Function

[0276] Localized protein sequence similarity, also referred to as amino acid motifs, have been attributed to enzyme or protein functions. A library of motifs, important for function, have been documented in PROSITE, a public database available on the internet. This library includes descriptions of the motifs and their functions. The zinc finger motif is one such entry in PROSITE, which reports that the zinc finger domain of DNA-binding proteins is typically defined by a 25-30 amino acid motif containing specific cysteine or histidine residues that are involved in the tetrahedral coordination of a zinc ion. Any protein comprising a sequence similar to the zinc finger amino acid motif will have similar functional activity (specific binding of DNA).

[0277] Protein sequences of the invention have been compared to a library of amino acid motifs in the pFAM database, which is linked to the PROSITE database. If any of Applicants' protein sequences exhibit similarity to these amino acid motifs or domains, the Reference Table notes the name and location of the motif in the “Pred. PP Nom. & Annot” section of the Reference tables For example, polypeptide, CERES Sequence ID NO: 1545823 is associated with zinc finger motif as follows in the Reference Table:

[0278] (C) Pred. PP Nom. & Annot.
[0279] Zinc finger, C3HC4 type (RING finger)
[0280] Loc. Sequence ID NO 133059: 58->106 aa.

[0281] II.A.1.a.2. Related Amino Acid Sequences Share Similar Biological Functions

[0282] When studying protein sequence families, it is apparent that some regions have been better conserved than others during evolution. These regions are generally important for the function of a protein and/or for the maintenance of its three-dimensional structure.

[0283] The Reference Table reports in section “(Dp) Rel. AA Sequence” when a protein shares amino acid similarity with a protein of known activity. The section reports the gi number of the protein of known activity, a brief description of the activity, and the location where it shares sequence similarity to Applicants' polypeptide sequence.

[0284] Using this analysis, biochemical activity of the known protein is associated with Applicants' proteins. An example for the polypeptide described above is as follows:

[0285] (Dp) Rel. AA Sequence
[0286] Align. NO 524716
[0287] gi No 2502079
[0288] Desp.: (AF022391) immediate early protein; ICP0 [Feline herpesvirus 1]
[0289] % Idnt.: 33.7
[0290] Align. Len.: 87
[0291] Loc. Sequence ID NO 133059: 52->137 aa.

[0292] II.A.1.b. Differential Expression Results Explain In Which Cellular Responses The Proteins Of The Invention Are Involved

[0293] Differential expression results show when the coding sequence is transcribed, and therefore when the activity of the protein is deployed by the cell. Similar coding sequences can have very different physiological consequences because the sequences are expressed at different times or places, rather than because of any differences in protein activity. Therefore, modified levels (increased or decreased) of expression as compared to a control provide an indication of the function of a corresponding gene, gene components, and gene products.

[0294] These experiments can determine which are genes “over-expressed” under a given stimulus. Such over-expressed genes give rise to higher transcript levels in a plant or cell that is stimulated as compared to the transcript levels of the same genes in a control organism or cell. Similarly, differential expression experiments can reveal “under-expressed” genes.

[0295] To increase the cellular response to a stimulus, additional copies of the coding sequences of a gene that is over-expressed are inserted into a cell. Increasing transcript levels of an over-expressed gene can heighten or prolong the particular cellular response. A similar enhancement can occur when transcription of an under-expressed gene is inhibited. In contrast, the cellular response will be shortened or less severe when the over-expressed genes are inhibited or when expression of the under-expressed genes are increased.

[0296] In addition to analyzing the levels of transcription, the data are also analyzed to gain insight into the changes in transcription over time. That is, while the plants in the experiments were reacting to either an external or internal stimulus, a differential experiment takes a snapshot of the transcription levels in the cells at one specific time. However, a number of snap-shots can be taken at different time points during an external stimulus regime, or at different stages of development during an internal stimulus. These results show how the plant changes transcription levels over time, and therefore protein levels, in response to specific stimuli to produce phenotypic changes. These results show that a protein is implicated in a single, but more likely, in a number of cellular responses.

[0297] II.A.1.b.1. The Transcript Levels Of A Protein Over Time In Response To A Stimuli Are Revealed By Transcriptional Analyses Over Many Experiments

[0298] Applicants produce data from plants at different times after a specific stimulus. These results show whether the expression level of a gene spikes at a key moment during the cellular response, or whether the transcript level remains constant. Thus, coding sequences are not only determined to be over- or under-expressed, but are also classified by the initial timing and duration of differential expression. This understanding of timing is used to increase or decrease any desired cellular response.

[0299] Generally, Applicants assay plants at 2 to 4 different time points after exposing the plants to the desired stimuli. From these experiments, “early” and “late” responders are identified. These labels are applied to either the regulatory sequences driving transcription of the gene as well as to the protein encoded by the gene.

[0300] The following example illustrates how the genes, gene components and products are classified as either early or late responders following a specific treatment. The mRNAs from plants exposed to drought conditions are isolated 1 hour and 6 hours after exposure to drought conditions. These mRNAs are tested utilizing microarray techniques. The graph below illuminates possible transcription profiles over the time course, plotting all the (+) data points as +1 and all the (−) data points as −1:

[0301] (The value for each time point is determined using a pair of microarray chips as described above.)

[0302] Data acquired from this type of time course experiment are useful to understand how to increase or decrease the speed of the cellular response. Inserting extra copies of the coding sequence of early responders into a cell in order to over-express the specific gene triggers a faster cellular response. Alternatively, coding sequences of late responders that are over-expressed are placed under the control of promoters of early responders as another means to increase the cellular response.

[0303] Inserting anti-sense or sense mRNA suppression constructs of the early responders that are over-expressed retards action of the late responders, thereby delaying the desired cellular response.

[0304] In another embodiment, extra copies of the promoters of both early and late responders are added to inhibit expression of both types of over-expressed genes.
[0305] The experiments described herein are grouped together to determine the time course of the transcript levels of different coding sequences in response to different stimuli.

[0306] II.A.1.b.2. The Transcript Levels Of A Protein Over Different Developmental Stages Can Be Identified By Transcriptional Analyses Over Many Experiments

[0307] Differential expression data are produced for different development stages of various organs and tissues. Measurement of transcript levels divulges whether specific genes give rise to spikes of transcription at specific times during development, or whether transcription levels remain constant. This understanding is used to increase speed of development, or to arrest development at a specific stage.

[0308] Like the time-course experiments, the developmental stage data classifies genes as being transcribed at early or late stages of development. Generally, Applicants assay different organs or tissues at 2-4 different stages.

[0309] Inhibiting under-expressed genes at either early or late stages triggers faster development times. The overall development time is also increased by this means to allow organs and tissue to grow to a larger size or to allow more organs or tissues to be produced. Alternatively, coding sequences of late stage genes that are under-expressed are placed under the control of promoters of early stage genes to increase development.

[0310] Inserting extra copies of the coding sequence of early stage genes that are under-expressed retards action of the late-stage genes and delays the desired development.

[0311] Fruit development of Arabidopsis is one example. Siliques of varying sizes, which are representative of different stages, are assayed by microarray techniques. Specifically, mRNA is isolated from siliques between 0-5 mm, between 5-10 mm and >10 mm in length.

[0312] This graph shows the expression pattern of a cell wall synthesis gene, cDNAID 1595707, during fruit development.

[0313] The developmental course shows that the gene encoding a cell wall synthesis protein is up-regulated when the fruit is 0-5 mm, but returns to normal levels at 5-10 mm and >10 mm. Increase of cell wall synthesis leads to larger cells and/or greater number of cells. This type of increase boosts fruit yield. The coding sequence of the cell wall synthesis protein under the control of a strong early stage promoter increases fruit size or number.

[0314] A pectinesterase gene, cDNA ID 1396123, is also differentially expressed during fruit development. Pectinesterase catalyzes the hydrolysis of pectin into pectate and methanol. This biochemical activity plays an important role in cell wall metabolism during fruit ripening. To shorten the time for fruit ripening, extra copies of this gene with its endogenous promoter are inserted into a desired plant. With its native promoter, the extra copies of the gene are expressed at the normal time, to promote extra pectinesterase at the optimal stage of fruit development and thereby shorten ripening time.

[0315] II.A.1.b.3. Proteins That Are Common In A Number Of Similar Responses Can Be Identified By Transcriptional Analyses Over A Number Of Experiments

[0316] The differential expression experiments also reveal the genes, and therefore the coding sequence, that are common to a number of cellular responses. By identifying the genes that are differentially expressed in a number of similar responses, the genes at the nexus of a range of responses are discovered. For example, genes that are differentially expressed in all the stress responses are at the hub of many of the stress response pathways.

[0317] These types of nexus genes, proteins, and pathways are differentially expressed in many or a majority of the responses or developmental conditions of interest. Typically, a nexus gene, protein or pathway is differentially expressed in generally the same direction in many or majority of all the desired experiments. By doing so, the nexus gene is responsible for triggering the same or similar set of pathways or networks for various cellular responses. This type of gene is useful in modulating pleiotropic effects or triggering or inhibiting a general class of responses.

[0318] When nexus genes are differentially expressed in a set of responses, but in different directions, these data indicate that a nexus gene is responsible for creating the specificity in a response by triggering the same pathway, but to a different degree. Placing such nexus genes under a constitutive promoter to express the proteins at a more constant level removes the fluctuations. For example, a plant that is better drought adapted, but not cold adapted is modified to be tolerant to both conditions by placing a nexus gene that is up-regulated in drought but down regulated in cold under the control of a constitutive promoter.

[0319] Applicants' experiments are grouped together to identify such nexus genes. Examples of these groups are as follows:
[0320] Herbicide Response
[0321] Trimec, Finale, Glean, Round-up Stress Response
[0322] Drought, Cold, Heat, Osmotic Stress
[0323] Drought, Cold, Heat, PEG, Trimec, Finale, Glean, Round-up
[0324] Wounding, SA, MeJA, Reactive Oxygen, NO
[0325] Hormone Responses
[0326] NAA, BA, BR, GA,
[0327] NAA, Trimec

[0328] II.A.1.b.4. Proteins That Are Common To Disparate Responses Can Be Identified By Transcriptional Analyses Over A Number Of Experiments

[0329] Phenotypes and traits result from complex interactions between cellular pathways and networks. The pathways that are linked by expression of common genes to specify particular traits is discerned by identifying the genes that show differential expression of seemingly disparate responses or developmental stages. For example, hormone fluxes in a plant direct cell patterning and organ development. Genes that are differentially expressed both in the hormone experiments and organ development experiments are of particular interest to control plant development.

[0330] Examples Of Such Pathway Interactions Include:

[0331] The Interaction Between Stress Tolerance Pathways And Metabolism Pathways;

[0332] (ii) Interaction Between Hormone Responses And Developmental Changes In The Plant;

[0333] (iii) Interactions Between Nutrient Uptake And Developmental Changes;

[0334] (iv) Mediation Of Stress Response By Hormone Responses; and

[0335] (v) Interactions Between Stress Response And Development.

[0336] II.A.1.c. Observations Of Phenotypic Changes Show What Physiological

[0337] Consequences Applicants' Proteins Can Produce Another direct means of determining the physiological consequences of a protein is to make aberrant decreases or increases of its expression level in a cell. To this end, Applicants produce plants that include an extra expressed copy of the gene. The plants are then planted under various conditions to determine if any visible physiological changes are caused. These changes then are attributed to the changes in protein levels.

[0338] II.B. Experimental Results Also Reveal the Functions of Genes

[0339] II.B.1. Linking Signature Sequences to Conservation of Biochemical Activities and Molecular Interactions

[0340] Proteins that possess the same defined domains or motifs are likely to carry out the same biochemical activity or interact with a similar class of target molecule, e.g., DNA, RNA, proteins, etc. Thus, the pFAM domains listed in the Reference Tables are routinely used as predictors of these properties. Substrates and products for the specific reactions vary from protein to protein. Where the substrates, ligands, or other molecules bound are identical, the affinities may differ between the proteins. Typically, the affinities exhibited by different functional equivalents varies no more than 50%; more typically, no more than 25%; even more typically, no more than 10%; or even less.

[0341] Proteins with very similar biochemical activities or molecular interactions share similar structural properties, such as substrate grooves, as well as sequence similarity in more than one motif. Usually, the proteins share at least two motifs of the signature sequence; more usually, three motifs; even more usually four motifs or greater. Typically, the proteins exhibit 70% sequence identity in the shared motifs; more typically, 80% sequence identity; even more typically, 90%, 95%, 96%, 97%, 98% or 99% sequence identity or greater. These proteins also often share sequence similarity in the variable regions between the constant motif regions. Further, the shared motifs are in the same order from amino- to carboxyl-termini. The length of the variable regions between the motifs in these proteins, generally, is similar. Specifically, the number of residues between the shared motifs in these proteins varies by less than 25%; more usually, varies by less than 20%; even more usually, less than 15%; even more usually less than 10% or even less.

[0342] II.B.2. Linking Signature Sequences to Conservation of Cellular Responses or Activities

[0343] Proteins that exhibit similar cellular responses or activities will possess the structural and conserved domain/motifs as described in the Biochemical Activities and Molecular Interactions above.

[0344] Proteins play a larger role in cellular response than just their biochemical activities or molecular interactions suggest. For example, a protein can initiate gene transcription that is specific to the drought response of a cell. Other cellular responses and activities include: stress responses, hormonal responses, growth and differential of a cell, cell to cell interactions, etc.

[0345] The cellular role or activities of a protein are deduced by transcriptional analyses or phenotypic analyses as well as by determining the biochemical activities and molecular interactions of the protein. For example, transcriptional analyses indicate that transcription of gene A is greatly increased during flower development. Such data implicates protein A, encoded by gene A, in the process of flower development. Proteins that share sequence similarity in more than one motif also act as functional equivalents for protein A during flower development.

### III. DESCRIPTION OF THE GENES, GENE COMPONENTS AND PRODUCTS, TOGETHER WITH THEIR USE AND APPLICATION

[0346] As described herein, Applicants provide an understanding of the function and phenotypic implications of the genes, gene components and products of the present invention. Bioinformatic analysis provides such information. The sections of the present application containing the bioinformatic analysis, together with the Sequence and Reference Tables, teach those skilled in the art how to use the genes, gene components and products of the present invention to provide plants with novel characteristics. Similarly, differential expression analysis provides additional such information and the sections of the present application on that analysis describe the functions of the genes, gene components and products of the present invention which are understood from the results of the differential expression experiments. The same is true with respect to the phenotype data, where the results of the Knock-in experiments and the sections of the present application on those experiments provide the skilled artisan with further description of the functions of the genes, gene components and products of the present invention.

[0347] As a result, one reading each of these sections of the present application as an independent report will understand the function of the genes, gene components and products of the present invention. But those sections and descriptions can also be read in combination, in an integrated manner, to gain further insight into the functions and uses for the genes, gene components and products of the present invention. Such an integrated analysis does not require extending beyond the teachings of the present application, but rather combining and integrating the teachings depending upon the particular purpose of the reader.

[0348] Some sections of the present application describe the function of genes, gene components and products of the present invention with reference to the type of plant tissue (e.g. root genes, leaf genes, etc.), while other sections describe the function of the genes, gene components and products with respect to responses under certain conditions (e.g. Auxin-responsive genes, heat-responsive genes, etc.). Thus, if one desires to utilize a gene understood from the application to be a particular tissue-type of gene, then the condition-specific responsiveness of that gene is understood from the differential expression tables, and very specific characteristics of actions of that gene in a transformed plant is understood by recognizing the overlap or intersection of the gene functions as understood from the two different types of information. Thus, for example, if one desires to transform a plant with a root gene for enhancing root growth and performance, one knows the useful root genes from the results reported in the knock-in table. A review of the differential expression data also shows that a specific root gene is over-expressed in response to heat and osmotic stress as well. The function of that gene is then described in (1) the section of the present application that discusses root genes, (2) the section of the present application that discusses heat-responsive genes, and (3) the section of the application that discusses osmotic stress-responsive genes. The function(s) that are commonly described in those three sections are then particularly characteristic of a plant transformed with that gene. This type of integrated analysis of data is viewed from the following schematic that summarizes, for one particular gene, the function of that gene as understood from the phenotype and differential expression experiments.

| Gene function known | Gene function known | Gene function known |
|---|---|---|
| from phenotype | from first differential | from second differential |
| experiments | expression experiment | expression experiment |
| Function A | Function A | Function A |
| Function B | | |
| | Function C | Function C |
| | Function D | |
| | | Function E |
| Function F | Function F | Function F |
| Function G | Function G | |
| | | Function H |
| Function I | | Function I |
| | Function J | |

[0349] In the above example, one skilled in the art will understand that a plant transformed with this particular gene particularly exhibits functions A and F because those are the functions which are understood in common from the three different experiments.

[0350] Similar analyses can be conducted on various genes of the present invention, by which one skilled in the art effectively modulates plant functions depending upon the particular use or conditions envisioned for the plant.

[0351] III.A. Organ-Affecting Genes, Gene Components, Products (Including Differentiation and Function)

[0352] III.A.1. Root Genes, Gene Components and Products

[0353] The economic values of roots arise not only from harvested adventitious roots or tubers, but also from the ability of roots to funnel nutrients to support growth of all plants and increase their vegetative material, seeds, fruits, etc. Roots have four main functions. First, they anchor the plant in the soil. Second, they facilitate and regulate the molecular signals and molecular traffic between the plant, soil, and soil fauna. Third, the root provides a plant with nutrients gained from the soil or growth medium. Fourth, they condition local soil chemical and physical properties.

[0354] Root genes are active or potentially active to a greater extent in roots than in most other organs of the plant. These genes and gene products regulate many plant traits from yield to stress tolerance. Root genes are used to modulate root growth and development.

[0355] III.A.2. Root Hair Genes, Gene Components and Products

[0356] Root hairs are specialized outgrowths of single epidermal cells termed trichoblasts. In many and perhaps all species of plants, the trichoblasts are regularly arranged around the perimeter of the root. In Arabidopsis, for example, trichoblasts tend to alternate with non-hair cells or atrichoblasts. This spatial patterning of the root epidermis is under genetic control, and a variety of mutants have been isolated in which this spacing is altered or in which root hairs are completely absent, such as the rhl mutant. Some surface cells of roots develop into single epidermal cells termed trichoblasts or root hairs. Some of the root hairs persist for the life of the plant; others gradually die back and some cease to function due to external influences.

[0357] Root hairs are also sites of intense chemical and biological activity and as a result strongly modify the soil they contact. Some roots hairs are coated with surfactants and/or mucilage to facilitate these activities. Specifically, roots hairs are responsible for nutrient uptake by mobilizing and assimilating water, reluctant ions, organic and inorganic compounds and chemicals. In addition, they attract and interact with beneficial microfauna and flora. Root hairs also help to mitigate the effects of toxic ions, pathogens and stress. Examples of root hair properties and activities that root hairs modulate include root hair surfactant and mucilage, nutrient uptake, microbe and nematode associations, oxygen transpiration; detoxification effects of iron, aluminum, cadium, mercury, salt, and other soil constituents, pathogens, glucosinolates, changes in soil and rhizosheath.

[0358] The root and root hairs uptake of the nutrients contributes to a source-sink effect in a plant. The greater the source of nutrients, the more sinks, such as stems, leaves, flowers, seeds, fruits, etc. can draw sustenance to grow. Thus, root hair genes modulate the vigor and yield of the plant overall, as well as of distinct cells, organs, or tissues of a plant.

### III.A.3. Leaf Genes, Gene Components and Products

[0359] Leaves are responsible for producing most of the fixed carbon in a plant and are critical to plant productivity and survival. Great variability in leaf shapes and sizes is observed in nature. Leaves also exhibit varying degrees of complexity, ranging from simple to multi-compound. Leaf genes, as defined here, not only modulate leaf morphology, but also influence the shoot apical meristem, thereby affecting leaf arrangement on the shoot, internodes, nodes, axillary buds, photosynthetic capacity, carbon fixation, photorespiration and starch synthesis. Leaf genes elucidated here are used to modify a number of traits of economic interest including leaf shape, plant yield, stress tolerance, and to modify both the efficiency of synthesis and accumulation of specific metabolites and macromolecules (including carbohydrates, proteins, oils, waxes, etc).

### III.A.4. Trichome Genes and Gene Components

[0360] Trichomes, defined as hair-like structures that extend from the epidermis of aerial tissues, are present on the surface of most terrestrial plants. Plant trichomes display a diverse set of structures, and many plants contain several types of trichomes on a single leaf. The presence of trichomes increases the boundary layer thickness between the epidermal tissue and the environment, and reduce heat and water loss. In many species, trichomes protect the plant against insect or pathogen attack, either by secreting chemical components or by physically limiting insect access to or mobility on vegetative tissues. The stellate trichomes of Arabidopsis do not have a secretory anatomy, but at a functional level they limit herbivore access to the leaf in the field. In addition, trichomes are known to secrete economically valuable substances, such as menthol in mint plants.

[0361] Trichome differentiation is integrated with leaf development, hormone levels and the vegetative development phase. The first trichome at the leaf tip appears only after the leaf grows to ˜100 μm in length. Subsequent events proceed basipetally as the leaf grows. As leaf development progresses, cell division patterns become less regular and islands of dividing cells are observed among differentiated pavement cells with their characteristic lobed morphology. Trichome initiation in the expanding leaf occurs within these islands of cells and often defines points along the perimeter of a circle, with an existing trichome defining the center.

[0362] Once a cell enters the trichome pathway it undergoes an elaborate morphogenesis program that has been divided into different stages based on specific morphological hallmarks. In addition, the glandular trichomes from various species secrete and, sometimes locally synthesize, a number of substances including salt, monoterpenes and sesquiterpenes, terpenoids, exudate, insect entrapping substances, antifeedants and pheromones.

[0363] The trichome genes are used to modulate the number, structure and biochemistry of trichomes.

### III.A5. Chloroplast Genes, Gene Components and Products

[0364] The chloroplast is a complex and specialized organelle in plant cells. Its complexity comes from the fact that it has at least six suborganellar compartments subdivided by double-membrane envelopes and internal thylakoid membranes. It is specialized to carry out different biologically important processes including photosynthesis and amino acid and fatty acid biosynthesis. The biogenesis and development of the chloroplast from its progenitor (the proplasptid) and the conversion of one form of plastid to another (e.g., from chloroplast to amyloplast) depends on several factors that include the developmental and physiological states of the cells.

[0365] One of the contributing problems that complicates the biogenesis of the chloroplast is the fact that some, if not most, of its components must come from outside of the organelle itself The import mechanisms must take into account what part within the different sub-compartments the proteins are being targeted; hence the proteins being imported from the cytoplasm must be able to cross the different internal membrane barriers before they can reach their destinations. The import mechanism must also take into account how to tightly coordinate the interaction between the plastid and the nucleus such that both nuclear and plastidic components are expressed in a synchronous and orchestrated manner. As a cosequence, changes in the developmental and physiological conditions within or surrounding plant cells change this tight coordination and therefore also change how import mechanisms are regulated. Manipulation of these conditions and modulation of expression of the import components and their functions have critical and global consequences to the development of the plant and to several biochemical pathways occurring outside the chloroplast.

[0366] Chloroplast genes are useful to modulate growth and development, including plastid biogenesis, plastid division, plastid development and thylakoid membrane structures. They are also useful for altering differentiation including plastid/chloroplast differentiation, photosynthesis, transport, phosphate translocation, targeted starch deposition and accumulation, and biosynthesis of essential compounds such as lipid biosynthesis, riboflavin biosynthesis, carotenoid biosynthesis, and aminoacid biosynthesis.

[0367] III.A.6. Reproduction Genes, Gene Components and Products

[0368] Reproduction genes are defined as genes or components of genes capable of modulating any aspect of sexual reproduction from flowering time and inflorescence development to fertilization and finally seed and fruit development. These genes are of great economic interest as well as biological importance. The fruit and vegetable industry grosses over $1 billion USD a year. The seed market, valued at approximately $15 billion USD annually, is even more lucrative.

### Inflorescence and Floral Development Genes, Gene Components And Products

[0369] During reproductive growth the plant enters a program of floral development that culminates in fertilization, followed by the production of seeds. Senescence may or may not follow. Flower formation is a precondition for the sexual propagation of plants and is therefore essential for propagation of plants that cannot be propagated vegetatively, as well as for the formation of seeds and fruits. The point of time at which the vegetative growth of plants changes into flower formation is of vital importance in agriculture, horticulture and plant breeding. Also, the number of flowers is often of economic importance, for example in the case of various useful plants (tomato, cucumber, zucchini, cotton etc.) where an increased number of flowers leads to an increased yield, or in the case of ornamental plants and cut flowers.

[0370] Flowering plants exhibit one of two types of inflorescence architecture: (1) indeterminate, in which the inflorescence grows indefinitely, or (2) determinate, in which a terminal flower is produced. Adult organs of flowering plants develop from groups of stem cells called meristems. The identity of a meristem is inferred from structures it produces: vegetative meristems give rise to roots and leaves, inflorescence meristems give rise to flower meristems, and flower meristems give rise to floral organs such as sepals and petals. Not only are meristems capable of generating new meristems of a different identity, but their own identity can change during development. For example, a vegetative shoot meristem can be transformed into an inflorescence meristem upon floral induction, and in some species, the inflorescence meristem itself will eventually become a flower meristem. Despite the importance of meristem transitions in plant development, little is known about the underlying mechanisms.

[0371] Following germination, the shoot meristem produces a series of leaf meristems on its flanks. However, once floral induction has occurred, the shoot meristem switches to the production of flower meristems. Flower meristems produce floral organ primordia, which individually develop into sepals, petals, stamens or carpels. Thus, flower formation can be thought of as a series of distinct developmental steps, i.e. floral induction, the formation of flower primordia and the production of flower organs. Mutations disrupting each of the steps have been isolated in a variety of species, suggesting that a genetic hierarchy directs the flowering process (see for review, Weigel and Meyerowitz, In Molecular Basis of Morphogenesis (ed. M. Bernfield). 51st Annual Symposium of the Society for Developmental Biology, pp. 93-107, N.Y., 1993).

[0372] Expression of many reproduction genes and gene products is orchestrated by internal programs or the surrounding environment of a plant. These genes used to modulate traits such as fruit and seed yield

### Seed And Fruit Development Genes, Gene Components And Products

[0373] The ovule is the primary female sexual reproductive organ of flowering plants. At maturity it contains the egg cell and one large central cell containing two polar nuclei encased by two integuments that, after fertilization, develop into the embryo, endosperm and seed coat of the mature seed, respectively. As the ovule develops into the seed, the ovary matures into the fruit or silique. As such, seed and fruit development requires the orchestrated transcription of numerous polynucleotides, some of which are ubiquitous, others that are embryo-specific and still others that are expressed only in the endosperm, seed coat or fruit. Such genes are termed fruit development responsive genes and are used to modulate seed and fruit growth and development such as seed size, seed yield, seed composition and seed dormancy.

### III.A.7. Ovule Genes, Gene Components and Products

[0374] The ovule is the primary female sexual reproductive organ of flowering plants. It contains the egg cell and, after fertilization occurs, contains the developing seed. Consequently, the ovule is at times comprised of haploid, diploid and triploid tissue. As such, ovule development requires the orchestrated transcription of numerous polynucleotides, some of which are ubiquitous, others that are ovule-specific and still others that are expressed only in the haploid, diploid or triploid cells of the ovule.

[0375] Although the morphology of the ovule is well known, little is known of these polynucleotides and polynucleotide products. Mutants allow identification of genes that participate in ovule development. As an example, the pistillata (PI) mutant replaces stamens with carpels, thereby increasing the number of ovules present in the flower. Accordingly, comparison of transcription levels between the wild-type and PI mutants allows identification of ovule-specific developmental polynucleotides.

[0376] Ovule genes are useful to modulate egg cell development, ovule maturation, metabolism, polar nuclei, fusion, central cell, maturation, metabolism, synergids, maturation, programmed cell death, nucellus, maturation, integuments, maturation, funiculus, extension, cuticle, maturation, tensile properties, ovule, modulation of ovule senescence and shaping.

### III.A.8. Seed and Fruit Development Genes, Gene Components and Products

[0377] The ovule is the primary female sexual reproductive organ of flowering plants. At maturity it contains the egg cell and one large central cell containing two polar nuclei encased by two integuments that, after fertilization, develop into the embryo, endosperm and seed coat of the mature seed, respectively. As the ovule develops into the seed, the ovary matures into the fruit or silique. As such, seed and fruit development requires the orchestrated transcription of numerous polynucleotides, some of which are ubiquitous, others that are embryo-specific and still others that are expressed only in the endosperm, seed coat or fruit. Such genes are termed fruit development responsive genes and are used to modulate seed and fruit growth and development such as seed size, seed yield, seed composition and seed dormancy.

[0378] III.B. Development Genes, Gene Components and Products

### III.B.1. Imbibition and Germination Responsive Genes, Gene Components and Products

### Imbibition And Germination Responsive Genes, Gene Components And Products

[0379] Seeds are a vital component of the world's diet. Cereal grains alone, which comprise ˜90% of all cultivated seeds, contribute up to half of the global per capita energy intake. The primary organ system for seed production in flowering plants is the ovule. At maturity, the ovule consists of a haploid female gametophyte or embryo sac surrounded by several layers of maternal tissue including the nucellous and the integuments. The embryo sac typically contains seven cells including the egg cell, two synergids, a large central cell containing two polar nuclei, and three antipodal cells. Pollination results in the fertilization of both egg and central cell. The fertilized egg develops into the embryo. The fertilized central cell develops into the endosperm. And the integuments mature into the seed coat. As the ovule develops into the seed, the ovary matures into the fruit or silique. Late in development, the developing seed ends a period of extensive biosynthetic and cellular activity and begins to desiccate to complete its development and enter a dormant, metabolically quiescent state. Seed dormancy is generally an undesirable characteristic in agricultural crops, where rapid germination and growth are required. Some degree of dormancy is advantageous, however, at least during seed development. This is particularly true for cereal crops because it prevents germination of grains while still on the ear of the parent plant (preharvest sprouting), a phenomenon that results in major losses to the agricultural industry. Extensive domestication and breeding of crop species have ostensibly reduced the level of dormancy mechanisms present in the seeds of their wild ancestors, although under some adverse environmental conditions, dormancy may reappear. By contrast, weed seeds frequently mature with inherent dormancy mechanisms that allow some seeds to persist in the soil for many years before completing germination.

[0380] Germination commences with imbibition, the uptake of water by the dry seed, and the activation of the quiescent embryo and endosperm. The result is a burst of intense metabolic activity. At the cellular level, the genome is transformed from an inactive state to one of intense transcriptional activity. Stored lipids, carbohydrates and proteins are catabolized fueling seedling growth and development. DNA and organelles are repaired, replicated and begin functioning. Cell expansion and cell division are triggered. The shoot and root apical meristems are activated and begin growth and organogenesis. Germination is complete when a part of the embryo, the radicle, extends to penetrate the structures that surround it. In Arabidopsis, seed germination takes place within twenty-four (24) hours after imbibition. As such, germination requires the rapid and orchestrated transcription of numerous polynucleotides. Germination is followed by expansion of the hypocotyl and opening of the cotyledons. Meristem development continues to promote root growth and shoot growth, which is followed by early leaf formation.

### Imbibition And Germination Genes

[0381] Imbibition and germination includes those events that commence with the uptake of water by the quiescent dry seed and terminate with the expansion and elongation of the shoots and roots. The germination period exists from imbibition to when part of the embryo, usually the radicle, extends to penetrate the seed coat that surrounds it. Imbibition and germination genes are defined as genes, gene components and products that modulate one or more processes of imbibition and germination described above. They are useful to modulate many plant traits from early vigor to yield to stress tolerance.

### III.B.2. Early Seedling-Phase Specific Responsive Genes, Gene Components and Products

[0382] A few days after germination is complete, which is also referred to as the early seedling phase, is one of the more active stages of the plant life cycle. During this period the plant begins development and growth of the first leaves, roots, and other organs not found in the embryo. Generally this stage begins when germination ends. The first sign that germination has been completed is usually an increase in length and fresh weight of the radicle. Such genes and gene products can regulate a number of plant traits to modulate yield. For example, these genes are active or potentially active to a greater extent in developing and rapidly growing cells, tissues and organs, as exemplified by development and growth of a seedling 3 or 4 days after planting a seed.

[0383] Rapid, efficient establishment of a seedling is very important in commercial agriculture and horticulture. It is also vital that resources are approximately partitioned between shoot and root to facilitate adaptive growth. Phototropism and geotropism need to be established. All these require post-germination process to be sustained to ensure that vigorous seedlings are produced. Early seedling phase genes, gene components and products are useful to manipulate these and other processes.

### III.B.3. Size and Stature Genes, Gene Components and Products

[0384] Great agronomic value results from modulating the size of a plant as a whole or of any of its organs. For example, the “Green Revolution” came about as a result of creating dwarf wheat plants, which produced a higher seed yield than taller plants because they could withstand higher levels and inputs of fertilizer and water. Size and stature genes elucidated here modify the growth of either an organism as a whole or of localized organs or cells. Manipulation of such genes, gene components and products enhances many traits of economic interest from increased seed and fruit size to increased lodging resistance. Many kinds of genes control the height attained by a plant and the size of the organs. For genes additional to the ones in this section other sections of the Application should be consulted.

[0385] These genes can be divided into three classes. One class of genes acts during cytokinesis and/or karyokinesis, such as mitosis and/or meiosis. A second class is involved in cell growth. Examples include genes regulating metabolism and nutrient uptake pathways. A third class includes genes that control pathways that regulate or constrain cell division and growth. Examples of these pathways include those genes specifying hormone biosynthesis, hormone sensing and pathways activated by hormones.

[0386] Size and stature genes are useful to selectively alter the size of organs and stems and so make plants specifically improved for agriculture, horticulture and other industries

### III.B.4. Shoot-Apical Meristem Genes, Gene Components and Products

[0387] New organs, stems, leaves, branches and inflorescences develop from the stem apical meristem (SAM). The growth structure and architecture of the plant therefore depends on the behavior of SAMs. SAMs are comprised of a number of morphologically undifferentiated, dividing cells located at the tips of shoots. SAM genes elucidated here modify the activity of SAMs and thereby many traits of economic interest from ornamental leaf shape to organ number to responses to plant density.

[0388] In addition, a key attribute of the SAM is its capacity for self-renewal. Thus, SAM genes of the instant invention are useful for modulating one or more processes of SAM structure and/or function including (I) cell size and division; (II) cell differentiation and organ primordia. The genes and gene components of this invention are useful for modulating any one or all of these cell division processes generally, as in timing and rate, for example. In addition, the polynucleotides and polypeptides of the invention can control the response of these processes to the internal plant programs associated with embryogenesis, and hormone responses, for example.

[0389] Because SAMs determine the architecture of the plant, modified plants are useful in many agricultural, horticultural, forestry and other industrial sectors. Plants with a different shape, numbers of flowers and seed and fruits have altered yields of plant parts. For example, plants with more branches produce more flowers, seed or fruits. Trees without lateral branches produce long lengths of clean timber. Plants with greater yields of specific plant parts are useful sources of constituent chemicals.

### III.B.5. Vegetative-Phase Specific Responsive Genes, Gene Components and Products

[0390] Often growth and yield are limited by the ability of a plant to tolerate stress conditions, including water loss. To combat such conditions, plant cells deploy a battery of responses that are controlled by a phase shift, from so called juvenile to adult. These changes at distinct times involve, for example, cotyledons and leaves, guard cells in stomata, and biochemical activities involved with sugar and nitrogen metabolism. These responses depend on the functioning of an internal clock that becomes entrained to plant development, and a series of downstream signaling events leading to transcription-independent and transcription-dependent stress responses. These responses involve changes in gene expression.

[0391] Phase responsive genes are useful to modulate timing, dormancy, germination, cotyledon opening, appearance of first leaves, juvenile to adult transition, bolting, flowering, pollination, fertilization, seed development, seed set, fruit drop, senescence and epinasty.

[0392] III.C. Hormone Responsive Genes, Gene Components and Products

### III.C.1. Abscissic Acid Responsive Genes, Gene Components and Products

[0393] Plant hormones are naturally occurring substances, effective in very small amounts, which act as signals to stimulate or inhibit growth or regulate developmental processes in plants. Abscisic acid (ABA) is a ubiquitous hormone in vascular plants that has been detected in every major organ or living tissue from the root to the apical bud. The major physiological responses affected by ABA are dormancy, stress stomatal closure, water uptake, abscission and senescence. In contrast to Auxins, cytokinins and gibberellins, which are principally growth promoters, ABA primarily acts as an inhibitor of growth and metabolic processes.

[0394] Changes in ABA concentration internally or in the surrounding environment in contact with a plant results in modulation of many genes and gene products. These genes and/or products are responsible for effects on traits such as plant vigor and seed yield.

[0395] While ABA responsive polynucleotides and gene products can act alone, combinations of these polynucleotides also affect growth and development. Useful combinations include different ABA responsive polynucleotides and/or gene products that have similar transcription profiles or similar biological activities, and members of the same or similar biochemical pathways. Whole pathways or segments of pathways are controlled by transcription factor proteins and proteins controlling the activity of signal transduction pathways. Therefore, manipulation of such protein levels is especially useful for altering phenotypes and biochemical activities of plants. In addition, the combination of an ABA responsive polynucleotide and/or gene product with another environmentally responsive polynucleotide is also useful because of the interactions that exist between hormone-regulated pathways, stress and defense induced pathways, nutritional pathways and development.

### III.C.2. Auxin Responsive Genes, Gene Components and Products

[0396] Plant hormones are naturally occurring substances, effective in very small amounts that stimulate or inhibit growth or regulate developmental processes in plants. One of the plant hormones is indole-3-acetic acid (IAA), often referred to as Auxin.

[0397] Changes in Auxin concentration in the surrounding environment in contact with a plant or in a plant results in modulation of the activities of many genes and hence levels of gene products. Auxin is known to influence and/or regulate growth, apical dominance, vascular growth, roots, inhibition of primary root elongation, increased lateral root formation, stems, lateral buds, lateral branching, reduction of branching, organ formation, fruit number in tomatoes, leaves, height/stature, regeneration and differentiation of cultured cells or plantlets, biomass, number of flowers; number of seeds; starch content, fruit yield, orienting cell growth, establishment and maintenance of plant axis, cell plate placement, polarised growth, initiation and/or development of embryo morphogenic progression, differentiation of cells into morphologically different cell layers, cotyledon separation, fruit development, abscission, parthenocarpy, and modulation of phototropic sensitivity, e.g. increase growth under a reduced light spectrum.

### III.C.3. Brassinosteroid Responsive Genes, Gene Components and Products:

[0398] Plant hormones are naturally occurring substances, effective in very small amounts, which act as signals to stimulate or inhibit growth or regulate developmental processes in plants. Brassinosteroids (BRs) are the most recently discovered, and least studied, class of plant hormones. The major physiological response affected by BRs is the longitudinal growth of young tissue via cell elongation and cell division. Consequently, disruptions in BR metabolism, perception and activity result in a dwarf phenotype. In addition, because BRs are derived from the sterol metabolic pathway, any perturbations to the sterol pathway affect the BR pathway. In the same way, perturbations in the BR pathway have effects on the later part of the sterol pathway and thus the sterol composition of membranes.

[0399] Changes in BR concentration in the surrounding environment or in contact with a plant result in modulation of many genes and gene products.

[0400] While BR responsive polynucleotides and gene products can act alone, combinations of these polynucleotides also affect growth and development. Useful combinations include different BR responsive polynucleotides and/or gene products that have similar transcription profiles or similar biological activities, and members of the same or functionally related biochemical pathways. Whole pathways or segments of pathways are controlled by transcription factors and proteins controlling the activity of signal transduction pathways. Therefore, manipulation of such protein levels is especially useful for altering phenotypes and biochemical activities of plants. In addition, the combination of a BR responsive polynucleotide and/or gene product with another environmentally responsive polynucleotide is useful because of the interactions that exist between hormone-regulated pathways, stress pathways, nutritional pathways and development. Here, in addition to polynucleotides having similar transcription profiles and/or biological activities, useful combinations include polynucleotides that may have different transcription profiles but which participate in common or overlapping pathways.

### III.C.4. Cytokinin Responsive Genes, Gene Components and Products

[0401] Plant hormones are naturally occurring substances, effective in very small amounts, which act as signals to stimulate or inhibit growth or regulate developmental processes in plants. Cytokinins (BA) are a group of hormones that are best known for their stimulatory effect on cell division, although they also participate in many other processes and pathways. All naturally occurring BAs are aminopurine derivatives, while nearly all synthetic compounds with BA activity are 6-substituted aminopurine derivatives. One of the most common synthetic BAs used in agriculture is benzylaminopurine (BAP).

[0402] BA responsive genes are useful to modulate plant growth, emergence of lateral buds, cotyledon expansion, senescence, differentiation, nutrient metabolism, control of fruit ripening, and parthenocarpy.

### III.C.5. Gibberellic Acid Responsive Genes, Gene Components and Products

[0403] Plant hormones are naturally occurring substances, effective in very small amounts, which act as signals to stimulate or inhibit growth or regulate developmental processes in plants. Gibberellic acid (GA) is a hormone in vascular plants that is synthesized in proplastids (which give rise to chloroplasts or leucoplasts) and vascular tissues. The major physiological responses affected by GA are seed germination, stem elongation, flower induction, anther development, seed and pericarp growth. GA is similar to auxins, cytokinins and gibberellins, in that they are principally growth promoters.

[0404] GA responsive genes are useful to modulate one or more phenotypes including promoting leaf and root growth, promotiing cell division, promoting stem elongation and secondary (woody) growth, increasing xylem fiber length and biomass production. In addition, GA responsive genes are used to alter fruit and seed development, breaking dormancy in seeds and buds, decreasing senescence and regulating stress responses, fertility and flowering time.

[0405] III.D. Metabolism Affecting Genes, Gene Components and Products III.D.1. Nitrogen Responsive Genes, Gene Components and Products

[0406] Nitrogen is often the rate-limiting element in plant growth, and all field crops have a fundamental dependence on exogenous nitrogen sources. Nitrogenous fertilizer, which is usually supplied as ammonium nitrate, potassium nitrate, or urea, typically accounts for 40% of the costs associated with crops in intensive agriculture, such as corn and wheat. Increased efficiency of nitrogen use by plants enables the production of higher yields with existing fertilizer inputs and/or enable existing yields of crops to be obtained with lower fertilizer input, or better yields from growth on soils of poorer quality. Also, higher amounts of proteins in the crops are produced more cost-effectively. “Nitrogen responsive” genes and gene products are used to alter or modulate plant growth and development.

### III.D.2. Circadian Rhythm (Clock) Responsive Genes, Gene Components and Products

[0407] Often growth and yield are limited by the ability of a plant to tolerate stress conditions, including'water loss. To combat such conditions, plant cells deploy a battery of responses that are controlled by an internal circadian clock, including the timed movement of cotyledons and leaves, timed movements in guard cells in stomata, and timed biochemical activities involved with sugar and nitrogen metabolism. These responses depend on the functioning of an internal circadian clock, that becomes entrained to the ambient light/dark cycle, and a series of downstream signaling events leading to transcription independent and transcription dependent stress responses.

[0408] A functioning circadian clock anticipates dark/light transitions and prepares the physiology and biochemistry of a plant accordingly. For example, expression of a chlorophyll a/b binding protein (CAB) is elevated before daybreak so that photosynthesis can operate maximally as soon as there is light to drive it. Similar considerations apply to light/dark transitions and to many areas of plant physiology such as sugar metabolism, nitrogen metabolism, water uptake, water loss, flowering, flower opening, epinasty, germination, perception of season and senescence.

[0409] Clock responsive genes and gene products are useful to modulate timing, dormancy, germination, cotyledon opening, appearance of first leaves, juvenile to adult transition, bolting, flowering, pollination, fertilization, seed development, seed set, fruit drop, senescence, epinasty and biomass.

### III.D.3. Blue Light (Phototropism) Responsive Genes, Gene Components and Products

[0410] Phototropism is the orientation or growth of a cell, an organism or part of an organism in relation to a source of light. Plants can sense red (R), far-red (FR) and blue light in their environment and respond differently to particular ratios of these. For example, a low R:FR ratio enhances cell elongation and favors flowering over leaf production, but blue light regulated cryptochromes also appear to be involved in determining hypocotyl growth and flowering time.

[0411] Phototropism of Arabidopsis thaliana seedlings in response to a blue light source is initiated by nonphototropic hypocotyl 1 (NPH1), a blue light-activated serine-threonine protein kinase, but the downstream signaling events are not entirely known. Blue light treatment leads to changes in gene expression. These genes are identified by comparing the levels of mRNAs of individual genes in dark-grown seedlings compared with dark grown seedlings treated with 1 hour of blue light.

[0412] Auxin also affects blue light phototropism. The effect of Auxin on gene expression stimulated by blue light is found by comparing mRNA levels in a mutant of Arabidopsis thaliana nph4-2 grown in the dark and treated with blue light for 1 hour with wild type seedlings treated similarly. This mutant is disrupted for Auxin-related growth and Auxin-induced gene transcription.

[0413] Blue light responsive genes are used to alter or modulate growth, roots (elongation or gravitropism), stems (such as elongation), cell development, flower, seedling, plant yield, and seed and fruit yield.

### III.D.4 Carbon Dioxide Responsive Genes, Gene Components and Products

[0414] There has been a recent and significant increase in the level of atmospheric carbon dioxide. This rise in level is projected to continue over the next 50 years. The effects of the increased level of carbon dioxide on vegetation are just now being examined, generally in large scale, whole plant experiments often conducted with trees. Some researchers have initiated physiological experiments in attempts to define the biochemical pathways that are either affected by and/or are activated to allow the plant to avert damage from elevated carbon dioxide levels.

[0415] CO₂ responsive genes are useful to modulate catabolism, energy generation, metabolism, carbohydrate synthesis, growth rate and photosynthesis (such as carbon dioxide fixation).

### III.D.5. Mitochondria Electron Transport (Respiration) Genes, Gene Components and Products

[0416] One means to alter flux through metabolic pathways is to alter the levels of proteins in the pathways. Plant mitochondria contain many proteins involved in various metabolic processes, including the TCA cycle, respiration, and photorespiration and particularly the electron transport chain (mtETC). Most mtETC complexes consist of nuclearly-encoded mitochondrial proteins (NEMPs) and mitochondrially-encoded mitochondrial proteins (MEMPs). NEMPs are produced in coordination with MEMPs of the same complex and pathway and with other proteins in multi-organelle pathways. Enzymes involved in photorespiration, for example, are located in chloroplasts, mitochondria, and peroxisomes and many of the proteins are nuclearly-encoded. Manipulation of the coordination of protein levels within and between organelles have critical and global consequences to the growth and yield of a plant

[0417] Respiration responsive genes are useful to modulate catabolism; energy generation, growth rate; water usage and photosynthesis.

[0418] III.D.6. Protein Degradation Genes, Gene Components and Products

[0419] One of the components of molecular mechanisms that operate to support plant development is the “removal” of a gene product from a particular developmental circuit once the substrate protein is no longer functionally relevant in temporal and/or spatial contexts. The “removal” mechanisms can be accomplished either by protein inactivation (e.g., phosphorylation or protein-protein interaction) or protein degradation, most notably via the ubiquitination-proteasome pathway. The ubiquitination-proteasome pathway is responsible for the degradation of a plethora of proteins involved in cell cycle, cell division, transcription and signal transduction, all of which are required for normal cellular functions. Ubiquitination occurs through the activity of ubiquitin-activating enzymes (E1), ubiquitin-conjugating enzymes (E2), and ubiquitin-protein ligases (E3), which act sequentially to catalyze the attachment of ubiquitin (or other modifying molecules that are related to ubiquitin) to substrate proteins (Hochstrasser 2000, Science 289: 563). Ubiquitinated proteins are then routed to proteasomes for degradation processing [2000, Biochemistry and Molecular Biology of Plants, Buchanan, Gruissem, and Russel (eds), Amer. Soc. of Plant Physiologists, Rockville, Md.]. The degradation mechanism can be selective and specific to the concerned target protein (Joazeiro and Hunter2001, Science 289: 2061; Sakamoto et al., 2001, PNAS Online 141230798). This selectivity and specificity is believed to be one of the ways that the activity of gene products is modulated.

[0420] Protein degradation genes are useful for used promoting/controlling cell death and for altering developmental and growth processes.

### III.D.7. Carotenogenesis Responsive Genes, Gene Components and Products

[0421] Carotenoids serve important biochemical functions in both plants and animals. In plants, carotenoids function as accessory light harvesting pigments for photosynthesis and to protect chloroplasts and photosystem II from heat and oxidative damage by dissipating energy and scavenging oxygen radicals produced by high light intensities and other oxidative stresses. Decreases in yield frequently occur as a result of light stress and oxidative stress in the normal growth ranges of crop species. In addition, light stress limits the geographic range of many crop species. Modest increases in oxidative stress tolerance would greatly improve the performance and growth range of many crop species. The development of genotypes with increased tolerance to light and oxidative stress provide a more reliable means to minimize crop losses and diminish the use of energy-costly practices to modify the soil environment.

[0422] In animals, carotenoids such as beta-carotene are essential provitamins required for proper visual development and function. In addition, their antioxidative properties are also thought to provide valuable protection from diseases such as cancer. Modest increases in carotenoid levels in crop species produce a dramatic effect on plant nutritional quality. The development of genotypes with increased carotenoid content provide a more reliable and effective nutritional source of Vitamin A and other carotenoid derived antioxidants than through the use of costly nutritional supplements.

### III.D.8. Viability Genes, Gene Components and Products

[0423] Plants contain many proteins and pathways that when blocked or induced lead to cell, organ or whole plant death. Gene variants that influence these pathways have profound effects on plant survival, vigor and performance. The critical pathways include those concerned with metabolism and development or protection against stresses, diseases and pests. They also include those involved in apoptosis and necrosis. Viability genes are modulated to affect cell or plant death.

[0424] Herbicides are, by definition, chemicals that cause death of tissues, organs and whole plants. The genes and pathways that are activated or inactivated by herbicides include those that cause cell death as well as those that function to provide protection.

### III.D.9. Histone Deacetylase (Axel) Responsive Genes, Gene Components and Products

[0425] The deacetylation of histones is known to play an important role in regulating gene expression at the chromatin level in eukaryotic cells. Histone deacetylation is catalyzed by proteins known as histone deacetylases (hdacs). Hdacs are found in multisubunit complexes that are recruited to specific sites on nuclear DNA thereby affecting chromatin architecture and target gene transcription. Mutations in plant hdac genes cause alterations in vegetative and reproductive growth that result from changes in the expression and activities of hdac target genes or genes whose expression is governed by hdac target genes. For example, transcription factor proteins control whole pathways or segments of pathways and proteins also control the activity of signal transduction pathways.

[0426] HDAc genes are useful to modulate growth rate and development.

[0427] III.E. Stress Responsive Genes, Gene Components and Products

### III.E.1. Cold Responsive Genes, Gene Components and Products

[0428] The ability to endure low temperatures and freezing is a major determinant of the geographical distribution and productivity of agricultural crops. Even areas considered suitable for the cultivation of a given species or cultivar can give rise to yield decreases and crop failures as a result of aberrant freezing temperatures. Even modest increases (1-2° C.) in the freezing tolerance of certain crop species have a dramatic impact on agricultural productivity in some areas. The development of genotypes with increased freezing tolerance provide a more reliable means to minimize crop losses and diminish the use of energy-costly practices to modify the microclimate.

[0429] Sudden cold temperatures result in modulation of many genes and gene products. These genes and/or products are responsible for effects on traits such as plant vigor and seed yield.

[0430] Manipulation of one or more cold responsive gene activities is useful to modulate growth and development.

### III.E.2. Heat Responsive Genes, Gene Components and Products

[0431] The ability to endure high temperatures is a major determinant of the geographical distribution and productivity of agricultural crops. Decreases in yield and crop failure frequently occur as a result of aberrant hot conditions even in areas considered suitable for the cultivation of a given species or cultivar. Only modest increases in the heat tolerance of crop species have a dramatic impact on agricultural productivity. The development of genotypes with increased heat tolerance provide a more reliable means to minimize crop losses and diminish the use of energy-costly practices to modify the microclimate.

### III.E.3. Drought Responsive Genes, Gene Components and Products

[0432] The ability to endure drought conditions is a major determinant of the geographical distribution and productivity of agricultural crops. Decreases in yield and crop failure frequently occur as a result of aberrant drought conditions even in areas considered suitable for the cultivation of a given species or cultivar. Only modest increases in the drought tolerance of crop species have a dramatic impact on agricultural productivity. The development of genotypes with increased drought tolerance provide a more reliable means to minimize crop losses and diminish the use of energy-costly practices to modify the microclimate.

### III.E.4. Wounding Responsive Genes, Gene Components and Products

[0433] Plants are continuously subjected to various forms of wounding from physical attacks including the damage created by pathogens and pests, wind, and contact with other objects. Therefore, survival and agricultural yields depend on constraining the damage created by the wounding process and inducing defense mechanisms against future damage.

[0434] Plants have evolved complex systems to minimize and/or repair local damage and to minimize subsequent attacks by pathogens or pests or their effects. These involve stimulation of cell division and cell elongation to repair tissues, induction of programmed cell death to isolate damage caused mechanically and by invading pests and pathogens, and induction of long-range signaling systems to induce protecting molecules in case of future attack. The genetic and biochemical systems associated with responses to wounding are connected with those associated with other stresses such as pathogen attack and drought.

[0435] Wounding results in the modulation of activities of specific genes and, as a consequence, of the levels of key proteins and metabolites. These genes, called here wounding responsive genes, are important for minimizing the damage induced by wounding from pests, pathogens and other objects.

### III.E.5. Methyl Jasmonate (Jasmonate) Responsive Genes, Gene Components and Products

[0436] Jasmonic acid and its derivatives, collectively referred to as jasmonates, are naturally occurring derivatives of plant lipids. These substances are synthesized from linolenic acid in a lipoxygenase-dependent biosynthetic pathway. Jasmonates are signalling molecules which are growth regulators as well as regulators of defense and stress responses. As such, jasmonates represent a separate class of plant hormones. Jasmonate responsive genes can be used to modulate plant growth and development.

### III.E.6. Reactive Oxygen Responsive Genes, Gene Components and H₂O₂ Products

[0437] Often growth and yield are limited by the ability of a plant to tolerate stress conditions, including pathogen attack, wounding, extreme temperatures and various other factors. To combat such conditions, plant cells deploy a battery of inducible defense responses, including triggering an oxidative burst. The burst of reactive oxygen intermediates occurs in time, place and it plays a key role in either pathogen elimination and/or subsequent signaling of downstream defense functions. For example, H₂O₂ plays a key role in the pathogen resistance response, including initiating the hypersensitive response (HR). HR is correlated with the onset of systemic acquired resistance (SAR) to secondary infection in distal tissues and organs.

[0438] Reactive oxygen responsive genes are useful to modulate pathogen tolerance and/or resistance, Avr/R locus sensitivitiy, non-host sensitivity; HR, SAR, bacterial resistance, fungal resistance, virus or viroid resistance, insect resistance, nematodes, heavy metal tolerance and treatment of indications modulated by free radicals and cancer.

### III.E.7. Salicylic Acid Responsive Genes, Gene Components and Products

[0439] Plant defense responses can be divided into two groups: constitutive and induced. Salicylic acid (SA) is a signaling molecule necessary for activation of the plant induced defense system known as systemic acquired resistance or SAR. This response, which is triggered by prior exposure to avirulent pathogens, is long lasting and provides protection against a broad spectrum of pathogens. Another induced defense system is the hypersensitive response (HR). HR is far more rapid, occurs at the sites of pathogen (avirulent pathogens) entry and precedes SAR. SA is also the key signaling molecule for this defense pathway.

[0440] SA genes are useful to modulate plant defense systems.

### III.E.8. Nitric Oxide Responsive Genes, Gene Components and Products

[0441] The rate-limiting element in plant growth and yield is often its ability to tolerate suboptimal or stress conditions, including pathogen attack conditions, wounding and the presence of various other factors. To combat such conditions, plant cells deploy a battery of inducible defense responses, including synergistic interactions between nitric oxide (NO), reactive oxygen intermediates (ROS), and salicylic acid (SA). NO plays a critical role in the activation of innate immune and inflammatory responses in animals. At least part of this mammalian signaling pathway is present in plants, where NO potentiates the hypersensitive response (HR). In addition, NO is a stimulator molecule in plant photomorphogenesis.

[0442] Changes in nitric oxide concentration in the internal or surrounding environment, or in contact with a plant, results in modulation of many genes and gene products.

[0443] In addition, the combination of a nitric oxide responsive polynucleotide and/or gene product with other environmentally responsive polynucleotides is also useful because of the interactions that exist between hormone regulated pathways, stress pathways, pathogen stimulated pathways, nutritional pathways and development.

[0444] Nitric oxide responsive genes and gene products function either to increase or dampen the above phenotypes or activities either in response to changes in nitric oxide concentration or in the absence of nitric oxide fluctuations. More specifically, these genes and gene products modulate stress responses in an organism. In plants, these genes and gene products are useful for modulating yield under stress conditions. Measurments of yield include seed yield, seed size, fruit yield, fruit size, etc.

### 111.9. Osmotic Stress Responsive Genes, Gene Components and Products

[0445] The ability to endure and recover from osmotic and salt related stress is a major determinant of the geographical distribution and productivity of agricultural crops. Osmotic stress is a major component of stress imposed by saline soil and water deficit. Decreases in yield and crop failure frequently occur as a result of aberrant or transient environmental stress conditions even in areas considered suitable for the cultivation of a given species or cultivar. Only modest increases in the osmotic and salt tolerance of a crop species have a dramatic impact on agricultural productivity. The development of genotypes with increased osmotic tolerance provides a more reliable means to minimize crop losses and diminish the use of energy-costly practices to modify the soil environment. Thus, osmotic stress responsive genes are used to modulate plant growth and development.

### III.E.10. Aluminum Responsive Genes, Gene Components and Products

[0446] Aluminum is toxic to plants in soluble form (Al³⁺). Plants grown under aluminum stress have inhibited root growth and function due to reduced cell elongation, inhibited cell division and metabolic interference. As an example, protein inactivation frequently results from displacement of the Mg2⁺cofactor with aluminum. These types of consequences result in poor nutrient and water uptake. In addition, because stress perception and response occur in the root apex, aluminum exposure leads to the release of organic acids, such as citrate, from the root as the plant attempts to prevent aluminum uptake.

[0447] The ability to endure soluble aluminum is a major determinant of the geographical distribution and productivity of agricultural crops. Decreases in yield and crop failure frequently occur as a result of aberrant aluminum conditions even in areas considered suitable for the cultivation of a given species or cultivar. Only modest increases in the aluminum tolerance of crop species have a dramatic impact on agricultural productivity. The development of genotypes with increased aluminum tolerance provides a more reliable means to minimize crop losses and diminish the use of costly practices to modify the environment.

### III.E.11. Cadmium Responsive Genes, Gene Components and Products

[0448] Cadmium (Cd) has both toxic and non-toxic effects on plants. Plants exposed to non-toxic concentrations of cadmium are blocked for viral disease due to the inhibition of systemic movement of the virus. Surprisingly, higher toxic levels of Cd do not inhibit viral systemic movement, so that cellular factors that interfere with the viral movement are triggered by non-toxic Cd concentrations but repressed in high Cd concentrations. Furthermore, exposure to non-toxic Cd levels reverses posttranslational gene silencing, an inherent plant defense mechanism. Consequently, Cd responsive genes are useful for altering plant disease control in addition to improving soil bio-remediation and plant performance.

### III.E.12. Disease Responsive Genes, Gene Components and Products

[0449] Often growth and yield are limited by the ability of a plant to tolerate stress conditions, including pathogen attack. To combat such conditions, plant cells deploy a battery of inducible defense responses, including the triggering of an oxidative burst and the transcription of pathogenesis-related protein (PR protein) genes. These responses depend on the recognition of a microbial avirulence gene product (avr) by a plant resistance gene product (R), and a series of downstream signaling events leading to transcription-independent and transcription-dependent disease resistance responses. Reactive oxygen species (ROS) such as H₂O₂ and NO from the oxidative burst play a signaling role, including initiation of the hypersensitive response (HR) and induction of systemic acquired resistance (SAR) to secondary infection by unrelated pathogens. PR proteins are able to degrade the cell walls of invading microorganisms, and phytoalexins are directly microbicidal.

[0450] Disease responsive genes and gene products are useful to modulate plant response to pathogen attack including bacteria, fungi, virus, insects and nematodes.

### III.E.13. Defense (LOL2) Responsive Genes, Gene Components and Products

[0451] Often growth and yield are limited by the ability of a plant to tolerate stress conditions, including pathogen attack. To combat such conditions, plant cells deploy a battery of inducible defense responses, including the triggering of an oxidative burst and the transcription of pathogenesis-related protein (PR protein) genes. Reactive oxygen species (ROS) such as H₂O₂ and NO from the oxidative burst play a signaling role, including initiation of the hypersensitive response (HR) and induction of systemic acquired resistance (SAR) to secondary infection by unrelated pathogens. Some PR proteins are able to degrade the cell walls of invading microorganisms, and phytoalexins are directly microbicidal. Other defense related pathways are regulated by salicylic acid (SA) or methyl jasmonate (MeJ).

[0452] These responses depend on the recognition of a microbial avirulence gene product (avr) by a plant resistance gene product (R), and a series of downstream signaling events leading to transcription-independent and transcription-dependent disease resistance responses. R— gene-encoded receptors specifically interact with pathogen-encoded ligands to trigger a signal transduction cascade. Several components include ndr1 and eds1 loci. NDR1, EDS1, PR1, as well as PDF1.2, a MeJ regulated gene and Nim1, a SA regulated gene, are differentially regulated in plants with mutations in the LOL2 gene.

[0453] LOL2 shares a novel zinc finger motif with LSD1, a negative regulator of cell death and defense response. Due to an alternative splice site, the LOL2 gene encodes two different proteins, one of which contains an additional, putative DNA binding motif. Northern analysis demonstrates that LOL2 transcripts containing the additional DNA binding motif are predominantly upregulated after treatment with both virulent and avirulent Pseudomonas syringae pv maculicola strains. Modulation of this gene confers enhanced resistance to virulent and avirulent Peronospora parasitica isolates.

[0454] LOL2 responsive genes and gene products are useful to alter pathogen tolerance and/or resistance, including bacteria, fungus, virus, insects and nematodes.

### III.E.14. Iron Responsive Genes, Gene Components and Products

[0455] Iron (Fe) deficiency in humans is the most prevalent nutritional problem worldwide today. Increasing iron availability via diet is a sustainable malnutrition solution for many of the world's nations. One-third of the world's soils, however, are iron deficient. Consequently, to form a food-based solution to iron malnutrition we need a better understanding of iron uptake, storage and utilization by plants. Furthermore, exposure to non-toxic Fe levels affects inherent plant defense mechanisms. Consequently, altering the expression of Fe response genes leads to an increase in plant disease resistance, in addition to improvements in human nutrition.

### III.E.15. Shade Responsive Genes, Gene Components and Products

[0456] Plants sense the ratio of Red (R): Far Red (FR) light in their environment and respond differently to particular ratios. A low R:FR ratio, for example, enhances cell elongation and favors flowering over leaf production. The changes in R:FR ratios mimic and cause the shading response effects in plants. The response of a plant to shade in the canopy structures of agricultural crop fields influences crop yields significantly. Therefore manipulation of genes regulating the shade avoidance responses can improve crop yields.

[0457] While phytochromes mediate the shade avoidance response, the down-stream factors participating in this pathway are largely unknown. One potential downstream participant, ATHB-2, is a member of the HD-Zip class of transcription factors and shows a strong and rapid response to changes in the R:FR ratio. ATHB-2 overexpressors have a thinner root mass, smaller and fewer leaves and longer hypocotyls and petioles. This elongation arises from longer epidermal and cortical cells, and a decrease in secondary vascular tissues, paralleling the changes observed in wild-type seedlings grown under conditions simulating canopy shade.

[0458] On the other hand, plants with reduced ATHB-2 expression have a thick root mass and many larger leaves and shorter hypocotyls and petioles. Here, the changes in the hypocotyl result from shorter epidermal and cortical cells and increased proliferation of vascular tissue. Interestingly, application of Auxin is able to reverse the root phenotypic consequences of high ATHB-2 levels, restoring the wild-type phenotype. Consequently, given that ATHB-2 is tightly regulated by phytochrome, these data indicate that ATHB-2 links the Auxin and phytochrome pathways in the shade avoidance response pathway.

[0459] Shade responsive genes can be used to modulate plant growth and development.

### III.E.16. Sulfur Responsive Genes, Gene Components and Products

[0460] Sulfur is one of the important macronutrients required by plants. It is taken up from the soil solution by roots as in the form of sulfate anion which higher plants are dependent on to fulfill their nutritional sulfur requirement. After uptake from the soil, sulfate is either accumulated and stored in vacuole or it is assimilated into various organic compounds, e.g. cysteine, glutathione, methionine, etc. Thus, plants also serve as nutritional sulfur sources for animals. Sulfur can be assimilated in one of two ways: it is either incorporated as sulfate in a reaction called sulfation, or it is first reduced to sulfide, the substrate for cysteine synthesis. In plants, majority of sulfur is assimilated in reduced form.

[0461] Sulfur comprises a small but vital fraction of the atoms in many protein molecules. As disulfide bridges, the sulfur atoms aid in stabilizing the folded proteins. Cys is the first sulfur-containing amino acid, which forms disulfide bonds that affects the tertiary structures in proteins and enzyme activities. This redox balance is mediated by the disulfide/thiol interchange of thioredoxin or glutaredoxin using NADPH as an electron donor. Sulfur can also become sulfhydryl (SH) groups participating in the active sites of some enzymes and some enzymes require the aid of small molecules that contain sulfur. In addition, the machinery of photosynthesis includes some sulfur-containing compounds, such as ferrodoxin. Thus, sulfate assimilation plays important roles not only in the sulfur nutrition but also in the ubiquitous process that may regulate the biochemical reactions of various metabolic pathways.

[0462] Sulfur deficiency leads to a marked chlorosis in younger leaves, which may become white in color. Other symptoms of sulfur deficiency includes weak stems and reduced growth. Adding sulfur fertilizer to plants can increase root development and a deeper green color of the leaves in sulfur-deficient plants. Sulfur, however, is generally sufficient in soils for two reasons: (1) it is a contaminant in potassium and other fertilizers and (2) is a product of industrial combustion. Sulfur limitation in plants is thus likely due to the limitation in uptake and distribution in plants.

[0463] Seven cell type specific sulfate transporter genes have been isolated from Arabidopsis In sulfate-starved plants, expression of the high-affinity transporter, AtST1-1, is induced in root epidermis and cortex for acquisition of sulfur. The low affinity transporter, AtST2-1 (AST68), accumulates in the root vascular tissue by sulfate starvation for root-to-shoot transport of sulfate. These studies show that the whole-plant process of sulfate transport is coordinately regulated by the expression of these 2 sulfate transporter genes under sulfur limited conditions. Recent studies propose that feeding of O-acetylserine, GSH and selenate regulates the expression of AtST1-1 and AtST2-1 (AST68) in roots either positively or negatively. There are regulatory interactions between assimilatory sulfate and nitrate reduction in plants. The two assimilatory pathways are very similar and well coordinated; deficiency for one element represses the other pathway.

[0464] Manipulation of sulfur responsive genes improves plant nutrition, growth and development.

### III.E.17. Zinc Responsive Genes, Gene Components and Products

[0465] Phytoremediation of soils contaminated with toxic levels of heavy metals requires the understanding of plant metal transport and tolerance. The numerous Arabidopsis thaliana studies give scientists the potential for dissection and elucidation of plant micronutrient/heavy metal uptake and accumulation pathways. Altered regulation of ZNT1, a Zn/Cd transporter, contributes to high Zn uptake. Isolation and characterization of Zn/Cd hyperaccumulation genes allows expression in higher biomass plant species for efficient contaminated soil clean up. Identification of additional Zn transport, tolerance and nutrition-related genes involved in heavy metal accumulation enables manipulation of increased uptake (for phytoremediation) as well as limitation of uptake or leak pathways that contribute to toxicity in crop plants. Additionally, Zn-binding ligands involved in Zn homeostasis or tolerance are identified, as well as factors affecting the activity or expression of Zn binding transcription factors.

### III. E.18 Vigor Genes, Gene Components and Products

[0466] Great agronomic value can result from modulating the vigor of a plant as a whole, or of any one of a plants' organs.

[0467] Manipulation of genes, gene components and gene products that modulate plant vigor results in many traits of economic interest including increases in seed and fruit size and increases in lodging resistance.

### III. E.19 Sterol Genes, Gene Components and Products

[0468] Sterols are essential for all eukaryotes. In contrast to animal and fungal cells which contain only one major sterol, plant cells synthesize a complex array of different sterol compounds in which sitosterol, stigmasterol and 24-methylcholesterol are the major constituents. Sitosterol and 24-methylcholesterol affect membrane fluidity and permeability in plant cell membranes in a similar manner to the way cholesterol affects membrane fluidity and permeability in mammalian cell membranes. Plant sterols can also modulate the activity of membrane-bound enzymes. Stigmasterol is required for cell proliferation. Sterols are synthesized from the isoprenoid pathway originating with mevalonate. The branch point into sterols occurs via squalene.

[0469] Sterol genes are useful to modulate plant growth and development. III. E.20 BRANCHING GENES, GENE COMPONENTS AND PRODUCTS

[0470] Modulating the amount of branches in a plant is useful to alter the plant architecture for ornamental or economic reasons.

[0471] The branching genes elucidated here increase or decrease the number of branches in a plant and thereby regulate many traits from ornamental plant shape to increased yield, including biomass, fruit or seed yield.

### III. E.21 Brittle-Snap Responsive Genes, Gene Components and Products

[0472] Brittle-snap is a phenomenon also referred to as greensnap or mid-season stalk breakage. This phenomenon is exemplified when rapidly growing corn stalks that are bent by a low tool bar become subject to breakage from wind as well as other physical phenomenon such as cultivation, tilling, or anhydrous N application. Corn is most vulnerable during the seven- to ten-day period prior to tasseling. Preliminary data based on laboratory analyses indicate that plant hybrids with either higher rates of lignification or higher lignin content as mature plants are more prone to brittle-snap. Economic consequences can be severe. For example, severe thunderstorms on Jul. 8, 1993, and Jul. 1, 1994 resulted in brittle-snap over a large portion of Nebraska's corn production area. Estimated losses were $200 million in Nebraska from the 1993 storm alone. Brittle snap genes are useful to modulate plant yield.

### III. E.22 PH Stress Responsive Genes, Gene Components and Products

[0473] Extreme soil pH conditions have a major influence on mineral nutrient uptake that is required to sustain plant growth and maximize plant yields. Plants exposed to low pH soil conditions develop deficiencies in nutrients such as phosphate, copper, molybdenum, potassium, sulfur, and nitrogen. Plants exposed to high pH soil conditions develop phosphate, iron, copper, manganese, and zinc deficiencies. Phosphate is the only nutrient that becomes limiting in both acidic and alkaline soils. Phosphate is a critical nutrient not just for plants, but for all organisms. Phosphorous is necessary for life-dependent molecules such as ATP, nucleic acids, and phospholipids and it also regulates carbon-amino acid metabolic function.

[0474] PH Stress genes are useful to modulate plant growth and development.

### III. E.23 Guard Cell Genes, Gene Components and Products

[0475] Scattered throughout the epidermis of the shoot are minute pores called stomata. Each stomal pore is surrounded by two guard cells. The guard cells control the size of the stomal pore, which is critical since the stomata control the exchange of carbon dioxide, oxygen, and water vapor between the interior of the plant and the outside atmosphere. Stomata open and close through turgor changes driven by ion fluxes, which occur mainly through the guard cell plasma membrane and tonoplast. Guard cells are known to respond to a number of external stimuli such as changes in light intensity, carbon dioxide and water vapor, for example. Guard cells can also sense and rapidly respond to internal stimuli including changes in ABA, auxin and calcium ion flux.

[0476] Thus, guard cell genes are useful to modulate ABA responses, drought tolerance, respiration, water potential, and water management. All of which in turn affect plant yield including seed yield, harvest index, fruit yield, etc.

### IV. UTILITIES OF PARTICULAR INTEREST

[0477] Genes capable of modulating the phenotypes in the following table are useful to produce the associated utilities in the table. Such genes can be identified by their cDNA ID number in the Knock-in Table. That is, those genes noted in the Table to have a phenotype as listed in the following column entitled “Phenotype Modulated by a Gene” are useful for the purpose identified in the corresponding position in the column entitled “Utilities”.

| Phenotype | | |
|---|---|---|
| Modulated | | |
| by a Gene | | Utilities |
| Leaf shape | Cordate | decrease wind opacity, |
| | Cup-shaped | decrease lodging (plant fall over), |
| | Curled | increase biomass by making larger or |
| | | different shaped leaves, |
| | Laceolate | improve the efficiency of mechanical |
| | | harvesting, |
| | Lobed | decrease transpiration for better drought |
| | | tolerance, |
| | Oval | changing leaf shape to collect and absorb |
| | | water, |
| | Ovate | modulation of canopy structure and shading |
| | | for altered irradiance close to the ground, |
| | Serrate | enhanced uptake of pesticides (herbicides, |
| | | fungicides, etc), |
| | Trident | creation of ornamental leaf shapes, |
| | Undulate | increase resistance to pathogens by |
| | | decreasing amount of water that collects on |
| | | leaves, |
| | Vertically | change proporation of cell types in the |
| | Oblong | leaves for enhanced photosynthesis, |
| | | decreased transpiration, and enhanced |
| | Other Shapes | accumulation of desirable compounds |
| | | including secondary metabolites in |
| | | specialized cells, |
| | | decrease insect feeding, |
| | Long | decrease wind opacity, |
| | petioles | decrease lodging (plant fall over), |
| | Short | increase biomass by better positioning of |
| | petioles | the leaf blade, |
| | | decrease insect feeding, |
| | | decrease transpiration for better drought |
| | | tolerance, |
| | | position leaves most effectively for |
| | | photosynthetic efficiency |
| | Fused | ornamental applications to make distinctive |
| | | plants, |
| Reduced | Short | increase or decrease the number of seeds in |
| fertility | siliques | a fruit, |
| | | increasing fruit size, |
| | | modulating fruit shape to better fit |
| | | harvesting or packaging requirements, |
| | | useful for controlling dehisence and seed |
| | | scatter |
| | Reduced | useful in hybrid breeding programs, |
| | fertility | increasing fruit size, |
| | Sterility | production of seedless fruit, |
| | | useful as targets for gametocides, |
| | | modulating fruit shape to better fit |
| | | harvesting or packaging requirements, |
| | | useful for controlling dehisence and seed |
| | | scatter |
| | Flower size | useful for edible flowers |
| | | useful for flower derived products such as |
| | | fragrances |
| | | useful for modulating seed size and number |
| | | in combination with seed-specific genes |
| | | value in the ornamental industry |
| Stature | Large | increasing or decreasing plant biomass, |
| | Small | optimizing plant stature to increase yield |
| | | under various diverse environmental |
| | | conditions, e.g., when water or nutrients |
| | | are limiting, |
| | Dwarfs | decreasing lodging, |
| | | increasing fruit number and size, |
| | | controlling shading and canopy effects |
| Meristems | | Change plant architecture, |
| | | increase or decrease number of leaves as |
| | | well as change the types of leaves to |
| | | increase biomass, |
| | | improve photosynthetic efficiency, |
| | | create new varieties of ornamental plants |
| | | with enhanced leaf design, |
| | | preventing flowering to opimize vegetative |
| | | growth, |
| | | control of apical dominace, |
| | | increase or decrease flowering time to fit |
| | | season, water or fertilizer schedules, |
| | | change arrangement of leaves on the stem |
| | | (phyllotaxy) to optimize plant density, |
| | | decrease insect feeding, |
| | | or decrease pathogen infection, |
| | | increase number of trichome/glandular |
| | | trichome producing leaves |
| | | targets for herbicides, |
| | | generate ectopic meristems and ectopic |
| | | growth of vegetative and floral tissues and |
| | | seeds and fruits |
| Stem | Strong | modify lignin content/composition for |
| | | creation of harder woods or reduce |
| | | difficulty/costs in pulping for |
| | Weak | paper production or increase |
| | | digestibility of forage crops, |
| | | decrease lodging, |
| | | modify cell wall polysaccharides in stems |
| | | and fruits for improved texture and |
| | | nutrition. |
| | | increase biomass |
| | Late/Early | Break the need for long vernalization of |
| | Bolting | vernalization-dependent crops, e.g., winter |
| | | wheat, thereby increasing yield |
| | | decrease or increase generaton time |
| | | increase biomass |
| Lethals | Embryo- | produce seedless fruit, |
| | lethal | use as herbicide targets |
| | Embryo- | produce seedless fruit, |
| | defective | use as herbicide targets |
| | Seedling | use as herbicide targets, |
| | | useful for metabolic engineering, |
| | Pigment- | use as herbicide targets, |
| | lethals | increase photosynthetic efficiency |
| Pigment | Dark Green | Increase nutritional value, |
| | | enhanced photosynthesis and carbon |
| | | dioxide combustion and therefore increase |
| | | plant vigor and biomass, |
| | | enhanced photosynthetic efficiency and |
| | | therefore increase plant vigor and biomass, |
| | | prolong vegetative development, |
| | | enhanced protection against pathogens, |
| | YGV1 | Useful as targets for herbicides, |
| | | increase photosynthetic efficiency and |
| | | therefore increase plant vigor and biomass, |
| | YGV2 | Useful as targets for herbicides, |
| | | control of change from embryonic to adult |
| | | organs, |
| | | increase metabolic efficiency, |
| | | increase photosynthetic efficiency and |
| | | therefore increased plant vigor and biomass, |
| | YGV3 | Useful as targets for herbicides, |
| | | nitrogen sensing/uptake/usage, |
| | | increase metabolic efficiency and therefore |
| | | increased plant vigor and biomass, |
| | Interveinal | to increase photosynthetic efficiency and |
| | chlorosis | therefore increase plant vigor and biomass |
| | | to increase or decrease nitrogen transport |
| | | and therefore increase plant vigor and |
| | | biomass |
| | | use as herbicide targets |
| | | increase metabolic efficiency, |
| Roots | Short | to access water from rainfall, |
| | (primary | to access rhizobia spray application, for |
| | root) | anaerobic soils, |
| | | useful to facilitate harvest of root crops, |
| | Thick | useful for increasing biomass of root crops, |
| | (primary | for preventing plants dislodging during |
| | root) | picking and harvesting, |
| | | as root grafts, for animal feeds |
| | Branching | modulation allows betters access to water, |
| | (primary | minerals, fertilizers, rhizobia prevent soil |
| | root) | erosion, s |
| | | increasing root biomass |
| | | decrease root lodging, |
| | Long | modulation allows improved access to |
| | (lateral | water, nutrients, fertilizer, rhizobia, prevent |
| | roots) | soil erosion |
| | | increase root biomass |
| | | decrease root lodging |
| | | modulation allows control on the depth of |
| | | root growth in soil to access water and |
| | | nutriennts |
| | | modulation allows hormonal control of root |
| | | growth and development (size) |
| | Agravitropic | modulation allows control on the depth of |
| | | root growth in soil |
| | Curling | modulation allows hormonal control of root |
| | (primary | growth and development (size) |
| | root) | useful in anaerobic soils in allowing roots |
| | | to stay close to surface |
| | | harvesting of root crops |
| | Poor | |
| | germination | |
| Trichome | Reduced | Genes useful for decreasing transpiration, |
| | Number | increased production of glandular trichomes |
| | Glabrous | for oil or other secreted chemicals of value, |
| | Increased | use as deterrent for insect herbivory and |
| | Number | ovipostion |
| | | modulation will increase resistance to UV |
| | | light, |
| Wax mutants | | decrease insect herbivory and oviposition, |
| | | compostion changes for the cosmetics |
| | | industry, |
| | | decrease transpiration, |
| | | provide pathogen resistance, |
| | | UV protection, |
| | | modulation of leaf runoff properties and |
| | | improved access for herbicides and |
| | | fertilizers |
| Cotyledons | | modulation of seeds structure in legumes, |
| | | increase nutritional value, |
| | | improve seedling competion under field |
| | | conditions, |
| Seeds | Transparent | genes useful for metabolic engineering |
| | testa | anthocyanin and flavonoid pathways |
| | Light | improved nutritional content |
| | Dark | |
| Flowers | Other | decrease petal abscission |
| | | decrease pod shattering |
| Hypocotysl | Long | to improve germination rates |
| | | to improve plant survivability |
| | Short | to improve germination rates |
| | | to improve plant survivability |

### V. ENHANCED FOODS

[0478] Animals require external supplies of amino acids that they cannot synthesize themselves. Also, some amino acids are required in larger quantities. The nutritional values of plants for animals and humans are thus modified by regulating the amounts of the constituent amino acids that occur as free amino acids or in proteins. For instance, higher levels of lysine and/or methionine enhance the nutritional value of corn seed. Applicants herein provide several methods for modulating the amino acid content:
[0479] (1) expressing a naturally occurring protein that has a high percentage of the desired amino acid(s);
[0480] (2) expressing a modified or synthetic coding sequence that has an enhanced percentage of the desired amino acids; or
[0481] (3) expressing the protein(s) that are capable of synthesizing more of the desired amino acids.
   A specific example is expressing proteins with, for example, enhanced methionine content, preferentially in a corn or cereal seed used for animal nutrition or in the parts of plants used for nutritional purposes.

[0482] A protein is considered to have a high percentage of an amino acid if the amount of the desired amino acid is at least 1% of the total number of residues in a protein; more preferably 2% or greater. Amino acids of particular interest are tryptophan, lysine, methionine, phenylalanine, threonine leucine, valine, and isoleucine.

[0483] The sequence(s) encoding the selected protein(s) is operably linked to a promoter and other regulatory sequences and transformed into a plant as described below. The promoter is chosen for promoting the optimal desired level of expression of the protein in the selected organ e.g. a promoter highly functional in seeds. Modifications may be made to the sequence encoding the protein to ensure protein transport into, for example, organelles or storage bodies or its accumulation in the organ. Such modifications may include addition of signal sequences at or near the N terminus and amino acid residues to modify protein stability or appropriate glycosylation. Other modifications may be made to the transcribed nucleic acid sequence to enhance the stability or translatability of the mRNA, in order to ensure accumulation of more of the desired protein. Suitable versions of the gene construct and transgenic plants are selected on the basis of, for example, the improved amino acid content and nutritional value measured by standard biochemical tests and animal feeding trials.

### VI. USE OF NOVEL GENES TO FACILITATE EXPLOITATION OF PLANTS AS FACTORIES FOR THE SYNTHESIS OF VALUBLE MOLECULES

[0484] Plants and their constituent cells, tissues, and organs are factories that manufacture small organic molecules such as sugars, amino acids, fatty acids, vitamins, etc., as well as macromolecules such as proteins, nucleic acids, oils/fats and carbohydrates. Plants have long been a source of pharmaceutically beneficial chemical, particularly the secondary metabolites and hormone-related molecules synthesized by plants. Plants can also be used as factories to produce carbohydrates or lipids that comprises a carbon backbone useful as the precursor of plastics, fiber, fuel, paper, pulp, rubber, solvents, lubricants, construction materials, detergents, and other cleaning materials. Plants can also generate other compounds that are of economic value, such as dyes, flavors and fragrances. Both the intermediates as well as the end-products of plant bio-synthetic pathways have been found useful.

[0485] With the polynucleotides and polypeptides of the instant invention, modification of both in-vitro and in-vivo synthesis of such products is possible. One method of increasing the amount of either the intermediates or the end-products synthesized in a cell is to increase the expression of one or more proteins in the synthesis pathway as discussed below. Another method of increasing production of an intermediate is to inhibit expression of protein(s) that synthesize the end-product from the intermediate. Levels of end-products and intermediates are also modified by changing the levels of enzymes that specifically change or degrade them. The kinds of molecules made are also modified by changing the genes encoding specific enzymes performing reactions at specific steps of the biosynthetic pathway. These genes are from the same or a different organism. The molecular structures in the biosynthetic pathways is thus modified or diverted into different branches of a pathway to make novel end-products.

[0486] The modifications are made by designing one or more novel genes per application comprising promoters, to ensure production of the enzyme(s) in the relevant cells, in the right amount, and polynucleotides encoding the relevant enzyme. The promoters and polynucleotides are the subject of this application. The novel genes are transformed into the relevant species using standard procedures. Their effects are measured by standard assays for the specific chemical/biochemical products.

[0487] The polynucleotides and proteins of the invention that participate in the relevant pathways and are useful for changing production of the above chemicals and biochemicals are identified in the Reference tables by their enzyme function. More specifically, proteins of the invention that have the enzymatic activity of one of the entries in the following table entitled “Enzymes Effecting Modulation of Biological Pathways” are of interest to modulate the corresponding pathways to produce precursors or final products noted above that are of industrial use. Biological activities of particular interest are listed below.

[0488] Other polynucleotides and proteins that regulate where, when and to what extent a pathway is active in a plant are extremely useful for modulating the synthesis and accumulation of valuable chemicals. These elements include transcription factors, proteins involved in signal transduction and other proteins in the control of gene expression and are described elsewhere in this application.

| Pathway | | |
|---|---|---|
| Name | Enzyme Description | |
| | | Comments |
| Alkaloid | Morphine 6- | Also acts on other alkaloids, including codeine, |
| biosynthesis I | dehydrogenase | normorphine and ethylmorphine, but only very |
| | | slowly on 7,8-saturated derivatives such as |
| | | dihydromorphine and dihydrocodeine In the |
| | | reverse direction, also reduces naloxone to the |
| | | 6-alpha-hydroxy analog Activated by 2- |
| | | mercaptoethanol |
| | Codeinone reductase | Stereospecifically catalyses the reversible |
| | (NADPH) | reduction of codeinone to codeine, which is a |
| | | direct precursor of morphine in the opium |
| | | poppy plant, Papaver somniferum |
| | Salutaridine reductase | Stereospecifically catalyses the reversible |
| | (NADPH) | reduction of salutaridine to salutaridinol, which |
| | | is a direct precursor of morphinan alkaloids in |
| | | the poppy plant, Papaver somniferum |
| | (S)-stylopine synthase | Catalyses an oxidative reaction that does not |
| | | incorporate oxygen into the product Forms the |
| | | second methylenedioxy bridge of the |
| | | protoberberine alkaloid stylopine from |
| | | oxidative ring closure of adjacent phenolic and |
| | | methoxy groups of cheilanthifoline |
| | (S)-cheilanthifoline | Catalyses an oxidative reaction that does not |
| | synthase | incorporate oxygen into the product Forms the |
| | | methylenedioxy bridge of the protoberberine |
| | | alkaloid cheilanthifoline from oxidative ring |
| | | closure of adjacent phenolic and methoxy |
| | | groups of scoulerine |
| | Salutaridine synthase | Forms the morphinan alkaloid salutaridine by |
| | | intramolecular phenol oxidation of reticuline |
| | | without the incorporation of oxygen into the |
| | | product |
| | (S)-canadine synthase | Catalyses an oxidative reaction that does not |
| | | incorporate oxygen into the product Oxidation |
| | | of the methoxyphenol group of the alkaloid |
| | | tetrahydrocolumbamine results in the |
| | | formation of the methylenedioxy bridge of |
| | | canadine |
| | Protopine 6- | Involved in benzophenanthridine alkaloid |
| | monooxygenase | synthesis in higher plants |
| | Dihydrosanguinarine | Involved in benzophenanthridine alkaloid |
| | 10-monooxygenase | synthesis in higher plants |
| | Monophenol | A group of copper proteins that also catalyse |
| | monooxygenase | the reaction of EC 1.10.3.1, if only 1,2- |
| | | benzenediols are available as substrate |
| | L-amino acid oxidase | |
| | 1,2-dehydroreticulinium | Stereospecifically reduces the 1,2- |
| | reductase (NADPH) | dehydroreticulinium ion to (R)-reticuline, |
| | | which is a direct precursor of morphinan |
| | | alkaloids in the poppy plant, papaver |
| | | somniferum The enzyme does not catalyse the |
| | | reverse reaction to any significant extent under |
| | | physiological conditions |
| | Dihydrobenzo- | Also catalyzes: dihydrochelirubine + O(2) = |
| | phenanthridine oxidase | chelirubine + H(2)O(2) Also catalyzes: |
| | | dihydromacarpine + O(2) = macarpine + |
| | | H(2)O(2) Found in higher plants Produces |
| | | oxidized forms of the benzophenanthridine |
| | | alkaloids |
| | Reticuline oxidase | The product of the reaction, (S)-scoulerine, is a |
| | | precursor of protopine, protoberberine and |
| | | benzophenanthridine alkaloid biosynthesis in |
| | | plants Acts on (S)-reticuline and related |
| | | compounds, converting the N-methyl group |
| | | into the methylene bridge (\grave{ }berberine |
| | | bridge[PRIME]) of (S)- |
| | | tetrahydroprotoberberines |
| | 3[PRIME]-hydroxy-N- | Involved in isoquinoline alkaloid metabolism |
| | methyl-(S)-coclaurine | in plants Has also been shown to catalyse the |
| | 4[PRIME]-O- | methylation of (R,S)-laudanosoline, (S)- |
| | methyltransferase | 3[PRIME]-hydroxycoclaurine and (R,S)-7-O- |
| | | methylnoraudanosoline |
| | (S)-scoulerine 9-O- | The product of this reaction is a precursor for |
| | methyltransferase | protoberberine alkaloids in plants |
| | Columbamine O- | The product of this reaction is a protoberberine |
| | methyltransferase | alkaloid that is widely distributed in the plant |
| | | kingdom Distinct in specificity from EC |
| | | 2.1.1.88 |
| | 10-hydroxydihydro- | Part of the pathway for synthesis of |
| | sanguinarine 10-O- | benzophenanthridine alkaloids in plants |
| | methyltransferase | |
| | 12-hydroxydi- | Part of the pathway for synthesis of |
| | hydrochelirubine 12-O- | benzophenanthridine alkaloid macarpine in |
| | methyltransferase | plants |
| | (R,S)-norcoclaurine 6- | Norcoclaurine is 6,7-dihydroxy-1-[(4- |
| | O-methyltransferase | hydroxyphenyl)methyl]-1,2,3,4- |
| | | tetrahydroisoquinoline The enzyme will also |
| | | catalyse the 6-O-methylation of (R,S)- |
| | | norlaudanosoline to form 6-O-methyl- |
| | | norlaudanosoline, but this alkaloid has not |
| | | been found to occur in plants |
| | Salutaridinol 7-O- | At higher pH values the product, 7-O- |
| | acetyltransferase | acetylsalutaridinol, spontaneously closes the 4->5 |
| | | oxide bridge by allylic elimination to form |
| | | the morphine precursor thebaine From the |
| | | opium poppy plant, Papaver somniferum |
| | Aspartate | Also acts on L-tyrosine, L-phenylalanine and |
| | aminotransferase | L-tryptophan. This activity can be formed from |
| | | EC 2.6.1.57 by controlled proteolysis |
| | Tyrosine | L-phenylalanine can act instead of L-tyrosine |
| | aminotransferase | The mitochondrial enzyme may be identical |
| | | with EC 2.6.1.1 The three isoenzymic forms |
| | | are interconverted by EC 3.4.22.4 |
| | Aromatic amino acid | L-methionine can also act as donor, more |
| | transferase | slowly Oxaloacetate can act as acceptor |
| | | Controlled proteolysis converts the enzyme to |
| | | EC 2.6.1.1 |
| | Tyrosine decarboxylase | The bacterial enzyme also acts on 3- |
| | | hydroxytyrosine and, more slowly, on 3- |
| | | hydroxyphenylalanine |
| | Aromatic-L-amino-acid | Also acts on L-tryptophan, 5-hydroxy-L- |
| | decarboxylase | tryptophan and dihydroxy-L-phenylalanine |
| | | (DOPA) |
| Alkaloid | Tropine dehydrogenase | Oxidizes other tropan-3-alpha-ols, but not the |
| biosynthesis | | corresponding beta-derivatives |
| II | | |
| | Tropinone reductase | |
| | Hyoscyamine (6S)- | |
| | dioxygenase | |
| | 6-beta- | |
| | hydroxyhyoscyamine | |
| | epoxidase | |
| | Amine oxidase (copper- | A group of enzymes including those oxidizing |
| | containing) | primary amines, diamines and histamine One |
| | | form of EC 1.3.1.15 from rat kidney also |
| | | catalyses this reaction |
| | Putrescine N- | |
| | methyltransferase | |
| | Ornithine | |
| | decarboxylase | |
| | Oxalyl-CoA | |
| | decarboxylase | |
| | Phenylalanine | May also act on L-tyrosine |
| | ammonia-lyase | |
| Androgen and | 3-beta-hydroxy- | Acts on 3-beta-hydroxyandrost-5-en-17-one to |
| estrogen | delta(5)-steroid | form androst-4-ene-3,17-dione and on 3-beta- |
| metabolism | dehydrogenase | hydroxypregn-5-en-20-one to form |
| | | progesterone |
| | 11-beta-hydroxysteroid | |
| | dehydrogenase | |
| | Estradiol 17-alpha- | |
| | dehydrogenase | |
| | 3-alpha-hydroxy-5- | |
| | beta-androstane-17-one | |
| | 3-alpha-dehydrogenase | |
| | 3-alpha (17-beta)- | Also acts on other 17-beta-hydroxysteroids, on |
| | hydroxysteroid | the 3-alpha-hydroxy group of pregnanes and |
| | dehydrogenase (NAD+) | bile acids, and on benzene dihydrodiol |
| | | Different from EC 1.1.1.50 or EC 1.1.1.213 |
| | 3-alpha-hydroxysteroid | Acts on other 3-alpha-hydroxysteroids and on |
| | dehydrogenase (B- | 9-, 11- and 15-hydroxyprostaglandin B- |
| | specific) | specific with respect to NAD(+) or NADP(+) |
| | | (cf. EC 1.1.1.213) |
| | 3(or 17)beta- | Also acts on other 3-beta- or 17-beta- |
| | hydroxysteroid | hydroxysteroids (cf EC 1.1.1.209) |
| | dehydrogenase | |
| | Estradiol 17 beta- | Also acts on (S)-20-hydroxypregn-4-en-3-one |
| | dehydrogenase | and related compounds, oxidizing the (S)-20- |
| | | group B-specific with respect to NAD(P)(+) |
| | Testosterone 17-beta- | |
| | dehydrogenase | |
| | Testosterone 17-beta- | Also oxidizes 3-hydroxyhexobarbital to 3- |
| | dehydrogenase | oxohexobarbital |
| | (NADP+) | |
| | Steroid 11-beta- | Also hydroxylates steroids at the 18-position, |
| | monooxygenase | and converts 18-hydroxycorticosterone into |
| | | aldosterone |
| | Estradiol 6-beta- | |
| | monooxygenase | |
| | Androst-4-ene-3,17- | Has a wide specificity A single enzyme from |
| | dione monooxygenase | Cylindrocarpon radicicola (EC 1.14.13.54) |
| | | catalyses both this reaction and that catalysed |
| | | by EC 1.14.99.4 |
| | 3-oxo-5-alpha-steroid | |
| | 4-dehydrogenase | |
| | 3-oxo-5-beta-steroid 4- | |
| | dehydrogenase | |
| | UDP- | Family of enzymes accepting a wide range of |
| | glucuronosyltransferase | substrates, including phenols, alcohols, amines |
| | | and fatty acids Some of the activities catalysed |
| | | were previously listed separately as EC |
| | | 2.4.1.42, EC 2.4.1.59, EC 2.4.1.61, EC |
| | | 2.4.1.76, EC 2.4.1.77, EC 2.4.1.84, EC |
| | | 2.4.1.107 and EC 2.4.1.108 A temporary |
| | | nomenclature for the various forms whose |
| | | delineation is in a state of flux |
| | Steroid sulfotransferase | Broad specificity resembling EC 2.8.2.2, but |
| | | also acts on estrone |
| | Alcohol | Primary and secondary alcohols, including |
| | sulfotransferase | aliphatic alcohols, ascorbate, chloramphenicol, |
| | | ephedrine and hydroxysteroids, but not |
| | | phenolic steroids, can act as acceptors (cf. EC |
| | | 2.8.2.15) |
| | Estrone sulfotransferase | |
| | Arylsulfatase | A group of enzymes with rather similar |
| | | specificities |
| | Steryl-sulfatase | Also acts on some related steryl sulfates |
| | 17-alpha- | |
| | hydroxyprogesterone | |
| | aldolase | |
| | Steroid delta-isomerase | |
| C21-Steroid | 3-beta-hydroxy- | Acts on 3-beta-hydroxyandrost-5-en-17-one to |
| hormone | delta(5)-steroid | form androst-4-ene-3,17-dione and on 3-beta- |
| metabolism | dehydrogenase | hydroxypregn-5-en-20-one to form |
| | | progesterone |
| | 11-beta-hydroxysteroid | |
| | dehydrogenase | |
| | 20-alpha- | A-specific with respect to NAD(P)(+) |
| | hydroxysteroid | |
| | dehydrogenase | |
| | 3-alpha-hydroxysteroid | Acts on other 3-alpha-hydroxysteroids and on |
| | dehydrogenase (B- | 9-, 11- and 15-hydroxyprostaglandin B- |
| | specific) | specific with respect to NAD(+) or NADP(+) |
| | | (cf. EC 1.1.1.213) |
| | 3-alpha(or 20-beta)- | The 3-alpha-hydroxyl group or 20-beta- |
| | hydroxysteroid | hydroxyl group of pregnane and androstane |
| | dehydrogenase | steroids can act as donors |
| | Steroid 11-beta- | Also hydroxylates steroids at the 18-position, |
| | monooxygenase | and converts 18-hydroxycorticosterone into |
| | | aldosterone |
| | Corticosterone 18- | |
| | monooxygenase | |
| | Cholesterol | The reaction proceeds in three stages, with |
| | monooxygenase (side- | hydroxylation at C-20 and C-22 preceding |
| | chain cleaving) | scission of the side-chain at C-20 |
| | Steroid 21- | |
| | monooxygenase | |
| | Progesterone 11-alpha- | |
| | monooxygenase | |
| | Steroid 17-alpha- | |
| | monooxygenase | |
| | Cholestenone 5-beta- | |
| | reductase | |
| | Cortisone beta- | |
| | reductase | |
| | Progesterone 5-alpha- | Testosterone and 20-alpha-hydroxy-4-pregnen- |
| | reductase | 3-one can act in place of progesterone |
| | 3-oxo-5-beta-steroid 4- | |
| | dehydrogenase | |
| | Steroid delta-isomerase | |
| Flavonoids, | Coniferyl-alcohol | Specific for coniferyl alcohol; does not act on |
| stilbene and | dehydrogenase | cinnamyl alcohol, 4-coumaryl alcohol or |
| lignin | | sinapyl alcohol |
| biosynthesis | | |
| | Cinnamyl-alcohol | Acts on coniferyl alcohol, sinapyl alcohol, 4- |
| | dehydrogenase | coumaryl alcohol and cinnamyl alcohol (cf. EC |
| | | 1.1.1.194) |
| | Dihydrokaempferol 4- | Also acts, in the reverse direction, on (+)- |
| | reductase | dihydroquercetin and (+)-dihydromyricetin |
| | | Each dihydroflavonol is reduced to the |
| | | corresponding cis-flavon-3,4-diol NAD(+) can |
| | | act instead of NADP(+), more slowly Involved |
| | | in the biosynthesis of anthocyanidins in plants |
| | Flavonone 4-reductase | Involved in the biosynthesis of 3- |
| | | deoxyanthocyanidins from flavonones such as |
| | | naringenin or eriodictyol |
| | Peroxidase | |
| | Caffeate 3,4- | |
| | dioxygenase | |
| | Naringenin 3- | |
| | dioxygenase | |
| | Trans-cinnamate 4- | Also acts on NADH, more slowly |
| | monooxygenase | |
| | Trans-cinnamate 2- | |
| | monooxygenase | |
| | Flavonoid 3[PRIME]- | Acts on a number of flavonoids, including |
| | monooxygenase | naringenin and dihydrokaempferol Does not |
| | | act on 4-coumarate or 4-coumaroyl-CoA |
| | Monophenol | A group of copper proteins that also catalyse |
| | monooxygenase | the reaction of EC 1.10.3.1, if only 1,2- |
| | | benzenediols are available as substrate |
| | Cinnamoyl-CoA | Also acts on a number of substituted |
| | reductase | cinnamoyl esters of coenzyme A |
| | Caffeoyl-CoA O- | |
| | methyltransferase | |
| | Luteolin O- | Also acts on luteolin-7-O-beta-D-glucoside |
| | methyltransferase | |
| | Caffeate O- | 3,4-dihydroxybenzaldehyde and catechol can |
| | methyltransferase | act as acceptor, more slowly |
| | Apigenin 4[PRIME]-O- | Converts apigenin into acacetin Naringenin |
| | methyltransferase | (5,7,4[PRIME]-trihydroxyflavonone) can also |
| | | act as acceptor, more slowly |
| | Quercetin 3-O- | Specific for quercetin. Related enzymes bring |
| | methyltransferase | about the 3-O-methylation of other flavonols, |
| | | such as galangin and kaempferol |
| | Isoflavone-7-O-beta- | The 6-position of the glucose residue of |
| | glucoside | formononetin can also act as acceptor Some |
| | 6[PRIME][PRIME]-O- | other 7-O-glucosides of isoflavones, flavones |
| | malonyltransferase | and flavonols can also act, more slowly |
| | Pinosylvin synthase | Not identical with EC 2.3.1.74 or EC 2.3.1.95 |
| | Naringenin-chalcone | In the presence of NADH and a reductase, |
| | synthase | 6[PRIME]-deoxychalcone is produced |
| | Trihydroxystilbene | Not identical with EC 2.3.1.74 or EC 2.3.1.146 |
| | synthase | |
| | Quinate O- | Caffeoyl-CoA and 4-coumaroyl-CoA can also |
| | hydroxycinnamoyltransferase | act as donors, more slowly Involved in the |
| | | biosynthesis of chlorogenic acid in sweet |
| | | potato and, with EC 2.3.1.98 in the formation |
| | | of caffeoyl-CoA in tomato |
| | Coniferyl-alcohol | Sinapyl alcohol can also act as acceptor |
| | glucosyltransferase | |
| | 2-coumarate O-beta- | Coumarinate (cis-2-hydroxycinnamate) does |
| | glucosyltransferase | not act as acceptor |
| | Scopoletin | |
| | glucosyltransferase | |
| | Flavonol-3-O-glucoside | Converts flavonol 3-O-glucosides to 3-O- |
| | L-rhamnosyltransferase | rutinosides Also acts, more slowly, on rutin, |
| | | quercetin 3-O-galactoside and flavonol O3- |
| | | rhamnosides |
| | Flavone 7-O-beta- | A number of flavones, flavonones and |
| | glucosyltransferase | flavonols can function as acceptors Different |
| | | from EC 2.4.1.91 |
| | Flavonol 3-O- | Acts on a variety of flavonols, including |
| | glucosyltransferase | quercetin and quercetin 7-O-glucoside |
| | | Different from EC 2.4.1.81 |
| | Flavone | 7-O-beta-D-glucosides of a number of |
| | apiosyltransferase | flavonoids and of 4-substituted phenols can act |
| | | as acceptors |
| | Coniferin beta- | Also hydrolyzes syringin, 4-cinnamyl alcohol |
| | glucosidase | beta-glucoside, and, more slowly, some other |
| | | aryl beta-glycosides A plant cell-wall enzyme |
| | | involved in the biosynthesis of lignin |
| | Beta-glucosidase | Wide specificity for beta-D-glucosides. Some |
| | | examples also hydrolyse one or more of the |
| | | following: beta-D-galactosides, alpha-L- |
| | | arabinosides, beta-D-xylosides, and beta-D- |
| | | fucosides |
| | Chalcone isomerase | |
| | 4-coumarate--CoA | |
| | ligase | |
| | | Enzyme Comments |
| Ascorbate and aldarate | D-threo-aldose 1- | Acts on L-fucose, D-arabinose and L- |
| metabolism | dehydrogenase | xylose The animal enzyme was also |
| | | shown to act on L-arabinose, and the |
| | | enzyme from Pseudomonas caryophylli |
| | | on L-glucose |
| | L-threonate 3- | |
| | dehydrogenase | |
| | Glucuronate reductase | Also reduces D-galacturonate May be |
| | | identical with EC 1.1.1.2 |
| | Glucuronolactone | |
| | reductase | |
| | L-arabinose 1- | |
| | dehydrogenase | |
| | L-galactonolactone | Acts on the 1,4-lactones of L-galactonic, |
| | oxidase | D-altronic, L-fuconic, D-arabinic and D- |
| | | threonic acids Not identical with EC |
| | | 1.1.3.8 (cf. EC 1.3.2.3) |
| | L-gulonolactone | The product spontaneously isomerizes to |
| | oxidase | L-ascorbate |
| | L-ascorbate oxidase | |
| | L-ascorbate peroxidase | |
| | Ascorbate 2,3- | |
| | dioxygenase | |
| | 2,5-dioxovalerate | |
| | dehydrogenase | |
| | Aldehyde | Wide specificity, including oxidation of |
| | dehydrogenase (NAD+) | D-glucuronolactone to D-glucarate |
| | Galactonolactone | Cf. EC 1.1.3.24 |
| | dehydrogenase | |
| | Monodehydroascorbate | |
| | reductase (NADH) | |
| | Glutathione | |
| | dehydrogenase | |
| | (ascorbate) | |
| | L-arabinonolactonase | |
| | Gluconolactonase | Acts on a wide range of hexono-1,5- |
| | | lactones |
| | Uronolactonase | |
| | 1,4-lactonase | Specific for 1,4-lactones with 4-8 carbon |
| | | atoms Does not hydrolyse simple |
| | | aliphatic esters, acetylcholine, sugar |
| | | lactones or substituted aliphatic lactones, |
| | | e.g. 3-hydroxy-4-butyrolactone |
| | 2-dehydro-3- | |
| | deoxyglucarate aldolase | |
| | L-arabinonate | |
| | dehydratase | |
| | Glucarate dehydratase | |
| | 5-dehydro-4- | |
| | deoxyglucarate | |
| | dehydratase | |
| | Galactarate dehydratase | |
| | 2-dehydro-3-deoxy-L- | |
| | arabinonate | |
| | dehydratase | |
| Carbon fixation | Malate dehydrogenase | Also oxidizes some other 2- |
| | | hydroxydicarboxylic acids |
| | Malate dehydrogenase | Does not decarboxylates added |
| | (decarboxylating) | oxaloacetate |
| | Malate dehydrogenase | Also decarboxylates added oxaloacetate |
| | (oxaloacetate | |
| | decarboxylating) | |
| | (NADP+) | |
| | Malate dehydrogenase | Activated by light |
| | (NADP+) | |
| | Glyceraldehyde-3- | |
| | phosphate | |
| | dehydrogenase | |
| | (NADP+) | |
| | (phosphorylating) | |
| | Transketolase | Wide specificity for both reactants, e.g. |
| | | converts hydroxypyruvate and R—CHO |
| | | into CO(2) and R—CHOH—CO—CH(2)OH |
| | | Transketolase from Alcaligenes faecalis |
| | | shows high activity with D-erythrose as |
| | | acceptor |
| | Aspartate | Also acts on L-tyrosine, L-phenylalanine |
| | aminotransferase | and L-tryptophan. This activity can be |
| | | formed from EC 2.6.1.57 by controlled |
| | | proteolysis |
| | Alanine | 2-aminobutanoate acts slowly instead of |
| | aminotransferase | alanine |
| | Sedoheptulokinase | |
| | Phosphoribulokinase | |
| | Pyruvate kinase | UTP, GTP, CTP, ITP and dATP can also |
| | | act as donors Also phosphorylates |
| | | hydroxylamine and fluoride in the |
| | | presence of CO(2) |
| | Phosphoglycerate | |
| | kinase | |
| | Pyruvate, phosphate | |
| | dikinase | |
| | Fructose- | The animal enzyme also acts on |
| | bisphosphatase | sedoheptulose 1,7-bisphosphate |
| | Sedoheptulose- | |
| | bisphosphatase | |
| | Phosphoenolpyruvate | |
| | carboxylase | |
| | Ribulose-bisphosphate | Will utilize O(2) instead of CO(2), |
| | carboxylase | forming 3-phospho-D-glycerate and 2- |
| | | phosphoglycolate |
| | Phosphoenolpyruvate | |
| | carboxykinase (ATP) | |
| | Fructose-bisphosphate | Also acts on (3S,4R)-ketose 1-phosphates |
| | aldolase | The yeast and bacterial enzymes are zinc |
| | | proteins The enzymes increase electron- |
| | | attraction by the carbonyl group, some |
| | | (Class I) forming a protonated imine with |
| | | it, others (Class II), mainly of microbial |
| | | origin, polarizing it with a metal ion, e.g |
| | | zinc |
| | Phosphoketolase | |
| | Ribulose-phosphate 3- | Also converts D-erythrose 4-phosphate |
| | epimerase | into D-erythrulose 4-phosphate and D- |
| | | threose 4-phosphate |
| | Triosephosphate | |
| | isomerase | |
| | Ribose 5-phosphate | Also acts on D-ribose 5-diphosphate and |
| | epimerase | D-ribose 5-triphosphate |
| Phenylalanine | (R)-4- | Also acts, more slowly, on (R)-3- |
| metabolism | hydroxyphenyllactate | phenyllactate, (R)-3-(indole-3-yl)lactate |
| | dehydrogenase | and (R)-lactate |
| | Hydroxyphenyl- | Also acts on 3-(3,4- |
| | pyruvate reductase | dihydroxyphenyl)lactate Involved with |
| | | EC 2.3.1.140 in the biosynthesis of |
| | | rosmarinic acid |
| | Aryl-alcohol | A group of enzymes with broad |
| | dehydrogenase | specificity towards primary alcohols with |
| | | an aromatic or cyclohex-1-ene ring, but |
| | | with low or no activity towards short- |
| | | chain aliphatic alcohols |
| | Peroxidase | |
| | Catechol 1,2- | Involved in the metabolism of nitro- |
| | dioxygenase | aromatic compounds by a strain of |
| | | Pseudomonas putida |
| | 2,3-dihydroxybenzoate | |
| | 3,4-dioxygenase | |
| | 3-carboxyethylcatechol | |
| | 2,3-dioxygenase | |
| | Catechol 2,3- | The enzyme from Alcaligines sp. strain |
| | dioxygenase | O-1 has also been shown to catalyse the |
| | | reaction: 3-Sulfocatechol + O(2) + H(2)O = |
| | | 2-hydroxymuconate + bisulfite. It has |
| | | been referred to as 3-sulfocatechol 2,3- |
| | | dioxygenase. Further work will be |
| | | necessary to show whether or not this is a |
| | | distinct enzyme |
| | 4- | |
| | hydroxyphenylpyruvate | |
| | dioxygenase | |
| | Protocatechuate 3,4- | |
| | dioxygenase | |
| | Hydroxyquinol 1,2- | The product isomerizes to 2- |
| | dioxygenase | maleylacetate (cis-hex-2-enedioate) |
| | | Highly specific; catechol and pyrogallol |
| | | are acted on at less than 1% of the rate at |
| | | which benzene-1,2,4-triol is oxidized |
| | Protocatechuate 4,5- | |
| | dioxygenase | |
| | Phenylalanine 2- | Also catalyses a reaction similar to that |
| | monooxygenase | of EC 1.4.3.2, forming 3-phenylpyruvate, |
| | | NH(3) and H(2)O(2), but more slowly |
| | Anthranilate 1,2- | |
| | dioxygenase | |
| | (deaminating, | |
| | decarboxylating) | |
| | Benzoate 1,2- | A system, containing a reductase which |
| | dioxygenase | is an iron-sulfur flavoprotein (FAD), and |
| | | an iron-sulfur oxygenase |
| | Toluene dioxygenase | A system, containing a reductase which |
| | | is an iron-sulfur flavoprotein (FAD), an |
| | | iron-sulfur oxygenase, and a ferredoxin |
| | | Some other aromatic compounds, |
| | | including ethylbenzene, 4-xylene and |
| | | some halogenated toluenes, are converted |
| | | into the corresponding cis-dihydrodiols |
| | Naphthalene 1,2- | A system, containing a reductase which |
| | dioxygenase | is an iron-sulfur flavoprotein (FAD), an |
| | | iron-sulfur oxygenase, and ferredoxin |
| | Benzene 1,2- | A system, containing a reductase which |
| | dioxygenase | is an iron-sulfur flavoprotein, an iron- |
| | | sulfur oxygenase and ferredoxin |
| | Salicylate 1- | |
| | monooxygenase | |
| | Trans-cinnamate 4- | Also acts on NADH, more slowly |
| | monooxygenase | |
| | Benzoate 4- | |
| | monooxygenase | |
| | 4-hydroxybenzoate 3- | Most enzymes from Pseudomonas are |
| | monooxygenase | highly specific for NAD(P)H (cf EC |
| | | 1.14.13.33) |
| | 3-hydroxybenzoate 4- | Also acts on a number of analogs of 3- |
| | monooxygenase | hydroxybenzoate substituted in the 2, 4, 5 |
| | | and 6 positions |
| | 3-hydroxybenzoate 6- | Also acts on a number of analogs of 3- |
| | monooxygenase | hydroxybenzoate substituted in the 2, 4, 5 |
| | | and 6 positions NADPH can act instead |
| | | of NADH, more slowly |
| | 4-hydroxybenzoate 3- | The enzyme from Corynebacterium |
| | monooxygenase | cyclohexanicum is highly specific for 4- |
| | (NAD(P)H) | hydroxybenzoate, but uses NADH and |
| | | NADPH at approximately equal rates (cf. |
| | | EC 1.14.13.2). It is less specific for |
| | | NADPH than EC 1.14.13.2 |
| | Anthranilate 3- | The enzyme from Aspergillus niger is an |
| | monooxygenase | iron protein; that from the yeast |
| | (deaminating) | Trichosporon cutaneum is a flavoprotein |
| | | (FAD) |
| | Melilotate 3- | |
| | monooxygenase | |
| | Phenol 2- | Also active with resorcinol and O-cresol |
| | monooxygenase | |
| | Mandelate 4- | |
| | monooxygenase | |
| | 3-hydroxybenzoate 2- | |
| | monooxygenase | |
| | 4-cresol dehydrogenase | Phenazine methosulfate can act as |
| | (hydroxylating) | acceptor A quinone methide is probably |
| | | formed as intermediate The product is |
| | | oxidized further to 4-hydroxybenzoate |
| | Benzaldehyde | |
| | dehydrogenase (NAD+) | |
| | Aminomuconate- | Also acts on 2-hydroxymuconate |
| | semialdehyde | semialdehyde |
| | dehydrogenase | |
| | Phenylacetaldehyde | |
| | dehydrogenase | |
| | 4-carboxy-2- | Does not act on unsubstituted aliphatic or |
| | hydroxymuconate-6- | aromatic aldehydes or glucose NAD(+) |
| | semialdehyde | can replace NADP(+), but with lower |
| | dehydrogenase | affinity |
| | Aldehyde | |
| | dehydrogenase | |
| | (NAD(P)+) | |
| | Benzaldehyde | |
| | dehydrogenase | |
| | (NADP+) | |
| | Coumarate reductase | |
| | Cis-1,2- | |
| | dihydrobenzene-1,2- | |
| | diol dehydrogenase | |
| | Cis-1,2-dihydro-1,2- | Also acts, at half the rate, on cis- |
| | dihydroxynaphthalene | anthracene dihydrodiol and cis- |
| | dehydrogenase | phenanthrene dihydrodiol |
| | 2-enoate reductase | Acts, in the reverse direction, on a wide |
| | | range of alkyl and aryl alpha,beta- |
| | | unsaturated carboxylate ions 2-butenoate |
| | | was the best substrate tested |
| | Maleylacetate reductase | |
| | Phenylalanine | The enzyme from Bacillus badius and |
| | dehydrogenase | Sporosarcina ureae are highly specific for |
| | | L-phenylalanine, that from Bacillus |
| | | sphaericus also acts on L-tyrosine |
| | L-amino acid oxidase | |
| | Amine oxidase (flavin- | Acts on primary amines, and usually also |
| | containing) | on secondary and tertiary amines |
| | Amine oxidase (copper- | A group of enzymes including those |
| | containing) | oxidizing primary amines, diamines and |
| | | histamine One form of EC 1.3.1.15 from |
| | | rat kidney also catalyses this reaction |
| | D-amino-acid | Acts to some extent on all D-amino acids |
| | dehydrogenase | except D-aspartate and D-glutamate |
| | Aralkylamine | Phenazine methosulfate can act as |
| | dehydrogenase | acceptor Acts on aromatic amines and, |
| | | more slowly, on some long-chain |
| | | aliphatic amines, but not on methylamine |
| | | or ethylamine (cf EC 1.4.99.3) |
| | Glutamine N- | |
| | phenylacetyltransferase | |
| | Acetyl-CoA C- | |
| | acyltransferase | |
| | D-amino-acid N- | |
| | acetyltransferase | |
| | Phenylalanine N- | Also acts, more slowly, on L-histidine |
| | acetyltransferase | and L-alanine |
| | Glycine N- | Not identical with EC 2.3.1.13 or EC |
| | benzoyltransferase | 2.3.1.68 |
| | Aspartate | Also acts on L-tyrosine, L-phenylalanine |
| | aminotransferase | and L-tryptophan. This activity can be |
| | | formed from EC 2.6.1.57 by controlled |
| | | proteolysis |
| | D-alanine | Acts on the D-isomers of leucine, |
| | aminotransferase | aspartate, glutamate, aminobutyrate, |
| | | norvaline and asparagine |
| | Tyrosine | L-phenylalanine can act instead of L- |
| | aminotransferase | tyrosine The mitochondrial enzyme may |
| | | be identical with EC 2.6.1.1 The three |
| | | isoenzymic forms are interconverted by |
| | | EC 3.4.22.4 |
| | Aromatic amino acid | L-methionine can also act as donor, more |
| | transferase | slowly Oxaloacetate can act as acceptor |
| | | Controlled proteolysis converts the |
| | | enzyme to EC 2.6.1.1 |
| | Histidinol-phosphate | |
| | aminotransferase | |
| | 3-oxoadipate CoA- | |
| | transferase | |
| | 3-oxoadipate enol- | Acts on the product of EC 4.1.1.44 |
| | lactonase | |
| | Carboxymethylene- | |
| | butenolidase | |
| | 2-pyrone-4,6- | The product isomerizes to 4- |
| | dicarboxylate lactonase | oxalmesaconate |
| | Hippurate hydrolase | Acts on various N-benzoylamino acids |
| | Amidase | |
| | Acylphosphatase | |
| | 2-hydroxymuconate- | |
| | semialdehyde hydrolase | |
| | Aromatic-L-amino-acid | Also acts on L-tryptophan, 5-hydroxy-L- |
| | decarboxylase | tryptophan and dihydroxy-L- |
| | | phenylalanine (DOPA) |
| | Phenylpyruvate | Also acts on indole-3-pyruvate |
| | decarboxylase | |
| | 4-carboxymucono- | |
| | lactone decarboxylase | |
| | O-pyrocatechuate | |
| | decarboxylase | |
| | Phenylalanine | Also acts on tyrosine and other aromatic |
| | decarboxylase | amino acids |
| | 4-hydroxybenzoate | |
| | decarboxylase | |
| | Protocatechuate | |
| | decarboxylase | |
| | Benzoylformate | |
| | decarboxylase | |
| | 4-oxalocrotonate | Involved in the meta-cleavage pathway |
| | decarboxylase | for the degradation of phenols, cresols |
| | | and catechols |
| | 4-hydroxy-4-methyl-2- | Also acts on 4-hydroxy-4-methyl-2- |
| | oxoglutarate aldolase | oxoadipate and 4-carboxy-4-hydroxy-2- |
| | | oxohexadioate |
| | 2-oxopent-4-enoate | Also acts, more slowly, on cis-2-oxohex- |
| | hydratase | 4-enoate, but not on the trans-isomer |
| | Phenylalanine | May also act on L-tyrosine |
| | ammonia-lyase | |
| | Phenylalanine racemase | |
| | (ATP-hydrolysing) | |
| | Mandelate racemase | |
| | Phenylpyruvate | Also acts on other arylpyruvates |
| | tautomerase | |
| | 5-carboxymethyl-2- | |
| | hydroxymuconate | |
| | delta-isomerase | |
| | Muconolactone delta- | |
| | isomerase | |
| | Muconate | Also acts, in the reverse reaction, on 3- |
| | cycloisomerase | methyl-cis-cis-hexa-dienedioate and, |
| | | very slowly, on cis-trans-hexadienedioate |
| | | Not identical with EC 5.5.1.7 or EC |
| | | 5.5.1.11 |
| | 3-carboxy-cis,cis- | |
| | muconate | |
| | cycloisomerase | |
| | Carboxy-cis,cis- | |
| | muconate cyclase | |
| | Chloromuconate | Spontaneous elimination of HCl produces |
| | cycloisomerase | cis-4-carboxymethylenebut-2-en-4-olide |
| | | Also acts in reverse direction on 2- |
| | | chloro-cis,cis-muconate Not identical |
| | | with EC 5.5.1.1 or EC 5.5.1.11 |
| | Phenylacetate--CoA | Phenoxyacetate can replace phenylacetate |
| | ligase | |
| | Benzoate--CoA ligase | Also acts on 2-, 3- and 4-fluorobenzoate, |
| | | but only very slowly on the |
| | | corresponding chlorobenzoates |
| | 4-hydroxybenzoate-- | |
| | CoA ligase | |
| | Phenylacetate--CoA | Also acts, more slowly, on acetate, |
| | ligase | propanoate and butanoate, but not on |
| | | hydroxy derivatives of phenylacetate and |
| | | related compounds |
| Phenylalanine, tyrosine | Quinate 5- | |
| and tryptophan biosynthesis | dehydrogenase | |
| | Shikimate 5- | |
| | dehydrogenase | |
| | Quinate dehydrogenase | |
| | (pyrroloquinoline- | |
| | quinone) | |
| | Phenylalanine 4- | |
| | monooxygenase | |
| | Prephenate | This enzyme in the enteric bacteria also |
| | dehydrogenase | possesses chorismate mutase activity (EC |
| | | 5.4.99.5) and converts chorismate into |
| | | prephenate |
| | Prephenate | |
| | dehydrogenase | |
| | (NADP+) | |
| | Cyclohexadienyl | Also acts on prephenate and D- |
| | dehydrogenase | prephenyllactate (cf. EC 1.3.1.12) |
| | 2-methyl-branched- | From Ascaris suum The reaction |
| | chain-enoyl-CoA | proceeds only in the presence of another |
| | reductase | flavoprotein (ETF = [PRIME]Electron- |
| | | Transferring Flavoprotein[PRIME]) |
| | Phenylalanine | The enzyme from Bacillus badius and |
| | dehydrogenase | Sporosarcina ureae are highly specific for |
| | | L-phenylalanine, that from Bacillus |
| | | sphaericus also acts on L-tyrosine |
| | L-amino acid oxidase | |
| | Anthranilate | In some organisms, this enzyme is part of |
| | phosphoribosyl- | a multifunctional protein together with |
| | transferase | one or more components of the system |
| | | for biosynthesis of tryptophan (EC |
| | | 4.1.1.48, EC 4.1.3.27, EC 4.2.1.20, and |
| | | EC 5.3.1.24) |
| | 3-phosphoshikimate 1- | |
| | carboxyvinyl- | |
| | transferase | |
| | Aspartate | Also acts on L-tyrosine, L-phenylalanine |
| | aminotransferase | and L-tryptophan. This activity can be |
| | | formed from EC 2.6.1.57 by controlled |
| | | proteolysis |
| | Tyrosine | L-phenylalanine can act instead of L- |
| | aminotransferase | tyrosine The mitochondrial enzyme may |
| | | be identical with EC 2.6.1.1 The three |
| | | isoenzymic forms are interconverted by |
| | | EC 3.4.22.4 |
| | Aromatic amino acid | L-methionine can also act as donor, more |
| | transferase | slowly Oxaloacetate can act as acceptor |
| | | Controlled proteolysis converts the |
| | | enzyme to EC 2.6.1.1 |
| | Histidinol-phosphate | |
| | aminotransferase | |
| | Shikimate kinase | |
| | Indole-3-glycerol- | In some organisms, this enzyme is part of |
| | phosphate synthase | a multifunctional protein together with |
| | | one or more components of the system |
| | | for biosynthesis of tryptophan (EC |
| | | 2.4.2.18, EC 4.1.3.27, EC 4.2.1.20, and |
| | | EC 5.3.1.24) |
| | 2-dehydro-3- | |
| | deoxyphosphoheptonate | |
| | aldolase | |
| | Anthranilate synthase | In some organisms, this enzyme is part of |
| | | a multifunctional protein together with |
| | | one or more components of the system |
| | | for biosynthesis of tryptophan (EC |
| | | 2.4.2.18, EC 4.1.1.48, EC 4.2.1.20, and |
| | | EC 5.3.1.24) The native enzyme in the |
| | | complex with uses either glutamine or |
| | | (less efficiently) NH(3). The enzyme |
| | | separated from the complex uses NH(3) |
| | | only |
| | 3-dehydroquinate | |
| | dehydratase | |
| | Phosphopyruvate | Also acts on 3-phospho-D-erythronate |
| | hydratase | |
| | Tryptophan synthase | Also catalyses the conversion of serine |
| | | and indole into tryptophan and water and |
| | | of indoleglycerol phosphate into indole |
| | | and glyceraldehyde phosphate In some |
| | | organisms, this enzyme is part of a |
| | | multifunctional protein together with one |
| | | or more components of the system for |
| | | biosynthesis of tryptophan (EC 2.4.2.18, |
| | | EC 4.1.1.48, EC 4.1.3.27, and EC |
| | | 5.3.1.24) |
| | Prephenate dehydratase | This enzyme in the enteric bacteria also |
| | | possesses chorismate mutase activity and |
| | | converts chorismate into prephenate |
| | Carboxycyclohexadienyl | Also acts on prephenate and D- |
| | dehydratase | prephenyllactate Cf. EC 4.2.1.51 |
| | 3-dehydroquinate | The hydrogen atoms on C-7 of the |
| | synthase | substrate are retained on C-2 of the |
| | | products |
| | Chorismate synthase | Shikimate is numbered so that the |
| | | double-bond is between C-1 and C-2, but |
| | | some earlier papers numbered in the |
| | | reverse direction |
| | Phosphoribosylanthranilate | In some organisms, this enzyme is part of |
| | isomerase | a multifunctional protein together with |
| | | one or more components of the system |
| | | for biosynthesis of tryptophan (EC |
| | | 2.4.2.18, EC 4.1.1.48, EC 4.1.3.27, and |
| | | EC 4.2.1.20) |
| | Chorismate mutase | |
| | Tyrosine--tRNA ligase | |
| | Phenylalanine--tRNA | |
| | ligase | |
| Starch and sucrose | UDP-glucose 6- | Also acts on UDP-2-deoxyglucose |
| metabolism | dehydrogenase | |
| | Glucoside 3- | The enzyme acts on D-glucose, D- |
| | dehydrogenase | galactose, D-glucosides and D- |
| | | galactosides, but D-glucosides react more |
| | | rapidly than D-galactosides |
| | CDP-4-dehydro-6- | Two proteins are involved but no partial |
| | deoxyglucose reductase | reaction has been observed in the |
| | | presence of either alone |
| | Phosphorylase | The recommended name should be |
| | | qualified in each instance by adding the |
| | | name of the natural substance, e.g. |
| | | maltodextrin phosphorylase, starch |
| | | phosphorylase, glycogen phosphorylase |
| | Levansucrase | Some other sugars can act as D-fructosyl |
| | | acceptors |
| | Glycogen (starch) | The recommended name varies according |
| | synthase | to the source of the enzyme and the |
| | | nature of its synthetic product Glycogen |
| | | synthase from animal tissues is a |
| | | complex of a catalytic subunit and the |
| | | protein glycogenin The enzyme requires |
| | | glucosylated glycogenin as a primer; this |
| | | is the reaction product of EC 2.4.1.186 A |
| | | similar enzyme utilizes ADP-glucose (Cf. |
| | | EC 2.4.1.21) |
| | Cellulose synthase | Involved in the synthesis of cellulose A |
| | (UDP-forming) | similar enzyme utilizes GDP-glucose (Cf. |
| | | EC 2.4.1.29) |
| | Sucrose synthase | |
| | Sucrose-phosphate | |
| | synthase | |
| | Alpha,alpha-trehalose- | See also EC 2.4.1.36 |
| | phosphate synthase | |
| | (UDP-forming) | |
| | UDP- | Family of enzymes accepting a wide |
| | glucuronosyltransferase | range of substrates, including phenols, |
| | | alcohols, amines and fatty acids Some of |
| | | the activities catalysed were previously |
| | | listed separately as EC 2.4.1.42, EC |
| | | 2.4.1.59, EC 2.4.1.61, EC 2.4.1.76, EC |
| | | 2.4.1.77, EC 2.4.1.84, EC 2.4.1.107 and |
| | | EC 2.4.1.108 A temporary nomenclature |
| | | for the various forms whose delineation |
| | | is in a state of flux |
| | 1,4-alpha-glucan | Converts amylose into amylopectin The |
| | branching enzyme | recommended name requires a |
| | | qualification depending on the product, |
| | | glycogen or amylopectin, e.g. glycogen |
| | | branching enzyme, amylopectin |
| | | branching enzyme. The latter has |
| | | frequently been termed Q-enzyme |
| | Cellobiose | |
| | phosphorylase | |
| | Starch (bacterial | The recommended name various |
| | glycogen) synthase | according to the source of the enzyme |
| | | and the nature of its synthetic product, |
| | | e.g. starch synthase, bacterial glycogen |
| | | synthase A similar enzyme utilizes UDP- |
| | | glucose (Cf. EC 2.4.1.11) |
| | 4-alpha- | An enzymic activity of this nature forms |
| | glucanotransferase | part of the mammalian and Yeast |
| | | glycogen branching system (see EC |
| | | 3.2.1.33) |
| | Cellulose synthase | Involved in the synthesis of cellulose A |
| | (GDP-forming) | similar enzyme utilizes UDP-glucose (Cf. |
| | | EC 2.4.1.12) |
| | 1,3-beta-glucan | |
| | synthase | |
| | Phenol beta- | Acts on a wide range of phenols |
| | glucosyltransferase | |
| | Amylosucrase | |
| | Polygalacturonate 4- | |
| | alpha- | |
| | galacturonosyltransferase | |
| | Dextransucrase | |
| | Alpha,alpha-trehalose | |
| | phosphorylase | |
| | Sucrose phosphorylase | In the forward reaction, arsenate may |
| | | replace phosphate In the reverse reaction |
| | | various ketoses and L-arabinose may |
| | | replace D-fructose |
| | Maltose phosphorylase | |
| | 1,4-beta-D-xylan | |
| | synthase | |
| | Hexokinase | D-glucose, D-mannose, D-fructose, |
| | | sorbitol and D-glucosamine can act as |
| | | acceptors ITP and dATP can act as |
| | | donors The liver isoenzyme has |
| | | sometimes been called glucokinase |
| | Phosphoglucokinase | |
| | Glucose-1,6- | D-glucose 6-phosphate can act as |
| | bisphosphate synthase | acceptor, forming D-glucose 1,6- |
| | | bisphosphate |
| | Glucokinase | A group of enzymes found in |
| | | invertebrates and microorganisms highly |
| | | specific for glucose |
| | Fructokinase | |
| | Glucose-1-phosphate | |
| | phosphodismutase | |
| | Protein-N(PI)- | Comprises a group of related enzymes |
| | phosphohistidine-sugar | The protein substrate is a phosphocarrier |
| | phosphotransferase | protein of low molecular mass (9.5 Kd) A |
| | | phosphoenzyme intermediate is formed |
| | | The enzyme translocates the sugar it |
| | | phosphorylates into bacteria Aldohexoses |
| | | and their glycosides and alditols are |
| | | phosphorylated on O-6; fructose and |
| | | sorbose on O-1 Glycerol and |
| | | disaccharides are also substrates |
| | Glucose-1-phosphate | |
| | adenylyltransferase | |
| | Glucose-1-phosphate | |
| | cytidylyltransferase | |
| | Glucose-1-phosphate | Also acts, more slowly, on D-mannose 1- |
| | guanylyltransferase | phosphate |
| | UTP--glucose-1- | |
| | phosphate | |
| | uridylyltransferase | |
| | Pectinesterase | |
| | Trehalose-phosphatase | |
| | Sucrose-phosphatase | |
| | Glucose-6-phosphatase | Wide distribution in animal tissues Also |
| | | catalyses potent transphosphorylations |
| | | from carbamoyl phosphate, hexose |
| | | phosphates, pyrophosphate, |
| | | phosphoenolpyruvate and nucleoside di- |
| | | and triphosphates, to D-glucose, D- |
| | | mannose, 3-methyl-D-glucose, or 2- |
| | | deoxy-D-glucose (cf. EC 2.7.1.62, EC |
| | | 2.7.1.79, and EC 3.9.1.1) |
| | Alpha-amylase | Acts on starch, glycogen and related |
| | | polysaccharides and oligosaccharides in a |
| | | random manner; reducing groups are |
| | | liberated in the alpha-configuration |
| | Oligo-1,6-glucosidase | Also hydrolyses palatinose The enzyme |
| | | from intestinal mucosa is a single |
| | | polypeptide chain also catalysing the |
| | | reaction of EC 3.2.1.48 |
| | Maltose-6[PRIME]- | Hydrolyses a variety of 6-phospho-D- |
| | phosphate glucosidase | glucosides, including maltose 6- |
| | | phosphate, alpha[PRIME]alpha-trehalose |
| | | 6-phosphate, sucrose 6-phosphate and p- |
| | | nitrophenyl-alpha-D-glucopyranoside 6- |
| | | phosphate (as a chromogenic substrate) |
| | | The enzyme is activated by Fe(II), |
| | | Mn(II), Co(II) and Ni(II). It is rapidly |
| | | inactivated in air |
| | Polygalacturonase | |
| | Beta-amylase | Acts on starch, glycogen and related |
| | | polysaccharides and oligosaccharides |
| | | producing beta-maltose by an inversion |
| | Alpha-glucosidase | Group of enzymes whose specificity is |
| | | directed mainly towards the |
| | | exohydrolysis of 1,4-alpha-glucosidic |
| | | linkages, and that hydrolyse |
| | | oligosaccharides rapidly, relative to |
| | | polysaccharides, which are hydrolysed |
| | | relatively slowly, or not at all The |
| | | intestinal enzyme also hydrolyses |
| | | polysaccharides, catalysing the reactions |
| | | of EC 3.2.1.3, and, more slowly, |
| | | hydrolyses 1,6-alpha-D-glucose links |
| | Beta-glucosidase | Wide specificity for beta-D-glucosides. |
| | | Some examples also hydrolyse one or |
| | | more of the following: beta-D- |
| | | galactosides, alpha-L-arabinosides, beta- |
| | | D-xylosides, and beta-D-fucosides |
| | Beta-fructofuranosidase | Substrates include sucrose Also catalyses |
| | | fructotransferase reactions |
| | Alpha,alpha-trehalase | |
| | Glucan 1,4-alpha- | Most forms of the enzyme can rapidly |
| | glucosidase | hydrolyse 1,6-alpha-D-glucosidic bonds |
| | | when the next bond in sequence is 1,4, |
| | | and some preparations of this enzyme |
| | | hydrolyse 1,6- and 1,3-alpha-D- |
| | | glucosidic bonds in other polysaccharides |
| | | This entry covers all such enzymes acting |
| | | on polysaccharides more rapidly than on |
| | | oligosaccharides EC 3.2.1.20 from |
| | | mammalian intestine can catalyse similar |
| | | reactions |
| | Beta-glucuronidase | |
| | Amylo-1,6-glucosidase | In mammals and yeast this enzyme is |
| | | linked to a glycosyltransferase similar to |
| | | EC 2.4.1.25; together these two activities |
| | | constitute the glycogen debranching |
| | | system |
| | Xylan 1,4-beta- | Also hydrolyses xylobiose Some other |
| | xylosidase | exoglycosidase activities have been |
| | | found associated with this enzyme in |
| | | sheep liver |
| | Glucan endo-1,3-beta- | Very limited action on mixed-link (1,3- |
| | D-glucosidase | 1,4-)-beta-D-glucans Hydrolyses |
| | | laminarin, paramylon and pachyman |
| | | Different from EC 3.2.1.6 |
| | Cellulase | Will also hydrolyse 1,4-linkages in beta- |
| | | D-glucans also containing 1,3-linkages |
| | Sucrose alpha- | This enzyme is isolated from intestinal |
| | glucosidase | mucosa as a single polypeptide chain also |
| | | displaying activity towards isomaltose |
| | | (oligo-1,6-glucosidase, cf. EC 3.2.1.10) |
| | Cyclomaltodextrinase | Also hydrolyses linear maltodextrin |
| | Glucan 1,3-beta- | Acts on oligosaccharides but very slowly |
| | glucosidase | on laminaribiose |
| | Levanase | |
| | Galacturan 1,4-alpha- | |
| | galacturonidase | |
| | Glucan 1,4-beta- | Acts on 1,4-beta-D-glucans and related |
| | glucosidase | oligosaccharides Cellobiose is |
| | | hydrolysed, very slowly |
| | Cellulose 1,4-beta- | |
| | cellobiosidase | |
| | Alpha,alpha- | |
| | phosphotrehalase | |
| | ADP-sugar | Has a distinct specificity from the UDP- |
| | diphosphatase | sugar pyrophosphatase (EC 3.6.1.45) |
| | Nucleotide | Substrates include NAD(+), NADP(+), |
| | pyrophosphatase | FAD, CoA and also ATP and ADP |
| | UDP-glucuronate | |
| | decarboxylase | |
| | CDP-glucose 4,6- | |
| | dehydratase | |
| | CDP-abequose | |
| | epimerase | |
| | UDP-glucuronate 4- | |
| | epimerase | |
| | Glucose-6-phosphate | Also catalyses the anomerization of D- |
| | isomerase | glucose 6-phosphate |
| | Phosphoglucomutase | Maximum activity is only obtained in the |
| | | presence of alpha-D-glucose 1,6- |
| | | bisphosphate. This bisphosphate is an |
| | | intermediate in the reaction, being |
| | | formed by transfer of a phosphate residue |
| | | from the enzyme to the substrate, but the |
| | | dissociation of bisphosphate from the |
| | | enzyme complex is much slower than the |
| | | overall isomerization Also, more slowly, |
| | | catalyses the interconversion of 1- |
| | | phosphate and 6-phosphate isomers of |
| | | many other alpha-D-hexoses, and the |
| | | interconversion of alpha-D-ribose 1- |
| | | phosphate and 5-phosphate |
| | Beta- | |
| | phosphoglucomutase | |
| | Maltose alpha-D- | |
| | glucosyltransferase | |
| Tryptophan metabolism | Indole-3-lactate | |
| | dehydrogenase | |
| | Indole-3-acetaldehyde | |
| | reductase (NADH) | |
| | Indole-3-acetaldehyde | |
| | reductase (NADPH) | |
| | 3-hydroxyacyl-CoA | Also oxidizes S-3-hydroxyacyl-N- |
| | dehydrogenase | acylthioethanolamine and S-3- |
| | | hydroxyacylhydrolipoate Some enzymes |
| | | act, more slowly, with NADP(+) Broad |
| | | specificity to acyl chain-length (cf. EC |
| | | 1.1.1.211) |
| | O-aminophenol oxidase | Isophenoxazine may be formed by a |
| | | secondary condensation from the initial |
| | | oxidation product |
| | Catalase | This enzyme can also act as a peroxidase |
| | | (EC 1.11.1.7) for which several organic |
| | | substances, especially ethanol, can act as |
| | | a hydrogen donor A manganese protein |
| | | containing Mn(III) in the resting state, |
| | | which also belongs here, is often called |
| | | pseudocatalase Enzymes from some |
| | | microorganisms, such as Penicillium |
| | | simplicissimum, which exhibit both |
| | | catalase and peroxidase activity, have |
| | | sometimes been referred to as catalase- |
| | | peroxidase |
| | 7,8- | |
| | dihydroxykynurenate | |
| | 8,8A-dioxygenase | |
| | Tryptophan 2,3- | Broad specificity towards tryptamine and |
| | dioxygenase | derivatives including D- and L- |
| | | tryptophan, 5-hydroxytryptophan and |
| | | serotonin |
| | Indole 2,3-dioxygenase | The enzyme from jasminum is a |
| | | flavoprotein containing copper, and |
| | | forms anthranilate as the final product |
| | | One enzyme from Tecoma stans is also a |
| | | flavoprotein containing copper and uses |
| | | three atoms of oxygen per molecule of |
| | | indole, to form anthranil (3,4- |
| | | benzisoxazole) A second enzyme from |
| | | Tecoma stans, which is not a |
| | | flavoprotein, uses four atoms of oxygen |
| | | and forms anthranilate as the final |
| | | product |
| | 2,3-dihydroxyindole | |
| | 2,3-dioxygenase | |
| | Indoleamine-pyrrole | Acts on many substituted and |
| | 2,3-dioxygenase | unsubstituted indoleamines, including |
| | | melatonin Involved in the degradation of |
| | | melatonin |
| | 3-hydroxyanthranilate | The product of the reaction |
| | 3,4-dioxygenase | spontaneously rearrange to quinolinic |
| | | acid (quin) |
| | Tryptophan 2- | |
| | monooxygenase | |
| | Tryptophan 2[PRIME]- | Acts on a number of indolyl-3-alkane |
| | dioxygenase | derivatives, oxidizing the 3-side-chain in |
| | | the 2[PRIME]-position. Best substrates |
| | | are L-tryptophan and 5-hydroxy-L- |
| | | tryptophan |
| | Kynurenine 3- | |
| | monooxygenase | |
| | Unspecific | Acts on a wide range of substrates |
| | monooxygenase | including many xenobiotics, steroids, |
| | | fatty acids, vitamins and prostaglandins |
| | | Reactions catalysed include |
| | | hydroxylation, epoxidation, N-oxidation, |
| | | sulfooxidation, N—, S— and O— |
| | | dealkylations, desulfation, deamination, |
| | | and reduction of azo, nitro, and N-oxide |
| | | groups |
| | Anthranilate 3- | |
| | monooxygenase | |
| | Tryptophan 5- | Activated by phosphorylation, catalysed |
| | monooxygenase | by a CA(2+)-activated protein kinase |
| | Kynurenine 7,8- | |
| | hydroxylase | |
| | Aldehyde | Wide specificity, including oxidation of |
| | dehydrogenase (NAD+) | D-glucuronolactone to D-glucarate |
| | Aminomuconate- | Also acts on 2-hydroxymuconate |
| | semialdehyde | semialdehyde |
| | dehydrogenase | |
| | Aldehyde oxidase | Also oxidizes quinoline and pyridine |
| | | derivatives May be identical with EC |
| | | 1.1.3.22 |
| | Indole-3-acetaldehyde | Also oxidizes indole-3-aldehyde and |
| | oxidase | acetaldehyde, more slowly |
| | Oxoglutarate | Component of the multienzyme 2- |
| | dehydrogenase | oxoglutarate dehydrogenase complex |
| | (lipoamide) | |
| | Kynurenate-7,8- | |
| | dihydrodiol | |
| | dehydrogenase | |
| | Glutaryl-CoA | |
| | dehydrogenase | |
| | L-amino acid oxidase | |
| | Amine oxidase (flavin- | Acts on primary amines, and usually also |
| | containing) | on secondary and tertiary amines |
| | Amine oxidase (copper- | A group of enzymes including those |
| | containing) | oxidizing primary amines, diamines and |
| | | histamine One form of EC 1.3.1.15 from |
| | | rat kidney also catalyses this reaction |
| | Acetylindoxyl oxidase | |
| | Acetylserotonin O- | Some other hydroxyindoles also act as |
| | methyltransferase | acceptor, more slowly |
| | Indole-3-pyruvate C- | |
| | methyltransferase | |
| | Amine N- | A wide range of primary, secondary, and |
| | methyltransferase | tertiary amines can act as acceptors, |
| | | including tryptamine, aniline, nicotine |
| | | and a variety of drugs and other |
| | | xenobiotics |
| | Aralkylamine N- | Narrow specificity towards |
| | acetyltransferase | aralkylamines, including serotonin Not |
| | | identical with EC 2.3.1.5 |
| | Acetyl-CoA C- | |
| | acetyltransferase | |
| | Tryptophan | Also acts on 5-hydroxytryptophan and, to |
| | aminotransferase | a lesser extent on the phenyl amino acids |
| | Kynurenine-- | Also acts on 3-hydroxykynurenine |
| | oxoglutarate | |
| | aminotransferase | |
| | Thioglucosidase | Has a wide specificity for thioglycosides |
| | Amidase | |
| | Formamidase | Also acts, more slowly, on acetamide, |
| | | propanamide and butanamide |
| | Arylformamidase | Also acts on other aromatic |
| | | formylamines |
| | Nitrilase | Acts on a wide range of aromatic nitriles |
| | | including (indole-3-yl)-acetonitrile and |
| | | also on some aliphatic nitriles, and on the |
| | | corresponding acid amides (cf. EC |
| | | 4.2.1.84) |
| | Kynureninase | Also acts on 3[PRIME]- |
| | | hydroxykynurenine and some other (3- |
| | | arylcarbonyl)-alanines |
| | Aromatic-L-amino-acid | Also acts on L-tryptophan, 5-hydroxy-L- |
| | decarboxylase | tryptophan and dihydroxy-L- |
| | | phenylalanine (DOPA) |
| | Phenylpyruvate | Also acts on indole-3-pyruvate |
| | decarboxylase | |
| | Aminocarboxymuconate- | The product rearranges non-enzymically |
| | semialdehyde | to picolinate |
| | decarboxylase | |
| | Tryptophanase | Also catalyses the synthesis of |
| | | tryptophan from indole and serine Also |
| | | catalyses 2,3-elimination and beta- |
| | | replacement reactions of some indole- |
| | | substituted tryptophan analogs of L- |
| | | cysteine, L-serine and other 3-substituted |
| | | amino acids |
| | Enoyl-CoA hydratase | Acts in the reverse direction With cis- |
| | | compounds, yields (3R)-3-hydroxyacyl- |
| | | CoA (cf. EC 4.2.1.74) |
| | Nitrile hydratase | Acts on short-chain aliphatic nitriles, |
| | | converting them into the corresponding |
| | | acid amides Does not act on these amides |
| | | or on aromatic nitriles (cf EC 3.5.5.1) |
| | Tryptophan--tRNA | |
| | ligase | |
| Tyrosine metabolism | Alcohol dehydrogenase | Acts on primary or secondary alcohols or |
| | | hemiacetals The animal, but not the |
| | | yeast, enzyme acts also on cyclic |
| | | secondary alcohols |
| | (R)-4- | Also acts, more slowly, on (R)-3- |
| | hydroxyphenyllactate | phenyllactate, (R)-3-(indole-3-yl)lactate |
| | dehydrogenase | and (R)-lactate |
| | Hydroxyphenylpyruvate | Also acts on 3-(3,4- |
| | reductase | dihydroxyphenyl)lactate Involved with |
| | | EC 2.3.1.140 in the biosynthesis of |
| | | rosmarinic acid |
| | Aryl-alcohol | A group of enzymes with broad |
| | dehydrogenase | specificity towards primary alcohols with |
| | | an aromatic or cyclohex-1-ene ring, but |
| | | with low or no activity towards short- |
| | | chain aliphatic alcohols |
| | Catechol oxidase | Also acts on a variety of substituted |
| | | catechols Many of these enzymes also |
| | | catalyse the reaction listed under EC |
| | | 1.14.18.1; this is especially true for the |
| | | classical tyrosinase |
| | Iodide peroxidase | |
| | 3,4- | |
| | dihydroxyphenylacetate | |
| | 2,3-dioxygenase | |
| | 4- | |
| | hydroxyphenylpyruvate | |
| | dioxygenase | |
| | Stizolobate synthase | The intermediate product undergoes ring |
| | | closure and oxidation, with NAD(P)(+) |
| | | as acceptor, to stizolobic acid |
| | Stizolobinate synthase | The intermediate product undergoes ring |
| | | closure and oxidation, with NAD(P)(+) |
| | | as acceptor, to stizolobinic acid |
| | Gentisate 1,2- | |
| | dioxygenase | |
| | Homogentisate 1,2- | |
| | dioxygenase | |
| | 4-hydroxyphenylacetate | Also acts on 4-hydroxyhydratropate |
| | 1-monooxygenase | forming 2-methylhomogentisate and on |
| | | 4-hydroxyphenoxyacetate forming |
| | | hydroquinone and glycolate |
| | 4-hydroxyphenylacetate | |
| | 3-monooxygenase | |
| | Tyrosine N- | |
| | monooxygenase | |
| | Hydroxyphenylacetonitrile | |
| | 2-monooxygenase | |
| | Tyrosine 3- | Activated by phosphorylation, catalysed |
| | monooxygenase | by EC 2.7.1.128 |
| | Dopamine-beta- | Stimulated by fumarate |
| | monooxygenase | |
| | Monophenol | A group of copper proteins that also |
| | monooxygenase | catalyse the reaction of EC 1.10.3.1, if |
| | | only 1,2-benzenediols are available as |
| | | substrate |
| | Succinate- | |
| | semialdehyde | |
| | dehydrogenase | |
| | (NAD(P)+) | |
| | Aryl-aldehyde | Oxidizes a number of aromatic |
| | dehydrogenase | aldehydes, but not aliphatic aldehydes |
| | Aldehyde | Wide specificity, including oxidation of |
| | dehydrogenase (NAD+) | D-glucuronolactone to D-glucarate |
| | 4-carboxy-2- | Does not act on unsubstituted aliphatic or |
| | hydroxymuconate-6- | aromatic aldehydes or glucose NAD(+) |
| | semialdehyde | can replace NADP(+), but with lower |
| | dehydrogenase | affinity |
| | Aldehyde | |
| | dehydrogenase | |
| | (NAD(P)+) | |
| | 4- | With EC 4.2.1.87, brings about the |
| | hydroxyphenylacetaldehyde | metabolism of octopamine in |
| | dehydrogenase | Pseudomonas |
| | Aldehyde oxidase | Also oxidizes quinoline and pyridine |
| | | derivatives May be identical with EC |
| | | 1.1.3.22 |
| | L-amino acid oxidase | |
| | Amine oxidase (flavin- | Acts on primary amines, and usually also |
| | containing) | on secondary and tertiary amines |
| | Amine oxidase (copper- | A group of enzymes including those |
| | containing) | oxidizing primary amines, diamines and |
| | | histamine One form of EC 1.3.1.15 from |
| | | rat kidney also catalyses this reaction |
| | Aralkylamine | Phenazine methosulfate can act as |
| | dehydrogenase | acceptor Acts on aromatic amines and, |
| | | more slowly, on some long-chain |
| | | aliphatic amines, but not on methylamine |
| | | or ethylamine (cf EC 1.4.99.3) |
| | Phenol O- | Acts on a wide variety of simple alkyl-, |
| | methyltransferase | methoxy- and halo-phenols |
| | Tyramine N- | Has some activity on phenylethylamine |
| | methyltransferase | analogs |
| | Phenylethanolamine N- | Acts on various phenylethanolamines; |
| | methyltransferase | converts noradrenalin into adrenalin |
| | Catechol O- | The mammalian enzymes act more |
| | methyltransferase | rapidly on catecholamines such as |
| | | adrenaline or noradrenaline than on |
| | | catechols |
| | Glutamine N- | |
| | phenylacetyltransferase | |
| | Rosmarinate synthase | Involved with EC 1.1.1.237 in the |
| | | biosynthesis of rosmarinic acid |
| | Hydroxymandelonitrile | 3,4-dihydroxymandelonitrile can also act |
| | glucosyltransferase | as acceptor |
| | Aspartate | Also acts on L-tyrosine, L-phenylalanine |
| | aminotransferase | and L-tryptophan. This activity can be |
| | | formed from EC 2.6.1.57 by controlled |
| | | proteolysis |
| | Dihydroxyphenylalanine | |
| | aminotransferase | |
| | Tyrosine | L-phenylalanine can act instead of L- |
| | aminotransferase | tyrosine The mitochondrial enzyme may |
| | | be identical with EC 2.6.1.1 The three |
| | | isoenzymic forms are interconverted by |
| | | EC 3.4.22.4 |
| | Aromatic amino acid | L-methionine can also act as donor, more |
| | transferase | slowly Oxaloacetate can act as acceptor |
| | | Controlled proteolysis converts the |
| | | enzyme to EC 2.6.1.1 |
| | Histidinol-phosphate | |
| | aminotransferase | |
| | Fumarylacetoacetase | Also acts on other 3,5- and 2,4-dioxo |
| | | acids |
| | Acylpyruvate hydrolase | Acts on formylpyruvate, 2,4- |
| | | dioxopentanoate, 2,4-dioxohexanoate and |
| | | 2,4-dioxoheptanoate |
| | Tyrosine decarboxylase | The bacterial enzyme also acts on 3- |
| | | hydroxytyrosine and, more slowly, on 3- |
| | | hydroxyphenylalanine |
| | Aromatic-L-amino-acid | Also acts on L-tryptophan, 5-hydroxy-L- |
| | decarboxylase | tryptophan and dihydroxy-L- |
| | | phenylalanine (DOPA) |
| | Gentisate | |
| | decarboxylase | |
| | 5-oxopent-3-ene-1,2,5- | |
| | tricarboxylate | |
| | decarboxylase | |
| | Tyrosine phenol-lyase | Also slowly catalyses pyruvate formation |
| | | from D-tyrosine, S-methyl-L-cysteine, |
| | | L-cysteine, L-serine and D-serine |
| | (S)-norcoclaurine | The reaction makes a 6-membered ring |
| | synthase | by forming a bond between C-6 of the |
| | | 3,4-dihydroxyphenyl group of the |
| | | dopamine and C-1 of the aldehyde in the |
| | | imine formed between the substrates The |
| | | product is the precursor of the |
| | | benzylisoquinoline alkaloids in plants |
| | | Will also catalyse the reaction of 4-(2- |
| | | aminoethyl)benzene-1,2-diol + (3,4- |
| | | dihydroxyphenyl)acetaldehyde to form |
| | | (S)-norlaudanosoline, but this alkaloid |
| | | has not been found to occur in plants |
| | Dihydroxyphenylalanine | |
| | ammonia-lyase | |
| | Phenylalanine | May also act on L-tyrosine |
| | ammonia-lyase | |
| | Maleylacetoacetate | Also acts on maleylpyruvate |
| | isomerase | |
| | Maleylpyruvate | |
| | isomerase | |
| | Phenylpyruvate | Also acts on other arylpyruvates |
| | tautomerase | |
| | 5-carboxymethyl-2- | |
| | hydroxymuconate | |
| | delta-isomerase | |
| | Tyrosine 2,3- | |
| | aminomutase | |
| | Phenylacetate--CoA | Also acts, more slowly, on acetate, |
| | ligase | propanoate and butanoate, but not on |
| | | hydroxy derivatives of phenylacetate and |
| | | related compounds |

### VII. HOW TO MAKE DIFFERENT EMBODIMENTS OF THE INVENTION

[0489] The invention relates to (I) polynucleotides and methods of use thereof, such as

[0490] IA. Probes, Primers and Substrates;

[0491] IB. Methods of Detection and Isolation;
[0492] B.1. Hybridization;
[0493] B.2. Methods of Mapping;
[0494] B.3. Southern Blotting;
[0495] B.4. Isolating cDNA from Related Organisms;
[0496] B.5. Isolating and/or Identifying Orthologous Genes

[0497] IC. Methods of Inhibiting Gene Expression
[0498] C.1. Antisense
[0499] C.2. Ribozyme Constructs;
[0500] C.3. Chimeraplasts;
[0501] C.4 Sense Suppression;
[0502] C.5. Transcriptional Silencing
[0503] C.6. Other Methods to Inhibit Gene Expression

[0504] ID. Methods of Functional Analysis;

[0505] IE. UTRs and Junctions

[0506] IF. Coding Sequences and Their Use.

[0507] The invention also relates to (II) polypeptides and proteins and methods of use thereof, such as

[0508] IIA. Native Polypeptides and Proteins
[0509] A.1 Antibodies
[0510] A.2 In Vitro Applications

[0511] IIB. Polypeptide Variants, Fragments and Fusions
[0512] B.1 Variants
[0513] B.2 Fragments
[0514] B.3 Fusions

[0515] The invention also includes (III) methods of modulating polypeptide production, such as

[0516] IIIA. Suppression
[0517] A.1 Antisense
[0518] A.2 Ribozymes
[0519] A.3 Sense Suppression
[0520] A.4 Insertion of Sequences into the Gene to be Modulated
[0521] A.5 Promoter Modulation
[0522] A.6 Expression of Genes containing Dominant-Negative Mutations

[0523] IIIB. Enhanced Expression
[0524] B.1 Insertion of an Exogenous Gene
[0525] B.2 Promoter Modulation

[0526] The invention further concerns (IV) gene constructs and vector construction, such as

[0527] IVA. Coding Sequences

[0528] IVB. Promoters

[0529] IVC. Signal Peptides

[0530] The invention still further relates to

[0531] V. Transformation Techniques

### I. Polynucleotides

[0532] Exemplified SDFs of the invention represent fragments of the genome of corn, wheat, rice, soybean or Arabidopsis and/or represent mRNA expressed from that genome. The isolated nucleic acid of the invention also encompasses corresponding fragments of the genome and/or cDNA complement of other organisms as described in detail below.

[0533] Polynucleotides of the invention are isolated from polynucleotide libraries using primers comprising sequences similar to those described, in the attached Reference and Sequences Tables or complements thereof. See, for example, the methods described in Sambrook et al., supra.

[0534] Alternatively, the polynucleotides of the invention can be produced by chemical synthesis. Such synthesis methods are described below.

[0535] It is contemplated that the nucleotide sequences presented herein contain some small percentage of errors. These errors arise in the normal course of determination of nucleotide sequences. Sequence errors can be corrected by obtaining seeds deposited under the accession numbers cited above, propagating them, isolating genomic DNA or appropriate mRNA from the resulting plants or seeds thereof, amplifying the relevant fragment of the genomic DNA or mRNA using primers having a sequence that flanks the erroneous sequence and sequencing the amplification product.

[0536] I.A. Probes, Primers and Substrates

[0537] SDFs of the invention can be applied to substrates for use in array applications such as, but not limited to, assays of global gene expression, under varying conditions of development, and growth conditions. The arrays are also used in diagnostic or forensic methods (WO95/35505, U.S. Pat. No. 5,445,943 and U.S. Pat. No. 5,410,270).

[0538] Probes and primers of the instant invention hybridize to a polynucleotide comprising a sequence in or encoded by those in the Reference and Sequence Tables or fragments or complements thereof. Though many different nucleotide sequences can encode an amino acid sequence, the sequences of the Reference and Sequence Table are generally preferred for encoding polypeptides of the invention. However, the sequence of the probes and/or primers of the instant invention need not be identical to those in the Reference and Sequence Tables or the complements thereof. For example, some variation in probe or primer sequence and/or length allows detection of additional family members as well as orthologous genes and more taxonomically distant related sequences. Similarly, probes and/or primers of the invention include additional nucleotides that serve as a label for detecting the formed duplex or for subsequent cloning purposes.

[0539] Probe length varys depending on the application. For use as primers, probes are 12-40 nucleotides, preferably 18-30 nucleotides long. For use in mapping, probes are preferably 50 to 500 nucleotides, preferably 100-250 nucleotides long. For Southern hybridizations, probes as long as several kilobases are used as explained below.

[0540] The probes and/or primers are produced by synthetic procedures such as the triester method of Matteucci et al. J. Am. Chem. Soc. 103:3185 (1981) or according to Urdea et al. Proc. Natl. Acad. 80:7461 (1981) or using commercially available automated oligonucleotide synthesizers.

[0541] I.B. Methods of Detection and Isolation

[0542] The polynucleotides of the invention can be utilized in a number of methods known to those skilled in the art as probes and/or primers to isolate and detect polynucleotides including, without limitation: Southerns, Northerns, Branched DNA hybridization assays, polymerase chain reaction microarray assays and variations thereof. Specific methods given by way of examples, and discussed below include:

[0543] Hybridization

[0544] Methods of Mapping

[0545] Southern Blotting

[0546] Isolating cDNA from Related Organisms

[0547] Isolating and/or Identifying Orthologous Genes.

Also, the nucleic acid molecules of the invention can used in other methods, such as high density oligonucleotide hybridizing assays, described, for example, in U.S. Pat. Nos. 6,004,753; 5,945,306; 5,945,287; 5,945,308; 5,919,686; 5,919,661; 5,919,627; 5,874,248; 5,871,973; 5,871,971; 5,871,930; and PCT Pub. Nos. WO 9946380; WO 993398.1; WO 9933870; WO 9931252; WO 9915658; WO 9906572; WO 9858052; WO 9958672; and WO 9810858.

[0548] B.1. Hybridization

[0549] The isolated SDFs of the Reference and Sequence tables or fragments thereof of the present invention can be used as probes and/or primers for detection and/or isolation of related polynucleotide sequences through hybridization. Hybridization of one nucleic acid to another constitutes a physical property that defines the subject SDF of the invention and the identified related sequences. Also, such hybridization imposes structural limitations on the pair. A good general discussion of the factors for determining hybridization conditions is provided by Sambrook et al. (“Molecular Cloning, a Laboratory Manual, 2nd ed., c. 1989 by Cold Spring Harbor Laboratory Press, Cold Spring Harbor, N.Y.; see esp., chapters 11 and 12). Additional considerations and details of the physical chemistry of hybridization are provided by G. H. Keller and M. M. Manak “DNA Probes”, 2^{nd} Ed. pp. 1-25, c. 1993 by Stockton Press, New York, N.Y.

[0550] Depending on the stringency of the conditions under which these probes and/or primers are used, polynucleotides exhibiting a wide range of similarity to those in the Reference and Sequence or fragments thereof are detected or isolated. When the practitioner wishes to examine the result of membrane hybridizations under a variety of stringencies, an efficient way to do so is to perform the hybridization under a low stringency condition, then to wash the hybridization membrane under increasingly stringent conditions.

[0551] When using SDFs to identify orthologous genes in other species, the practitioner will preferably adjust the amount of target DNA of each species so that, as nearly as is practical, the same number of genome equivalents are present for each species examined. This prevents faint signals from species having large genomes, and thus small numbers of genome equivalents per mass of DNA, from erroneously being interpreted as absence of the corresponding gene in the genome.

[0552] The probes and/or primers of the instant invention can also be used to detect or isolate nucleotides that are “identical” to the probes or primers. Two nucleic acid sequences or polypeptides are said to be “identical” if the sequence of nucleotides or amino acid residues, respectively, in the two sequences is the same when aligned for maximum correspondence as described below.

[0553] Isolated polynucleotides within the scope of the invention also include allelic variants of the specific sequences presented in the Reference and Sequence tables. The probes and/or primers of the invention are also used to detect and/or isolate polynucleotides exhibiting at least 80% sequence identity with the sequences of the Reference and Sequence tables or fragments thereof.

[0554] With respect to nucleotide sequences, degeneracy of the genetic code provides the possibility to substitute at least one nucleotide of the nucleotide sequence of a gene with a different nucleotide without changing the amino acid sequence of the polypeptide. Hence, the DNA of the present invention also has any base sequence that has been changed from a sequence in the Reference and Sequence tables by substitution in accordance with degeneracy of genetic code. References describing codon usage include: Carels et al., J. Mol. Evol. 46: 45 (1998) and Fennoy et al., Nucl. Acids Res. 21(23): 5294 (1993).

[0555] B.2. Mapping

[0556] The isolated SDF DNA of the invention is used to create various types of genetic and physical maps of the genome of corn, Arabidopsis, soybean, rice, wheat, or other plants. Some SDFs are absolutely associated with particular phenotypic traits, allowing construction of gross genetic maps. While not all SDFs are immediately associated with a phenotype, all SDFs can be used as probes for identifying polymorphisms associated with phenotypes of interest. Briefly, one method of mapping involves total DNA isolation from individuals. The DNA is subsequently cleaved with one or more restriction enzymes, separated according to mass, transferred to a solid support, hybridized with SDF DNA and the pattern of fragments compared. Polymorphisms associated with a particular SDF are visualized as differences in the size of fragments produced between individual DNA samples after digestion with a particular restriction enzyme and hybridization with the SDF. After identification of polymorphic SDF sequences, linkage studies are conducted. By using the polymeric individuals as parents in crossing programs, F2 progeny recombinants or recombinant inbreds, for example, are then analyzed. The order of DNA polymorphisms along the chromosomes is determined based on the frequency with which they are inherited together versus independently. The closer the location of two polymorphisms on a chromosome, the higher the probability that they are inherited together. Integration of the relative positions of all the polymorphisms and associated marker SDFs produce a genetic map of the species where the distances between markers reflect the recombination frequencies in that chromosome segment.

[0557] The use of recombinant inbred lines for such genetic mapping is described for Arabidopsis by Alonso-Blanco et al. (Methods in Molecular Biology, vol. 82, “Arabidopsis Protocols”, pp. 137-146, J. M. Martinez-Zapater and J. Salinas, eds., c. 1998 by Humana Press, Totowa, N.J.) and for corn by Burr (“Mapping Genes with Recombinant Inbreds”, pp. 249-254. In Freeling, M. and V. Walbot (Ed.), The Maize Handbook, c. 1994 by Springer-Verlag New York, Inc.: New York, N.Y., USA; Berlin Germany; Burr et al. Genetics (1998) 118: 519; Gardiner, J. et al., (1993) Genetics 134: 917). This procedure, however, is not limited to plants and is used for other organisms (such as yeast) or for individual cells.

[0558] The SDFs of the present invention are also used for simple sequence repeat (SSR) mapping. Rice SSR mapping is described by Morgante et al. (The Plant Journal (1993) 3: 165), Panaud et al. (Genome (1995) 38: 1170); Senior et al. (Crop Science (1996) 36: 1676), Taramino et al. (Genome (1996) 39: 277) and Ahn et al. (Molecular and General Genetics (1993) 241: 483-90). SSR mapping is achieved using various methods. In one instance, polymorphisms are identified when sequence specific probes contained within an SDF flanking an SSR are made and used in polymerase chain reaction (PCR) assays with template DNA from two or more individuals of interest. Here, a change in the number of tandem repeats between the SSR-flanking sequences produces differently sized fragments (U.S. Pat. No. 5,766,847). Alternatively, polymorphisms are identified by using the PCR fragment produced from the SSR-flanking sequence specific primer reaction as a probe against Southern blots representing different individuals (U. H. Refseth et al., (1997) Electrophoresis 18: 1519).

[0559] Genetic and physical maps of crop species have many uses. For example, these maps are used to devise positional cloning strategies for isolating novel genes from the mapped crop species. In addition, because the genomes of closely related species are largely syntenic (i.e. they display the same ordering of genes within the genome), these maps are used to isolate novel alleles from relatives of crop species by positional cloning strategies.

[0560] The various types of maps discussed above are used with the SDFs of the invention to identify Quantitative Trait Loci (QTLs). Many important crop traits, such as the solids content of tomatoes, are quantitative traits and result from the combined interactions of several genes. These genes reside at different loci in the genome, often times on different chromosomes, and generally exhibit multiple alleles at each locus. The SDFs of the invention are used to identify QTLs and isolate specific alleles as described by de Vicente and Tanksley (Genetics 134:585 (1993)). In addition to isolating QTL alleles in present crop species, the SDFs of the invention are also used to isolate alleles from the corresponding QTL of wild relatives. Transgenic plants having various combinations of QTL alleles are then created and the effects of the combinations measured. Once a desired allele combination is identified, crop improvement is accomplished either through biotechnological means or by directed conventional breeding programs (for review see. Tanksley and McCouch, Science 277:1063 (1997)).

[0561] In another embodiment, the SDFs are used to help create physical maps of the genome of corn, Arabidopsis and related species. Where SDFs are ordered on a genetic map, as described above, they are used as probes to discover which clones in large libraries of plant DNA fragments in YACs, BACs, etc. contain the same SDF or similar sequences, thereby facilitating the assignment of the large DNA fragments to chromosomal positions. Subsequently, the large BACs, YACs, etc. are ordered unambiguously by more detailed studies of their sequence composition (e.g. Marra et al. (1997) Genomic Research 7:1072-1084) and by using their end or other sequences to find the identical sequences in other cloned DNA fragments. The overlapping of DNA sequences in this way allows building large contigs of plant sequences to be built that, when sufficiently extended, provide a complete physical map of a chromosome. Sometimes the SDFs themselves provide the means of joining cloned sequences into a contig. All scientific and patent publications cited in this paragraph are hereby incorporated by reference.

[0562] The patent publication WO95/35505 and U.S. Pat. Nos. 5,445,943 and 5,410,270, both hereby incorporated by reference, describe scanning multiple alleles of a plurality of loci using hybridization to arrays of oligonucleotides. These techniques are useful for each of the types of mapping discussed above.

[0563] Following the procedures described above and using a plurality of the SDFs of the present invention, any individual is genotyped. These individual genotypes are used for the identification of particular cultivars, varieties, lines, ecotypes and genetically modified plants or can serve as tools for subsequent genetic studies involving multiple phenotypic traits.

[0564] B.3 Southern Blot Hybridization

[0565] The sequences from Reference and Sequence tables or fragments thereof can be used as probes for various hybridization techniques. These techniques are useful for detecting target polynucleotides in a sample or for determining whether transgenic plants, seeds or host cells harbor a gene or sequence of interest and thus are expected to exhibit a particular trait or phenotype.

[0566] In addition, the SDFs from the invention are used to isolate additional members of gene families from the same or different species and/or orthologous genes from the same or different species. This is accomplished by hybridizing an SDF to, for example, a Southern blot containing the appropriate genomic DNA or cDNA. Given the resulting hybridization data, one of ordinary skill in the art distinguishes and isolates the correct DNA fragments by size, restriction sites, sequence and stated hybridization conditions from a gel or from a library.

[0567] Identification and isolation of orthologous genes from closely related species and alleles within a species is particularly desirable because of their potential for crop improvement. Many important crop traits, such as the solid content of tomatoes, result from the combined interactions of the products of several genes residing at different loci in the genome. Generally, alleles at each of these loci make quantitative differences to the trait. By identifying and isolating numerous alleles for each locus from within or different species, transgenic plants with various combinations of alleles are created and the effects of the combinations measured. Once a more favorable allele combination is identified, crop improvement is accomplished either through biotechnological means or by directed conventional breeding programs (Tanksley et al. Science 277:1063 (1997)). All scientific and patent publications cited in this paragraph are hereby incorporated by reference.

[0568] The results from hybridizations of the SDFs of the invention to, for example, Southern blots containing DNA from another species are also used to generate restriction fragment maps for the corresponding genomic regions. These maps provide additional information about the relative positions of restriction sites within fragments, further distinguishing mapped DNA from the remainder of the genome.

[0569] Physical maps are made by digesting genomic DNA with different combinations of restriction enzymes.

[0570] Probes for Southern blotting to distinguish individual restriction fragments can range in size from 15 to 20 nucleotides to several thousand nucleotides. More preferably, the probe is 100 to 1,000 nucleotides long for identifying members of a gene family when it is found that repetitive sequences would complicate the hybridization. For identifying an entire corresponding gene in another species, the probe is more preferably the length of the gene, typically 2,000 to 10,000 nucleotides, but probes 50-1,000 nucleotides long are also used. Some genes, however, require probes up to 1,500 nucleotides long or overlapping probes constituting the full-length sequence to span their lengths.

[0571] Also, while it is preferred that the probe be homogeneous with respect to its sequence, it is not necessary. For example, as described below, a probe representing members of a gene family having diverse sequences is generated using PCR to amplify genomic DNA or RNA templates using primers derived from SDFs that include sequences that define the gene family.

[0572] For identifying corresponding genes in another species, the next most preferable probe is a cDNA spanning the entire coding sequence, which allows all of the mRNA-coding fragment of the gene to be identified. Probes for Southern blotting are easily generated from SDFs by making primers having the sequence at the ends of the SDF and using corn or Arabidopsis genomic DNA as a template. In instances where the SDF includes sequence conserved among species, primers including the conserved sequence are used for PCR with genomic DNA from a species of interest to obtain a probe.

[0573] Similarly, if the SDF includes a domain of interest, that fragment of the SDF is used to make primers and, with appropriate template DNA, used to make a probe to identify genes containing the domain. Alternatively, the PCR products are resolved, for example by gel electrophoresis and cloned and/or sequenced. Using Southern hybridization, the variants of the domain among members of a gene family, both within and across species, are examined.

[0574] B.4.1 Isolating DNA from Related Organisms

[0575] The SDFs of the invention are used to isolate the corresponding DNA from other organisms. Either cDNA or genomic DNA is isolated. For isolating genomic DNA, a lambda, cosmid, BAC, YAC, or other large insert genomic library from the plant of interest is constructed using standard molecular biology techniques as described in detail by Sambrook et al. 1989 (Molecular Cloning: A Laboratory Manual, 2^{nd} ed. Cold Spring Harbor Laboratory Press, New York) and by Ausubel et al. 1992 (Current Protocols in Molecular Biology, Greene Publishing, New York).

[0576] To screen a phage library, for example, recombinant lambda clones are plated out on appropriate bacterial medium using an appropriate E. coli host strain. The resulting plaques are lifted from the plates using nylon or nitrocellulose filters. The plaque lifts are processed through denaturation, neutralization, and washing treatments following the standard protocols outlined by Ausubel et al. (1992). The plaque lifts are hybridized to either radioactively labeled or non-radioactively labeled SDF DNA at room temperature for about 16 hours, usually in the presence of 50% formamide and 5× SSC (sodium chloride and sodium citrate) buffer and blocking reagents. The plaque lifts are then washed at 42° C. with 1% Sodium Dodecyl Sulfate (SDS) and at a particular concentration of SSC. The SSC concentration used is dependent upon the stringency at which hybridization occurred in the initial Southern blot analysis performed. For example, if a fragment hybridized under medium stringency (e.g., Tm−20° C.), then this condition is maintained or preferably adjusted to a less stringent condition (e.g., Tm−30° C.) to wash the plaque lifts. Positive clones show detectable hybridization, e.g. by exposure to X-ray films or chromogen formation. The positive clones are then subsequently isolated for purification using the same general protocol outlined above. Once the clone is purified, restriction analysis is conducted to narrow the region corresponding to the gene of interest. The restriction analysis and succeeding subcloning steps are done using procedures described by, for example Sambrook et al. (1989) cited above.

[0577] The procedures outlined for the lambda library are essentially similar to those used for YAC library screening, except that the YAC clones are harbored in bacterial colonies. The YAC clones are plated out at reasonable density on nitrocellulose or nylon filters supported by appropriate bacterial medium in petri plates. Following the growth of the bacterial clones, the filters are processed through the denaturation, neutralization, and washing steps following the procedures of Ausubel et al. 1992. The same hybridization procedures for lambda library screening are followed.

[0578] To isolate cDNA, similar procedures using appropriately modified vectors are employed. For instance, the library is constructed in a lambda vector appropriate for cloning cDNA such as λgt11. Alternatively, the cDNA library is made in a plasmid vector. cDNA for cloning is prepared by any of the methods known in the art, but is preferably prepared as described above. Preferably, a cDNA library includes a high proportion of full-length clones.

[0579] B. 5. Isolating and/or Identifying Orthologous Genes

[0580] Probes and primers of the invention are used to identify and/or isolate polynucleotides related to those in the Reference and Sequence tables. Related polynucleotides are those that are native to other plant organisms and exhibit either similar sequence or encode polypeptides with similar biological activity. One specific example is an orthologous gene. Orthologous genes have the same functional activity. As such, orthologous genes are distinguished from homologous genes. The percentage of identity is a function of evolutionary separation and, in closely related species, the percentage of identity can be 98% to 100%. The amino acid sequence of a protein encoded by an orthologous gene can be less than 75% identical, but tends to be at least 75% or at least 80% identical, more preferably at least 90%, most preferably at least 95% identical to the amino acid sequence of the reference protein.

[0581] To find orthologous genes, the probes are hybridized to nucleic acids from a species of interest under low stringency conditions, preferably one where sequences containing as much as 40-45% mismatches are able to hybridize. This condition is established by Tₘ—40° C. to Tm —48° C. (see below). Blots are then washed under conditions of increasing stringency. It is preferable that the wash stringency be such that sequences that are 85 to 100% identical will hybridize. More preferably, sequences 90 to 100% identical hybridize and most preferably only sequences greater than 95% identical hybridize. One of ordinary skill in the art will recognize that, due to degeneracy in the genetic code, amino acid sequences that are identical can be encoded by DNA sequences as little as 67% identity or less. Thus, it is preferable, for example, to make an overlapping series of shorter probes, on the order of 24 to 45 nucleotides, and individually hybridize them to the same arrayed library to avoid the problem of degeneracy introducing large numbers of mismatches.

[0582] As evolutionary divergence increases, genome sequences also tend to diverge. Thus, one of skill will recognize that searches for orthologous genes between more divergent species require the use of lower stringency conditions compared to searches between closely related species. Also, degeneracy of the genetic code is more of a problem for searches in the genome of a species more evolutionarily distant from the species that is the source of the SDF probe sequence(s).

[0583] Therefore the method described in Bouckaert et al., U.S. Ser. No. 60/121,700 Atty. Dkt. No. 2750-117P, Client Dkt. No. 00010.001, filed Feb. 25, 1999, hereby incorporated in its entirety by reference, is applied to the SDFs of the present invention to isolate related genes from plant species which do not hybridize to the corn, Arabidopsis, soybean, rice, wheat, and other plant sequences of the Reference and Sequence tables.

[0584] The SDFs of the invention are also used as probes to search for genes that are related to the SDF within a species. Such related genes are typically considered to be members of a gene family. In such a case, the sequence similarity is often concentrated into one or a few fragments of the sequence. The fragments of similar sequence that define the gene family typically encode a fragment of a protein or RNA that has an enzymatic or structural function. The percentage of identity in the amino acid sequence of the domain that defines the gene family is preferably at least 70%, more preferably at least 80 to 95%, most preferably at least 85 to 99%. To search for members of a gene family within a species, a low stringency hybridization is usually performed, but this will depend upon the size, distribution and degree of sequence divergence of domains that define the gene family. SDFs encompassing regulatory regions are used to identify coordinately expressed genes by using the regulatory region sequence of the SDF as a probe.

[0585] In the instances where the SDFs are identified as being expressed from genes that confer a particular phenotype, then the SDFs are also used as probes to assay plants of different species for those phenotypes.

[0586] I.C. Methods to Inhibit Gene Expression

[0587] The nucleic acid molecules of the present invention are used to inhibit gene transcription and/or translation. Example of such methods include, without limitation:

[0588] Antisense Constructs;

[0589] Ribozyme Constructs;

[0590] Chimeraplast Constructs;

[0591] Co-Suppression;

[0592] Transcriptional Silencing; and

[0593] Other Methods of Gene Expression.

[0594] C.1 Antisense

[0595] In some instances it is desirable to suppress expression of an endogenous or exogenous gene. A well-known instance is the FLAVOR-SAVOR™ tomato, in which the gene encoding ACC synthase is inactivated by an antisense approach, thus delaying softening of the fruit after ripening. See for example, U.S. Pat. No. 5,859,330; U.S. Pat. No. 5,723,766; Oeller, et al, Science, 254:437-439 (1991); and Hamilton et al, Nature, 346:284-287 (1990). As another example, timing of flowering is controlled by suppression of the FLOWERING LOCUS C (FLC). High levels of this transcript are associated with late flowering, while absence of FLC is associated with early flowering (S. D. Michaels et al., Plant Cell 11:949 (1999). Other examples include the transition of apical meristem from leaf and shoot production to flowering which is regulated by TERMINAL FLOWER1, APETALA1 and LEAFY. Suppressing TFL1 expression induce a transition from shoot production to flowering (S. J. Liljegren, Plant Cell 11:1007 (1999)). In yet another example, arrested ovule development and female sterility result from suppression of the ethylene forming enzyme, but can be reversed by application of ethylene (D. De Martinis et al., Plant Cell 11:1061 (1999)). The ability to manipulate female fertility of plants is useful in increasing fruit production and creating hybrids.

[0596] Some polynucleotide SDFs in the Reference and Sequence tables represent sequences that are expressed in corn, wheat, rice, soybean Arabidopsis and/or other plants. Thus the invention includes using these sequences to generate antisense constructs to inhibit translation and/or degradation of transcripts of said SDFs, typically in a plant cell.

[0597] To accomplish this, a polynucleotide segment from the desired gene that hybridizes to the mRNA expressed from the desired gene (the “antisense segment”) is operably linked to a promoter such that the antisense strand of RNA is transcribed when the construct is present in a host cell. A regulated promoter is used in the construct to control transcription of the antisense segment so that transcription occurs only under desired circumstances.

[0598] The antisense segment introduced is typically substantially identical to at least a fragment of the endogenous gene or genes to be repressed. The sequence, however, need not be perfectly identical to inhibit expression. Further, the antisense product may hybridize to the untranslated region instead of or in addition to the coding sequence of the gene. The vectors of the present invention designed such that the inhibitory effect applies to other proteins within a family of genes exhibiting homology or substantial homology to the target gene.

[0599] For antisense suppression, the introduced antisense segment sequence also need not be full length relative to either the primary transcription product or the fully processed mRNA. Generally, a higher percentage of sequence identity is used to compensate for the use of a shorter sequence. Furthermore, the introduced sequence need not have the same intron or exon pattern, and homology of non-coding segments are equally effective. Normally, a sequence of between about 30 or 40 nucleotides and the full length of the transcript can be used, although a sequence of at least about 100 nucleotides is preferred, a sequence of at least about 200 nucleotides is more preferred, and a sequence of at least about 500 nucleotides is especially preferred.

[0600] C.2. Ribozymes

[0601] It is also contemplated that gene constructs representing ribozymes and based on the SDFs in the Reference and Sequence tables tables and fragment thereof are an object of the invention. Ribozymes are also used to inhibit expression of genes by suppressing the translation of the mRNA into a polypeptide. It is possible to design ribozymes that specifically pair with virtually any target RNA and cleave the phosphodiester backbone at a specific location, thereby functionally inactivating the target RNA. In carrying out this cleavage, the ribozyme is not itself altered, and is thus capable of recycling and cleaving other molecules, making it a true enzyme. The inclusion of ribozyme sequences within antisense RNAs confers RNA-cleaving activity upon them, thereby increasing the activity of the constructs.

[0602] A number of classes of ribozymes are known. One class of ribozymes is derived from a number of small circular RNAs, which are capable of self-cleavage and replication in plants. The RNAs replicate either alone (viroid RNAs) or with a helper virus (satellite RNAs). Examples include RNAs from avocado sunblotch viroid and the satellite RNAs from tobacco ringspot virus, lucerne transient streak virus, velvet tobacco mottle virus, solanum nodiflorum mottle virus and subterranean clover mottle virus. The design and use of target RNA-specific ribozymes is described in Haseloff et al. Nature, 334:585 (1988).

[0603] Like the antisense constructs above, the ribozyme sequence fragment necessary for pairing need not be identical to the target nucleotides to be cleaved, nor identical to the sequences in the Reference and Sequence tables or fragments thereof. Ribozymes are constructed by combining the ribozyme sequence and some fragment of the target gene which allows recognition of the target gene mRNA by the resulting ribozyme molecule. Generally, the sequence in the ribozyme capable of binding to the target sequence exhibits a percentage of sequence identity with at least 80%, preferably with at least 85%, more preferably with at least 90% and most preferably with at least 95%, even more preferably, with at least 96%, 97%, 98% or 99% sequence identity to some fragment of a sequence in the Reference and Sequence tables or the complements thereof. The ribozyme is equally effective in inhibiting mRNA translation by cleaving either in the untranslated or coding regions. Generally, a higher percentage of sequence identity is used to compensate for the use of a shorter sequence. Furthermore, the introduced sequence need not have the same intron or exon pattern, and homology of non-coding segments are equally effective.

[0604] C.3. Chimeraplasts

[0605] The SDFs of the invention, such as those described by Reference and Sequence tables are also used to construct chimeraplasts that introduced into a cell to produce at least one specific nucleotide change in a sequence corresponding to the SDF of the invention. A chimeraplast is an oligonucleotide comprising DNA and/or RNA that specifically hybridizes to a target region in a manner which creates a mismatched base-pair. This mismatched base-pair signals the cell's repair enzyme machinery which acts on the mismatched region and results in the replacement, insertion or deletion of designated nucleotide(s). The altered sequence is then expressed by the cell's normal cellular mechanisms. Chimeraplasts are designed to repair mutant genes, modify genes, introduce site-specific mutations, and/or act to interrupt or alter normal gene function (U.S. Pat. Nos. 6,010,907 and 6,004,804; and PCT Pub. No. WO99/58723 and WO99/07865).

[0606] C.4. Sense Suppression

[0607] The SDFs of the Reference and Sequence tables of the present invention are also useful to modulate gene expression by sense suppression. Sense suppression represents another method of gene suppression that introduces at least one exogenous copy or fragment of the endogenous sequence to be suppressed.

[0608] Introduction of expression cassettes in which a nucleic acid is configured in the sense orientation with respect to the promoter into the chromosome of a plant or by a self-replicating virus is an effective means by which to induce degradation of mRNAs of target genes. For an example of the use of this method to modulate expression of endogenous genes see, Napoli et al., The Plant Cell 2:279 (1990), and U.S. Pat. Nos. 5,034,323, 5,231,020, and 5,283,184. Inhibition of expression requires some transcription of the introduced sequence.

[0609] For sense suppression, the introduced sequence generally is substantially identical to the endogenous sequence intended to be inactivated. The minimal percentage of sequence identity is typically greater than about 65%, but a higher percentage of sequence identity might exert a more effective reduction in the level of normal gene products. Sequence identity of more than about 80% is preferred, though about 95% to absolute identity is most preferred. As with antisense regulation, the effect applys to any other proteins within a similar family of genes exhibiting homology or substantial homology to the suppressing sequence.

[0610] C.5. Other Methods to Inhibit Gene Expression

[0611] Yet another means of suppressing gene expression is to insert a polynucleotide into the gene of interest to disrupt transcription or translation of the gene.

[0612] Low frequency homologous recombination is used to target a polynucleotide insert to a gene by flanking the polynucleotide insert with sequences that are substantially similar to the gene to be disrupted. Sequences from the Reference and Sequence tables, fragments thereof and substantially similar sequences thereto are used for homologous recombination.

[0613] In addition, random insertion of polynucleotides into a host cell genome is used to disrupt the gene of interest (Azpiroz-Leehan et al., Trends in Genetics 13:152 (1997). In this method, screening for clones from a library containing random insertions is preferred to identifying those that have polynucleotides inserted into the gene of interest. Such screening is performed using probes and/or primers described above based on sequences from Reference and Sequence tables, fragments thereof, and substantially similar sequence thereto. The screening is also performed by selecting clones or R₁ plants having a desired phenotype.

[0614] I.D. Methods of Functional Analysis

[0615] The constructs described in the methods under I.C. above are used to determine the function of the polypeptide encoded by the gene that is targeted by the constructs.

[0616] Down-regulating the transcription and translation of the targeted gene in the host cell or organisms, such as a plant, produces phenotypic changes as compared to a wild-type cell or organism. In addition, in vitro assays are used to determine if any biological activity, such as calcium flux, DNA transcription, nucleotide incorporation, etc., are being modulated by the down-regulation of the targeted gene.

[0617] Coordinated regulation of sets of genes, e.g. those contributing to a desired polygenic trait, is sometimes necessary to obtain a desired phenotype. SDFs of the invention representing transcription activation and DNA binding domains are assembled into hybrid transcriptional activators. These hybrid transcriptional activators are used with their corresponding DNA elements (i.e. those bound by the DNA-binding SDFs) to effect coordinated expression of desired genes (J. J. Schwarz et al., Mol. Cell. Biol. 12:266 (1992), A. Martinez et al., Mol. Gen. Genet. 261:546 (1999)).

[0618] The SDFs of the invention are also used in the two-hybrid genetic systems to identify networks of protein-protein interactions (L. McAlister-Henn et al., Methods 19:330 (1999), J. C. Hu et al., Methods 20:80 (2000), M. Golovkin et al., J. Biol. Chem. 274:36428 (1999), K. Ichimura et al., Biochem. Biophys. Res. Comm. 253:532 (1998)). The SDFs of the invention also are used in various expression display methods to identify important protein-DNA interactions (e.g. B. Luo et al., J. Mol. Biol. 266:479 (1997)).

[0619] I.E. UTRs and Junctions

[0620] Polynucleotides comprising untranslated (UTR) sequences and intron/exon junctions are also within the scope of the invention. UTR sequences include introns and 5′ or 3′ untranslated regions (5′ UTRs or 3′ UTRs). Fragments of the sequences shown in the Reference and Sequence tables comprise UTRs and intron/exon junctions.

[0621] Some of these fragments of SDFs, especially UTRs, have regulatory functions related to, for example, translation rate and mRNA stability. Thus, these fragments of SDFs are isolated for use as elements of gene constructs for regulated production of polynucleotides encoding desired polypeptides.

[0622] Some introns of genomic DNA segments also have regulatory functions. Sometimes regulatory elements, especially transcription enhancer or suppressor elements, are found within introns. Also, elements related to stability of heteronuclear RNA and efficiency of splicing and of transport to the cytoplasm for translation are found in intron elements. Thus, these segments also find use as elements of expression vectors intended for use to transform plants.

[0623] Just as with promoters UTR sequences and intron/exon junctions vary from those shown in the Reference and Sequence tables. Such changes from those sequences preferably do not affect the regulatory activity of the UTRs or intron/exon junction sequences on expression, transcription, or translation unless selected to do so. However, in some instances, down- or up-regulation of such activity may be desired to modulate traits or phenotypic or in vitro activity.

[0624] I.F Coding Sequences

[0625] Isolated polynucleotides of the invention include coding sequences that encode polypeptides comprising an amino acid sequence encoded by sequences described in the Reference and Sequence tables.

[0626] A nucleotide sequence encodes a polypeptide if a cell (or a cell free in vitro system) expressing that nucleotide sequence produces a polypeptide having the recited amino acid sequence when the nucleotide sequence is transcribed and the primary transcript is subsequently processed and translated by a host cell (or a cell free in vitro system) harboring the nucleic acid. Thus, an isolated nucleic acid that encodes a particular amino acid sequence is a genomic sequence comprising exons and introns or a cDNA sequence that represents the product of splicing thereof. An isolated nucleic acid encoding an amino acid sequence also encompasses heteronuclear RNA, which contains sequences that are spliced out during expression, and mRNA, which lacks those sequences.

[0627] Coding sequences are constructed using chemical synthesis techniques or by isolating coding sequences or by modifying such synthesized or isolated coding sequences as described above.

[0628] In addition to coding sequences encoding the polypeptide sequences of the Reference and Sequence tables, which are native to corn, Arabidopsis, soybean, rice, wheat, and other plants, the isolated polynucleotides are polynucleotides that encode variants, fragments, and fusions of those native proteins. Such polypeptides are described below in part II.

[0629] In variant polynucleotides generally, the number of substitutions, deletions or insertions is preferably less than 20%, more preferably less than 15%; even more preferably less than 10%, 5%, 3% or 1% of the number of nucleotides comprising a particularly exemplified sequence. It is generally expected that non-degenerate nucleotide sequence changes that result in 1 to 10, more preferably 1 to 5 and most preferably 1 to 3 amino acid insertions, deletions or substitutions do not greatly affect the function of an encoded polypeptide. The most preferred embodiments are those wherein 1 to 20, preferably 1 to 10, most preferably 1 to 5 nucleotides are added to, or deleted from and/or substituted in the sequences specifically disclosed in the Reference and Sequence tables or fragments thereof.

[0630] Insertions or deletions in polynucleotides intended to be used for encoding a polypeptide preferably preserve the reading frame. This consideration is not so important in instances when the polynucleotide is intended to be used as a hybridization probe.

### II. Polypeptides and Proteins

[0631] IIA. Native polypeptides and proteins

[0632] Polypeptides within the scope of the invention include both native proteins as well as variants, fragments, and fusions thereof. Polypeptides of the invention are those encoded by any of the six reading frames of sequences shown in the Reference and Sequence tables, preferably encoded by the three frames reading in the 5′ to 3′ direction of the sequences as shown.

[0633] Native polypeptides include the proteins encoded by the sequences shown in the Reference and Sequence tables. Such native polypeptides include those encoded by allelic variants.

[0634] Polypeptide and protein variants will exhibit at least 75% sequence identity to those native polypeptides of the Reference and Sequence tables. More preferably, the polypeptide variants will exhibit at least 85% sequence identity; even more preferably, at least 90% sequence identity; more preferably at least 95%, 96%, 97%, 98%, or 99% sequence identity. Fragments of polypeptide or fragments of polypeptides exhibit similar percentages of sequence identity to the relevant fragments of the native polypeptide. Fusions exhibit a similar percentage of sequence identity in that fragment of the fusion represented by the variant of the native peptide.

[0635] Furthermore, polypeptide variants exhibit at least one of the functional properties of the native protein. Such properties include, without limitation, protein interaction, DNA interaction, biological activity, immunological activity, receptor binding, signal transduction, transcription activity, growth factor activity, secondary structure, three-dimensional structure, etc. As to properties related to in vitro or in vivo activities, the variants preferably exhibit at least 60% of the activity of the native protein; more preferably at least 70%, even more preferably at least 80%, 85%, 90% or 95% of at least one activity of the native protein.

[0636] One type of variant of native polypeptides comprises amino acid substitutions, deletions and/or insertions. Conservative substitutions are preferred to maintain the function or activity of the polypeptide.

[0637] Within the scope of percentage of sequence identity described above, a polypeptide of the invention may have additional individual amino acids or amino acid sequences inserted into the polypeptide in the middle thereof and/or at the N-terminal and/or C-terminal ends thereof. Likewise, some of the amino acids or amino acid sequences may be deleted from the polypeptide.

[0638] A.1 Antibodies

[0639] Isolated polypeptides are utilized to produce antibodies. Polypeptides of the invention are generally used, for example, as antigens for raising antibodies by known techniques. The resulting antibodies are useful as reagents for determining the distribution of the antigen protein within the tissues of a plant or within a cell of a plant. The antibodies are also useful for examining the production level of proteins in various tissues, for example in a wild-type plant or following genetic manipulation of a plant, by methods such as Western blotting.

[0640] Antibodies of the present invention, both polyclonal and monoclonal, are prepared by conventional methods. In general, the polypeptides of the invention are first used to immunize a suitable animal, such as a mouse, rat, rabbit, or goat. Rabbits and goats are preferred for the preparation of polyclonal sera due to the volume of serum obtainable and the availability of labeled anti-rabbit and anti-goat antibodies as detection reagents. Immunization is generally performed by mixing or emulsifying the protein in saline, preferably in an adjuvant such as Freund's complete adjuvant, and injecting the mixture or emulsion parenterally (generally subcutaneously or intramuscularly). A dose of 50-200 μg/injection is typically sufficient. Immunization is generally boosted 2-6 weeks later with one or more injections of the protein in saline, preferably using Freund's incomplete adjuvant. One may alternatively generate antibodies by in vitro immunization using methods known in the art, which for the purposes of this invention is considered equivalent to in vivo immunization.

[0641] Polyclonal antisera is obtained by bleeding the immunized animal into a glass or plastic container, incubating the blood at 25° C. for one hour, followed by incubating the blood at 4° C. for 2-18 hours. The serum is recovered by centrifugation (e.g., 1,000×g for 10 minutes). About 20-50 ml per bleed may be obtained from rabbits.

[0642] Monoclonal antibodies are prepared using the method of Kohler and Milstein, Nature 256: 495 (1975), or modification thereof. Typically, a mouse or rat is immunized as described above. However, rather than bleeding the animal to extract serum, the spleen (and optionally several large lymph nodes) is removed and dissociated into single cells. If desired, the spleen cells can be screened (after removal of nonspecifically adherent cells) by applying a cell suspension to a plate or well coated with the protein antigen. B-cells producing membrane-bound immunoglobulin specific for the antigen bind to the plate and are not rinsed away with the rest of the suspension. Resulting B-cells, or all dissociated spleen cells, are then induced to fuse with myeloma cells to form hybridomas and are cultured in a selective medium (e.g., hypoxanthine, aminopterin, thymidine medium, “HAT”). The resulting hybridomas are plated by limiting dilution, and are assayed for the production of antibodies which bind specifically to the immunizing antigen (and which do not bind to unrelated antigens). The selected Mab-secreting hybridomas are then cultured either in vitro (e.g., in tissue culture bottles or hollow fiber reactors) or in vivo (as ascites in mice).

[0643] Other methods for sustaining antibody-producing B-cell clones, such as by EBV transformation, are known.

[0644] If desired, the antibodies (whether polyclonal or monoclonal) may be labeled using conventional techniques. Suitable labels include fluorophores, chromophores, radioactive atoms (particularly ³²P and ¹²⁵1), electron-dense reagents, enzymes and ligands having specific binding partners. Enzymes are typically detected by their activity. For example, horseradish peroxidase is usually detected by its ability to convert 3,3′,5,5′-tetramethylbenzidine (TNB) to a blue pigment, quantifiable with a spectrophotometer.

[0645] A.2 In Vitro Applications of Polypeptides

[0646] Some polypeptides of the invention will have enzymatic activities that are useful in vitro. For example, the soybean trypsin inhibitor (Kunitz) family is one of the numerous families of proteinase inhibitors. It comprises plant proteins which have inhibitory activity against serine proteinases from the trypsin and subtilisin families, thiol proteinases and aspartic proteinases. Thus, these peptides find in vitro use in protein purification protocols and in therapeutic settings requiring topical application of protease inhibitors.

[0647] Delta-aminolevulinic acid dehydratase (EC 4.2.1.24) (ALAD) catalyzes the second step in the biosynthesis of heme, the condensation of two molecules of 5-aminolevulinate to form porphobilinogen and is also involved in chlorophyll biosynthesis (Kaczor et al. (1994) Plant Physiol. 1-4: 1411-7; Smith (1988) Biochem. J. 249: 423-8; Schneider (1976) Z. naturforsch. [C] 31: 55-63). Thus, ALAD proteins can be used as catalysts in synthesis of heme derivatives. Enzymes of biosynthetic pathways generally can be used as catalysts for in vitro synthesis of the compounds representing products of the pathway.

[0648] Polypeptides encoded by SDFs of the invention are engineered to provide purification reagents to identify and purify additional polypeptides that bind to them. This allows one to identify proteins that function as multimers or elucidate signal transduction or metabolic pathways. In the case of DNA binding proteins, the polypeptide are used in a similar manner to identify the DNA determinants of specific binding (S. Pierrou et al., Anal. Biochem. 229:99 (1995), S. Chusacultanachai et al., J. Biol. Chem. 274:23591 (1999), Q. Lin et al., J. Biol. Chem. 272:27274 (1997)).

[0649] II.B. Polypeptide Variants, Fragments, and Fusions

[0650] Generally, variants, fragments, or fusions of the polypeptides encoded by the maximum length sequence (MLS) can exhibit at least one of the activities of the identified domains and/or related polypeptides described in Sections (C) and (D) of The Reference tables corresponding to the MLS of interest.

[0651] II.B1 Variants

[0652] A type of variant of the native polypeptides comprises amino acid substitutions. Conservative substitutions, described above (see IL), are preferred to maintain the function or activity of the polypeptide. Such substitutions include conservation of charge, polarity, hydrophobicity, size, etc. For example, one or more amino acid residues within the sequence is substituted with another amino acid of similar polarity that acts as a functional equivalent, for example providing a hydrogen bond in an enzymatic catalysis. Substitutes for an amino acid within an exemplified sequence are preferably made among the members of the class to which the amino acid belongs. For example, the nonpolar (hydrophobic) amino acids include alanine, leucine, isoleucine, valine, proline, phenylalanine, tryptophan and methionine. The polar neutral amino acids include glycine, serine, threonine, cysteine, tyrosine, asparagine, and glutamine. The positively charged (basic) amino acids include arginine, lysine and histidine. The negatively charged (acidic) amino acids include aspartic acid and glutamic acid.

[0653] Within the scope of percentage of sequence identity described above, a polypeptide of the invention may have additional individual amino acids or amino acid sequences inserted into the polypeptide in the middle thereof and/or at the N-terminal and/or C-terminal ends thereof. Likewise, some of the amino acids or amino acid sequences may be deleted from the polypeptide. Amino acid substitutions may also be made in the sequences; conservative substitutions being preferred.

[0654] One preferred class of variants are those that comprise (1) the domain of an encoded polypeptide and/or (2) residues conserved between the encoded polypeptide and related polypeptides. For this class of variants, the encoded polypeptide sequence is changed by insertion, deletion, or substitution at positions flanking the domain and/or conserved residues.

[0655] Another class of variants includes those that comprise an encoded polypeptide sequence that is changed in the domain or conserved residues by a conservative substitution.

[0656] Yet another class of variants includes those that lack one of the in vitro activities, or structural features of the encoded polypeptides. One example is polypeptides or proteins produced from genes comprising dominant negative mutations. Such a variant may comprise an encoded polypeptide sequence with non-conservative changes in a particular domain or group of conserved residues.

[0657] II.A.2 Fragments

[0658] Fragments of particular interest are those that comprise a domain identified for a polypeptide encoded by an MLS of the instant invention and variants thereof. Also, fragments that comprise at least one region of residues conserved between an MLS encoded polypeptide and its related polypeptides are of great interest. Fragments are sometimes useful as polypeptides corresponding to genes comprising dominant negative mutations.

[0659] II.A.3 Fusions

[0660] Of interest are chimeras comprising (1) a fragment of the MLS encoded polypeptide or variants thereof of interest and (2) a fragment of a polypeptide comprising the same domain. For example, an AP2 helix encoded by a MLS of the invention fused to second AP2 helix from ANT protein, which comprises two AP2 helices. The present invention also encompasses fusions of MLS encoded polypeptides, variants, or fragments thereof fused with related proteins or fragments thereof.

### DEFINITION OF DOMAINS

[0661] The polypeptides of the invention possess identifying domains as shown in The Reference tables, which indicate specific domains within the MLS encoded polypeptides. In addition, the domains within the MLS encoded polypeptide are defined by the region that exhibits at least 70% sequence identity with the consensus sequences listed in the detailed description below of each of the domains.

[0662] The majority of the protein domain descriptions given in the protein domain table are obtained from the Prosite and the Pfam websites available on the interne.

[0663] A. Activities of Polypeptides Comprising Signal Peptides

[0664] Polypeptides comprising signal peptides are a family of proteins that are typically targeted to (1) a particular organelle or intracellular compartment, (2) interact with a particular molecule or (3) for secretion outside of a host cell. Example of polypeptides comprising signal peptides include, without limitation, secreted proteins, soluble proteins, receptors, proteins retained in the ER, etc.

[0665] These proteins comprising signal peptides are useful to modulate ligand-receptor interactions, cell-to-cell communication, signal transduction, intracellular communication, and activities and/or chemical cascades that take part in an organism outside or within of any particular cell.

[0666] One class of such proteins are soluble proteins which are transported out of the cell. These proteins act as ligands that bind to receptor to trigger signal transduction or to permit communication between cells.

[0667] Another class is receptor proteins which also comprise a retention domain that lodges the receptor protein in the membrane when the cell transports the receptor to the surface of the cell. Like the soluble ligands, receptors also modulate signal transduction and communication between cells.

[0668] In addition the signal peptide itself can serve as a ligand for some receptors. An example is the interaction of the ER targeting signal peptide with the signal recognition particle (SRP). Here, the SRP binds to the signal peptide, halting translation, and the resulting SRP complex then binds to docking proteins located on the surface of the ER, prompting transfer of the protein into the ER.

[0669] A description of signal peptide residue composition is described below in Subsection IV.C.1.

### III. Methods of Modulating Polypeptide Production

[0670] It is contemplated that polynucleotides of the invention are incorporated into a host cell or in-vitro system to modulate polypeptide production. For instance, the SDFs prepared as described herein are used to prepare expression cassettes useful in a number of techniques for suppressing or enhancing expression.

[0671] An example are polynucleotides comprising sequences to be transcribed, such as coding sequences, of the present invention are inserted into nucleic acid constructs to modulate polypeptide production. Typically, such sequences to be transcribed are heterologous to at least one element of the nucleic acid construct to generate a chimeric gene or construct.

[0672] Another example of useful polynucleotides are nucleic acid molecules comprising regulatory sequences of the present invention. Chimeric genes or constructs are generated when the regulatory sequences of the invention linked to heterologous sequences in a vector construct. Within the scope of the invention are such chimeric gene and/or constructs.

[0673] Also within the scope of the invention are nucleic acid molecules, whereof at least a part or fragment of these DNA molecules are presented in the Reference and Sequence tables of the present application, and wherein the coding sequence is under the control of its own promoter and/or its own regulatory elements. Such molecules are useful for transforming the genome of a host cell or an organism regenerated from said host cell for modulating polypeptide production.

[0674] Additionally, a vector capable of producing the oligonucleotide can be inserted into the host cell to deliver the oligonucleotide.

[0675] More detailed description of components to be included in vector constructs are described both above and below.

[0676] Whether the chimeric vectors or native nucleic acids are utilized, such polynucleotides are incorporated into a host cell to modulate polypeptide production. Native genes and/or nucleic acid molecules are effective when exogenous to the host cell.

[0677] Methods of modulating polypeptide expression includes, without limitation:

[0678] Suppression methods, such as
[0679] Antisense
[0680] Ribozymes
[0681] Co-suppression
[0682] Insertion of Sequences into the Gene to be Modulated
[0683] Regulatory Sequence Modulation.

[0684] as well as Methods for Enhancing Production, such as
[0685] Insertion of Exogenous Sequences; and
[0686] Regulatory Sequence Modulation.

[0687] III.A. Suppression

[0688] Expression cassettes of the invention are used to suppress expression of endogenous genes which comprise the SDF sequence. Inhibiting expression is useful, for instance, to tailor the ripening characteristics of a fruit (Oeller et al., Science 254:437 (1991)) or to influence seed size (WO98/07842) or to provoke cell ablation (Mariani et al., Nature 357: 384-387 (1992).

[0689] As described above, a number of methods are used to inhibit gene expression in plants, such as antisense, ribozyme, introduction of exogenous genes into a host cell, insertion of a polynucleotide sequence into the coding sequence and/or the promoter of the endogenous gene of interest and the like.

[0690] III.A.1. Antisense

[0691] An expression cassette as described above transformed into host cell or plant to produce an antisense strand of RNA. For plant cells, antisense RNA inhibits gene expression by preventing the accumulation of mRNA which encodes the enzyme of interest, see, e.g., Sheehy et al., Proc. Nat. Acad. Sci. USA, 85:8805 (1988), and Hiatt et al., U.S. Pat. No. 4,801,340.

[0692] III.A.2. Ribozymes

[0693] Similarly, ribozyme constructs are transformed into a plant to cleave mRNA and down-regulate translation.

[0694] III.A.3. Co-Suppression

[0695] Another method of suppression occurs by introducing an exogenous copy of the gene to be suppressed. Introduction of expression cassettes in which a nucleic acid is configured in the sense orientation with respect to the promoter prevents the accumulation of mRNA. A detailed description of this method is described above.

[0696] III.A.4. Insertion of Sequences into the Gene to be Modulated

[0697] Yet another means of suppressing gene expression is to insert a polynucleotide into the gene of interest to disrupt transcription or translation of the gene.

[0698] Homologous recombination could be used to target a polynucleotide insert to a gene using the Cre-Lox system (A. C. Vergunst et al., Nucleic Acids Res. 26:2729 (1998), A. C. Vergunst et al., Plant Mol. Biol. 38:393 (1998), H. Albert et al., Plant J. 7:649 (1995)).

[0699] In addition, random insertion of polynucleotides into a host cell genome are also used to disrupt the gene of interest (Azpiroz-Leehan et al., Trends in Genetics 13:152 (1997)). In this method, screening for clones from a library containing random insertions is preferred for identifying those that have polynucleotides inserted into the gene of interest. Such screening is performed using probes and/or primers described above based on sequences from the Reference and Sequence tables, fragments thereof, and substantially similar sequence thereto. The screening isalso performed by selecting clones or any transgenic plants having a desired phenotype.

[0700] III.A.5. Regulatory SequenceModulation

[0701] The SDFs described in the Reference and Sequence tables or polynucleotides encoding polypeptides of the Protein Group or Protein Group Matrix tables, and fragments thereof are examples of nucleotides of the invention that contain regulatory sequences that can be used to suppress or inactivate transcription and/or translation from a gene of interest as discussed in I. C.5.

[0702] III.A.6. Genes Comprising Dominant-Negative Mutations

[0703] When suppression of production of the endogenous, native protein is desired it is often helpful to express a gene comprising a dominant negative mutation. Genes comprising dominant negative mutations produce a variant polypeptide that is capable of competing with the native polypeptide, but which does not produce the native result. Consequently, over-expression of genes comprising these mutations titrate out an undesired activity of the native protein. For example, the product from a gene comprising a dominant negative mutation of a receptor is used to constitutively activate or suppress a signal transduction cascade, allowing examination of the phenotype and thus the trait(s) controlled by that receptor and pathway. Alternatively, the protein arising from the gene comprising a dominant-negative mutation is an inactive enzyme still capable of binding to the same substrate as the native protein and therefore competes with such native proteins.

[0704] Products from genes comprising dominant-negative mutations also act upon the native protein itself to prevent activity. For example, the native protein may be active only as a homo-multimer or as one subunit of a hetero-multimer. Incorporation of an inactive subunit into the multimer with native subunit(s) inhibits activity.

[0705] Thus, gene function is modulated in host cells of interest by insertion into these cells vector constructs comprising a gene comprising a dominant-negative mutation.

[0706] III.B. Enhanced Expression

[0707] Enhanced expression of a gene of interest in a host cell is accomplished by either (1) insertion of an exogenous gene; or (2) promoter modulation.

[0708] III.B.1. Insertion of an Exogenous Gene

[0709] Insertion of an expression construct encoding an exogenous gene boosts the number of gene copies expressed in a host cell.

[0710] Such expression constructs comprise genes that either encode the native protein that is of interest or that encode a variant that exhibits enhanced activity as compared to the native protein. Such genes encoding proteins of interest are constructed from the sequences from the Reference and Sequence tables, fragments thereof, and substantially similar sequence thereto.

[0711] Such an exogenous gene includes a constitutive promoter permitting expression in any cell in a host organism or a promoter that directs transcription only in particular cells or times during a host cell life cycle or in response to environmental stimuli.

[0712] III.B.2. Regulatory Sequence Modulation

[0713] The SDFs of the Reference and Sequence tables, and fragments thereof, contain regulatory sequences that are used to enhance expression of a gene of interest. For example, some of these sequences contain useful enhancer elements. In some cases, duplication of enhancer elements or insertion of exogenous enhancer elements increases expression of a desired gene from a particular promoter. As other examples, all 11 promoters require binding of a regulatory protein to be activated, while some promoters may need a protein that signals a promoter binding protein to expose a polymerase binding site. In either case, over-production of such proteins are used to enhance expression of a gene of interest by increasing the activation time of the promoter.

[0714] Such regulatory proteins are encoded by some of the sequences in the Reference and Sequence tables, fragments thereof, and substantially similar sequences thereto.

[0715] Coding sequences for these proteins are constructed as described above.

[0716] IV. Gene Constructs and Vector Construction

[0717] To use isolated SDFs of the present invention or a combination of them or parts and/or mutants and/or fusions of said SDFs in the above techniques, recombinant DNA vectors that comprise said SDFs and are suitable for transformation of cells, such as plant cells, are usually prepared. The SDF construct are made using standard recombinant DNA techniques (Sambrook et al. 1989) and is introduced to the species of interest by Agrobacterium mediated transformation or by other means of transformation (e.g. particle gun bombardment) as referenced below.

[0718] The vector backbone can be any of those typical in the art such as plasmids, viruses, artificial chromosomes, BACs, YACs, PACs and vectors of the sort described by

[0719] (a) BAC: Shizuya et al., Proc. Natl. Acad. Sci. USA 89: 8794-8797 (1992); Hamilton et al., Proc. Natl. Acad. Sci. USA 93: 9975-9979 (1996);

[0720] (b) YAC: Burke et al., Science 236:806-812 (1987);.

[0721] (c) PAC: Sternberg N. et al., Proc Natl Acad Sci USA. Jan; 87(l):103-7 (1990);

[0722] (d) Bacteria-Yeast Shuttle Vectors: Bradshaw et al., Nucl Acids Res 23: 4850-4856 (1995);

[0723] (e) Lambda Phage Vectors: Replacement Vector, e.g., Frischauf et al., J. Mol. Biol 170: 827-842 (1983); or Insertion vector, e.g., Huynh et al., In: Glover N M (ed) DNA Cloning: A practical Approach, Vol. 1 Oxford: IRL Press (1985);

[0724] (f) T-DNA gene fusion vectors: Walden et al., Mol Cell Biol 1: 175-194 (1990); and

[0725] (g) Plasmid vectors: Sambrook et al., infra.

[0726] Typically, a vector comprises the exogenous gene, which in its turn comprises an SDF of the present invention to be introduced into the genome of a host cell, and which gene may be an antisense construct, a ribozyme construct chimeraplast, or a coding sequence with any desired transcriptional and/or translational regulatory sequences, such as promoters, UTRs, and 3′ end termination sequences. Vectors of the invention also include origins of replication, scaffold attachment regions (SARs), markers, homologous sequences, introns, etc.

[0727] A DNA sequence coding for the desired polypeptide, for example a cDNA sequence encoding a full length protein, are preferably combined with transcriptional and translational initiation regulatory sequences which direct the transcription of the sequence from the gene in the intended tissues of the transformed plant. For example, for over-expression, a plant promoter fragment is employed that direct transcription of the gene in all tissues of a regenerated plant. Alternatively, the plant promoter directs transcription of an SDF of the invention in a specific tissue (tissue-specific promoters) or is otherwise under more precise environmental control (inducible promoters).

[0728] If proper polypeptide production is desired, a polyadenylation region at the 3′-end of the coding region is typically included. The polyadenylation region is derived from the natural gene, from a variety of other plant genes, or from T-DNA.

[0729] The vector comprising the sequences from genes or SDF or the invention comprises a marker gene that confers a selectable phenotype on plant cells. The vector includes promoter and coding sequence, for instance. For example, the marker may encode biocide resistance, particularly antibiotic resistance, such as resistance to kanamycin, G418, bleomycin, hygromycin, or herbicide resistance, (e.g. resistance to chlorosulfuron or phosphinotricin).

[0730] IV.A. Coding Sequences

[0731] Generally, the sequence in the transformation vector and to be introduced into the genome of the host cell does not need to be absolutely identical to an SDF of the present invention. Also, it is not necessary for it to be full length, relative to either the primary transcription product or fully processed mRNA. Furthermore, the introduced sequence need not have the same intron or exon pattern as a native gene. Also, heterologous non-coding segments can be incorporated into the coding sequence without changing the desired amino acid sequence of the polypeptide to be produced.

[0732] IV.B. Promoters

[0733] As explained above, introducing an exogenous SDF from the same species or an orthologous SDF from another species is useful to modulate the expression of a native gene corresponding to that SDF of interest. Such an SDF construct is under the control of either a constitutive promoter or a highly regulated inducible promoter (e.g., a copper inducible promoter). The promoter of interest is initially either endogenous or heterologous to the species in question. When re-introduced into the genome of said species, such promoter becomes exogenous to said species. Over-expression of an SDF transgene leads to co-suppression of the homologous endogeneous sequence thereby creating some alterations in the phenotypes of the transformed species as demonstrated by similar analysis of the chalcone synthase gene (Napoli et al., Plant Cell 2:279 (1990) and van der Krol et al., Plant Cell 2:291 (1990)). If an SDF is found to encode a protein with desirable characteristics, its over-production is controlled so that its accumulation is manipulated in an organ- or tissue-specific manner utilizing a promoter having such specificity.

[0734] Likewise, if the promoter of an SDF (or an SDF that includes a promoter) is found to be tissue-specific or developmentally regulated, such a promoter is utilized to drive or facilitate the transcription of a specific gene of interest (e.g., seed storage protein or root-specific protein). Thus, the level of accumulation of a particular protein is manipulated or its spatial localization in an organ- or tissue-specific manner is altered.

### IV. C Signal Peptides

[0735] SDFs of the present invention containing signal peptides are indicated in the Reference and Sequence tables. In some cases it may be desirable for the protein encoded by an introduced exogenous or orthologous SDF to be targeted (1) to a particular organelle intracellular compartment, (2) to interact with a particular molecule such as a membrane molecule or (3) for secretion outside of the cell harboring the introduced SDF. This is accomplished using a signal peptide.

[0736] Signal peptides direct protein targeting, are involved in ligand-receptor interactions and act in cell to cell communication. Many proteins, especially soluble proteins, contain a signal peptide that targets the protein to one of several different intracellular compartments. In plants, these compartments include, but are not limited to, the endoplasmic reticulum (ER), mitochondria, plastids (such as chloroplasts), the vacuole, the Golgi apparatus, protein storage vessicles (PSV) and, in general, membranes. Some signal peptide sequences are conserved, such as the Asn-Pro-Ile-Arg amino acid motif found in the N-terminal propeptide signal that targets proteins to the vacuole (Marty (1999) The Plant Cell 11: 587-599). Other signal peptides do not have a consensus sequence per se, but are largely composed of hydrophobic amino acids, such as those signal peptides targeting proteins to the ER (Vitale and Denecke (1999) The Plant Cell 11: 615-628). Still others do not appear to contain either a consensus sequence or an identified common secondary sequence, for instance the chloroplast stromal targeting signal peptides (Keegstra and Cline (1999) The Plant Cell 11: 557-570). Furthermore, some targeting peptides are bipartite, directing proteins first to an organelle and then to a membrane within the organelle (e.g. within the thylakoid lumen of the chloroplast; see Keegstra and Cline (1999) The Plant Cell 11: 557-570). In addition to the diversity in sequence and secondary structure, placement of the signal peptide is also varied. Proteins destined for the vacuole, for example, have targeting signal peptides found at the N-terminus, at the C-terminus and at a surface location in mature, folded proteins. Signal peptides also serve as ligands for some receptors.

[0737] These characteristics of signal proteins are used to more tightly control the phenotypic expression of introduced SDFs. In particular, associating the appropriate signal sequence with a specific SDF allows sequestering of the protein in specific organdies (plastids, as an example), secretion outside of the cell, targeting interaction with particular receptors, etc. Hence, the inclusion of signal proteins in constructs involving the SDFs of the invention increases the range of manipulation of SDF phenotypic expression. The nucleotide sequence of the signal peptide is isolated from characterized genes using common molecular biological techniques or is synthesized in vitro.

[0738] In addition, the native signal peptide sequences, both amino acid and nucleotide, described in the Reference and Sequence tables is used to modulate polypeptide transport. Further variants of the native signal peptides described in the Reference and Sequence tables are contemplated. Insertions, deletions, or substitutions can be made. Such variants retain at least one of the functions of the native signal peptide as well as exhibiting some degree of sequence identity to the native sequence.

[0739] Also, fragments of the signal peptides of the invention are useful and are fused with other signal peptides of interest to modulate transport of a polypeptide.

### V. Transformation Techniques

[0740] A wide range of techniques for inserting exogenous polynucleotides are known for a number of host cells, including, without limitation, bacterial, yeast, mammalian, insect and plant cells. Techniques for transforming a wide variety of higher plant species are well known and described in the technical and scientific literature. See, e.g. Weising et al., Ann. Rev. Genet. 22:421 (1988); and Christou, Euphytica, v. 85, n.1-3:13-27, (1995).

[0741] DNA constructs of the invention are introduced into the genome of the desired plant host by a variety of conventional techniques. For example, the DNA construct is introduced directly into the genomic DNA of the plant cell using techniques such as electroporation and microinjection of plant cell protoplasts, or the DNA constructs are introduced directly to plant tissue using ballistic methods, such as DNA particle bombardment. Alternatively, the DNA constructs are combined with suitable T-DNA flanking regions and introduced into a conventional Agrobacterium tumefaciens host vector. The virulence functions of the Agrobacterium tumefaciens host will direct the insertion of the construct and adjacent marker into the plant cell DNA when the cell is infected by the bacteria (McCormac et al., Mol. Biotechnol. 8:199 (1997); Hamilton, Gene 200:107 (1997); Salomon et al. EMBO J. 3:141 (1984); Herrera-Estrella et al. EMBO J. 2:987 (1983)).

[0742] Microinjection techniques are known in the art and are described in the scientific and patent literature. The introduction of DNA constructs using polyethylene glycol precipitation is described in Paszkowski et al. EMBO J. 3:2717 (1984). Electroporation techniques are described in Fromm et al. Proc. Natl. Acad. Sci. USA 82:5824 (1985). Ballistic transformation techniques are described in Klein et al. Nature 327:773 (1987). Agrobacterium tumefaciens-mediated transformation techniques, including disarming and use of binary or co-integrate vectors, are well described in the scientific literature. See, for example Hamilton, C M, Gene 200:107 (1997); Müller et al. Mol. Gen. Genet. 207:171 (1987); Komari et al. Plant J. 10:165 (1996); Venkateswarlu et al. Biotechnology 9:1103 (1991) and Gleave, A P., Plant Mol. Biol. 20:1203 (1992); Graves and Goldman, Plant Mol. Biol. 7:34 (1986) and Gould et al., Plant Physiology 95:426 (1991).

[0743] Transformed plant cells which are derived by any of the above transformation techniques are cultured to regenerate a whole plant that possesses the transformed genotype and thus the desired phenotype, for example needlessness. Such regeneration techniques rely on manipulation of certain phytohormones in a tissue culture growth medium, typically relying on a biocide and/or herbicide marker which has been introduced together with the desired nucleotide sequences. Plant regeneration from cultured protoplasts is described in Evans et al., Protoplasts Isolation and Culture in “Handbook of Plant Cell Culture,” pp. 124-176, MacMillan Publishing Company, New York, 1983; and Binding, Regeneration of Plants, Plant Protoplasts, pp. 21-73, CRC Press, Boca Raton, 1988. Regeneration is also obtained from plant callus, explants, organs, or parts thereof. Such regeneration techniques are described generally in Klee et al. Ann. Rev. of Plant Phys. 38:467 (1987). Regeneration of monocots (rice) is described by Hosoyama et al. (Biosci. Biotechnol. Biochem. 58:1500 (1994)) and by Ghosh et al. (J. Biotechnol. 32:1 (1994)). The nucleic acids of the invention are used to confer desired traits on essentially any plant.

[0744] Thus, the invention has use over a broad range of plants, including species from the genera Anacardium, Arachis, Asparagus, Atropa, Avena, Brassica, Citrus, Citrullus, Capsicum, Carthamus, Cocos, Coffea, Cucumis, Cucurbita, Daucus, Elaeis, Fragaria, Glycine, Gossypium, Helianthus, Heterocallis, Hordeum, Hyoscyamus, Lactuca, Linum, Lolium, Lupinus, Lycopersicon, Malus, Manihot, Majorana, Medicago, Nicotiana, Olea, Oryza, Panieum, Pannesetum, Persea, Phaseolus, Pistachia, Pisum, Pyrus, Prunus, Raphanus, Ricinus, Secale, Senecio, Sinapis, Solanum, Sorghum, Theobromus, Trigonella, Triticum, Vicia, Vitis, Vigna, and, Zea.

[0745] One of skill recognizes that after the expression cassette is stably incorporated in transgenic plants and confirmed to be operable, it can be introduced into other plants by sexual crossing. Any of a number of standard breeding techniques are used, depending upon the species to be crossed.

[0746] The particular sequences of SDFs identified are provided in the attached Reference and Sequence tables.

### VIII. DEFINITIONS

[0747] The following terms are utilized throughout this application:

Allelic variant: An “allelic variant” is an alternative form of the same SDF, which resides at the same chromosomal locus in the organism. Allelic variations can occur in any portion of the gene sequence, including regulatory regions. Allelic variants can arise by normal genetic variation in a population. Allelic variants can also be produced by genetic engineering methods. An allelic variant can be one that is found in a naturally occurring plant, including a cultivar or ecotype. An allelic variant may or may not give rise to a phenotypic change, and may or may not be expressed. An allele can result in a detectable change in the phenotype of the trait represented by the locus. A phenotypically silent allele can give rise to a product.
Alternatively spliced messages: Within the context of the current invention, “alternatively spliced messages” refers to mature mRNAs originating from a single gene with variations in the number and/or identity of exons, introns and/or intron-exon junctions.
Chimeric: The term “chimeric” is used to describe genes, as defined supra, or contructs wherein at least two of the elements of the gene or construct, such as the promoter and the coding sequence and/or other regulatory sequences and/or filler sequences and/or complements thereof, are heterologous to each other.
Constitutive Promoter: Promoters referred to herein as “constitutive promoters” actively promote transcription under most, but not necessarily all, environmental conditions and states of development or cell differentiation. Examples of constitutive promoters include the cauliflower mosaic virus (CaMV) 35S transcript initiation region and the 1′ or 2′ promoter derived from T-DNA of Agrobacterium tumefaciens, and other transcription initiation regions from various plant genes, such as the maize ubiquitin-1 promoter, known to those of skill.
Coordinately Expressed: The term “coordinately expressed,” as used in the current invention, refers to genes that are expressed at the same or a similar time and/or stage and/or under the same or similar environmental conditions.
Domain: Domains are fingerprints or signatures that can be used to characterize protein families and/or parts of proteins. Such fingerprints or signatures can comprise conserved (1) primary sequence, (2) secondary structure, and/or (3) three-dimensional conformation. Generally, each domain has been associated with either a family of proteins or motifs. Typically, these families and/or motifs have been correlated with specific in-vitro and/or in-vivo activities. A domain can be any length, including the entirety of the sequence of a protein. Detailed descriptions of the domains, associated families and motifs, and correlated activities of the polypeptides of the instant invention are described below. Usually, the polypeptides with designated domain(s) can exhibit at least one activity that is exhibited by any polypeptide that comprises the same domain(s).
Endogenous: The term “endogenous,” within the context of the current invention refers to any polynucleotide, polypeptide or protein sequence which is a natural part of a cell or organisms regenerated from said cell.
Exogenous: “Exogenous,” as referred to within, is any polynucleotide, polypeptide or protein sequence, whether chimeric or not, that is initially or subsequently introduced into the genome of an individual host cell or the organism regenerated from said host cell by any means other than by a sexual cross. Examples of means by which this can be accomplished are described below, and include Agrobacterium-mediated transformation (of dicots—e.g. Salomon et al. EMBO J. 3:141 (1984); Herrera-Estrella et al. EMBO J. 2:987 (1983); of monocots, representative papers are those by Escudero et al., Plant J. 10:355 (1996), Ishida et al., Nature Biotechnology 14:745 (1996), May et al., Bio/Technology 13:486 (1995)), biolistic methods (Armaleo et al., Current Genetics 17:97 1990)), electroporation, in planta techniques, and the like. Such a plant containing the exogenous nucleic acid is referred to here as a T₀ for the primary transgenic plant and T₁ for the first generation. The term “exogenous” as used herein is also intended to encompass inserting a naturally found element into a non-naturally found location.
Filler sequence: As used herein, “filler sequence” refers to any nucleotide sequence that is inserted into DNA construct to evoke a particular spacing between particular components such as a promoter and a coding region and may provide an additional attribute such as a restriction enzyme site.
Gene: The term “gene,” as used in the context of the current invention, encompasses all regulatory and coding sequence contiguously associated with a single hereditary unit with a genetic function (see SCHEMATIC 1). Genes can include non-coding sequences that modulate the genetic function that include, but are not limited to, those that specify polyadenylation, transcriptional regulation, DNA conformation, chromatin conformation, extent and position of base methylation and binding sites of proteins that control all of these. Genes comprised of “exons” (coding sequences), which may be interrupted by “introns” (non-coding sequences), encode proteins. A gene's genetic function may require only RNA expression or protein production, or may only require binding of proteins and/or nucleic acids without associated expression. In certain cases, genes adjacent to one another may share sequence in such a way that one gene will overlap the other. A gene can be found within the genome of an organism, artificial chromosome, plasmid, vector, etc., or as a separate isolated entity.
Gene Family: “Gene family” is used in the current invention to describe a group of functionally related genes, each of which encodes a separate protein.

[0748] Heterologous sequences: “Heterologous sequences” are those that are not operatively linked or are not contiguous to each other in nature. For example, a promoter from corn is considered heterologous to an Arabidopsis coding region sequence. Also, a promoter from a gene encoding a growth factor from corn is considered heterologous to a sequence encoding the corn receptor for the growth factor. Regulatory element sequences, such as UTRs or 3′ end termination sequences that do not originate in nature from the same gene as the coding sequence originates from, are considered heterologous to said coding sequence. Elements operatively linked in nature and -contiguous to each other are not heterologous to each other. On the other hand, these same elements remain operatively linked but become heterologous if other filler sequence is placed between them. Thus, the promoter and coding sequences of a corn gene expressing an amino acid transporter are not heterologous to each other, but the promoter and coding sequence of a corn gene operatively linked in a novel manner are heterologous.

Homologous gene: In the current invention, “homologous gene” refers to a gene that shares sequence similarity with the gene of interest. This similarity may be in only a fragment of the sequence and often represents a functional domain such as, examples including without limitation a DNA binding domain, a domain with tyrosine kinase activity, or the like. The functional activities of homologous genes are not necessarily the same.
Inducible Promoter: An “inducible promoter” in the context of the current invention refers to a promoter which is regulated under certain conditions, such as light, chemical concentration, protein concentration, conditions in an organism, cell, or organelle, etc. A typical example of an inducible promoter, which can be utilized with the polynucleotides of the present invention, is PARSK1, the promoter from the Arabidopsis gene encoding a serine-threonine kinase enzyme, and which promoter is induced by dehydration, abscissic acid and sodium chloride (Wang and Goodman, Plant J. 8:37 (1995)) Examples of environmental conditions that may affect transcription by inducible promoters include anaerobic conditions, elevated temperature, or the presence of light.
Intergenic region: “Intergenic region,” as used in the current invention, refers to nucleotide sequence occurring in the genome that separates adjacent genes.
Mutant gene: In the current invention, “mutant” refers to a heritable change in DNA sequence at a specific location. Mutants of the current invention may or may not have an associated identifiable function when the mutant gene is transcribed.
Orthologous Gene: In the current invention “orthologous gene” refers to a second gene that encodes a gene product that performs a similar function as the product of a first gene. The orthologous gene may also have a degree of sequence similarity to the first gene. The orthologous gene may encode a polypeptide that exhibits a degree of sequence similarity to a polypeptide corresponding to a first gene. The sequence similarity can be found within a functional domain or along the entire length of the coding sequence of the genes and/or their corresponding polypeptides.
Percentage of sequence identity: “Percentage of sequence identity,” as used herein, is determined by comparing two optimally aligned sequences over a comparison window, where the fragment of the polynucleotide or amino acid sequence in the comparison window may comprise additions or deletions (e.g., gaps or overhangs) as compared to the reference sequence (which does not comprise additions or deletions) for optimal alignment of the two sequences. The percentage is calculated by determining the number of positions at which the identical nucleic acid base or amino acid residue occurs in both sequences to yield the number of matched positions, dividing the number of matched positions by the total number of positions in the window of comparison and multiplying the result by 100 to yield the percentage of sequence identity. Optimal alignment of sequences for comparison may be conducted by the local homology algorithm of Smith and Waterman Add. APL. Math. 2:482 (1981), by the homology alignment algorithm of Needleman and Wunsch J. Mol. Biol. 48:443 (1970), by the search for similarity method of Pearson and Lipman Proc. Natl. Acad. Sci. (USA) 85: 2444 (1988), by computerized implementations of these algorithms (GAP, BESTFIT, BLAST, PASTA, and TFASTA in the Wisconsin Genetics Software Package, Genetics Computer Group (GCG), 575 Science Dr., Madison, Wis.), or by inspection. Given that two sequences have been identified for comparison, GAP and BESTFIT are preferably employed to determine their optimal alignment. Typically, the default values of 5.00 for gap weight and 0.30 for gap weight length are used. The term “substantial sequence identity” between polynucleotide or polypeptide sequences refers to polynucleotide or polypeptide comprising a sequence that has at least 80% sequence identity, preferably at least 85%, more preferably at least 90% and most preferably at least 95%, even more preferably, at least 96%, 97%, 98% or 99% sequence identity compared to a reference sequence using the programs.
Plant Promoter: A “plant promoter” is a promoter capable of initiating transcription in plant cells and can drive or facilitate transcription of a fragment of the SDF of the instant invention or a coding sequence of the SDF of the instant invention. Such promoters need not be of plant origin. For example, promoters derived from plant viruses, such as the CaMV35S promoter or from Agrobacterium tumefaciens such as the T-DNA promoters, can be plant promoters. A typical example of a plant promoter of plant origin is the maize ubiquitin-1 (ubi-1) promoter known to those of skill.
Promoter: The term “promoter,” as used herein, refers to a region of sequence determinants located upstream from the start of transcription of a gene and which are involved in recognition and binding of RNA polymerase and other proteins to initiate and modulate transcription. A basal promoter is the minimal sequence necessary for assembly of a transcription complex required for transcription initiation. Basal promoters frequently include a “TATA box” element usually located between 15 and 35 nucleotides upstream from the site of initiation of transcription. Basal promoters also sometimes include a “CCAAT box” element (typically a sequence CCAAT) and/or a GGGCG sequence, usually located between 40 and 200 nucleotides, preferably 60 to 120 nucleotides, upstream from the start site of transcription.
Public sequence: The term “public sequence,” as used in the context of the instant application, refers to any sequence that has been deposited in a publicly accessible database. This term encompasses both amino acid and nucleotide sequences. Such sequences are publicly accessible, for example, on the BLAST databases on the NCBI FTP web site (accessible via the internet). The database at the NCBI GTP site utilizes “gi” numbers assigned by NCBI as a unique identifier for each sequence in the databases, thereby providing a non-redundant database for sequence from various databases, including GenBank, EMBL, DBBJ, (DNA Database of Japan) and PDB (Brookhaven Protein Data Bank).
Regulatory Sequence: The term “regulatory sequence,” as used in the current invention, refers to any nucleotide sequence that influences transcription or translation initiation and rate, and stability and/or mobility of the transcript or polypeptide product. Regulatory sequences include, but are not limited to, promoters, promoter control elements, protein binding sequences, 5′ and 3′ UTRs, transcriptional start site, termination sequence, polyadenylation sequence, introns, certain sequences within a coding sequence, etc.
Related Sequences: “Related sequences” refer to either a polypeptide or a nucleotide sequence that exhibits some degree of sequence similarity with a sequence described by The Reference tables and The Sequence tables.
Scaffold Attachment Region (SAR): As used herein, “scaffold attachment region” is a DNA sequence that anchors chromatin to the nuclear matrix or scaffold to generate loop domains that can have either a transcriptionally active or inactive structure (Spiker and Thompson (1996) Plant Physiol. 110: 15-21).
Sequence-determined DNA fragments (SDFs): “Sequence-determined DNA fragments” as used in the current invention are isolated sequences of genes, fragments of genes, intergenic regions or contiguous DNA from plant genomic DNA or cDNA or RNA the sequence of which has been determined.
Signal Peptide: A “signal peptide” as used in the current invention is an amino acid sequence that targets the protein for secretion, for transport to an intracellular compartment or organelle or for incorporation into a membrane. Signal peptides are indicated in the tables and a more detailed description located below.
Specific Promoter: In the context of the current invention, “specific promoters” refers to a subset of inducible promoters that have a high preference for being induced in a specific tissue or cell and/or at a specific time during development of an organism. By “high preference” is meant at least 3-fold, preferably at least 5-fold, more preferably at least 10-fold still more preferably at least 20-fold, 50-fold or 100-fold increase in transcription in the desired tissue over the transcription in any other tissue. Typical examples of temporal and/or tissue specific promoters of plant origin that can be used with the polynucleotides of the present invention, are: PTA29, a promoter which is capable of driving gene transcription specifically in tapetum and only during anther development (Koltonow et al., Plant Cell 2:1201 (1990); RCc2 and RCc3, promoters that direct root-specific gene transcription in rice (Xu et al., Plant Mol. Biol. 27:237 (1995); TobRB27, a root-specific promoter from tobacco (Yamamoto et al., Plant Cell 3:371 (1991)). Examples of tissue-specific promoters under developmental control include promoters that initiate transcription only in certain tissues or organs, such as root, ovule, fruit, seeds, or flowers. Other suitable promoters include those from genes encoding storage proteins or the lipid body membrane protein, oleosin. A few root-specific promoters are noted above.
Stringency: “Stringency” as used herein is a function of probe length, probe composition (G+C content), and salt concentration, organic solvent concentration, and temperature of hybridization or wash conditions. Stringency is typically compared by the parameter Tₘ, which is the temperature at which 50% of the complementary molecules in the hybridization are hybridized, in terms of a temperature differential from Tₘ. High stringency conditions are those providing a condition of Tₘ−5° C. to Tₘ−10° C. Medium or moderate stringency conditions are those providing Tₘ−20° C. to Tₘ−29° C. Low stringency conditions are those providing a condition of Tₘ−40° C. to Tₘ−48° C. The relationship of hybridization conditions to Tₘ(in ° C.) is expressed in the mathematical equation

Tₘ=81.5−16.6(log₁₀[Na⁺])+0.41(% G+C)−(600/N) (1)

where N is the length of the probe. This equation works well for probes 14 to 70 nucleotides in length that are identical to the target sequence. The equation below for Tₘ of DNA-DNA hybrids is useful for probes in the range of 50 to greater than 500 nucleotides, and for conditions that include an organic solvent (formamide).

Tₘ=81.5+16.6 log {[Na⁺]/(1+0.7[Na⁺])}+0.41(% G+C)−500/L 0.63(% formamide) (2)

where L is the length of the probe in the hybrid. (P. Tijessen, “Hybridization with Nucleic Acid Probes” in Laboratory Techniques in Biochemistry and Molecular Biology, P. C. vand der Vliet, ed., c. 1993 by Elsevier, Amsterdam.) The Tₘ of equation (2) is affected by the nature of the hybrid; for DNA-RNA hybrids Tₘ is 10-15° C. higher than calculated, for RNA-RNA hybrids Tₘ is 20-25° C. higher. Because the Tₘ decreases about 1° C. for each 1% decrease in homology when a long probe is used (Bonner et al., J. Mol. Biol. 81:123 (1973)), stringency conditions can be adjusted to favor detection of identical genes or related family members.

[0749] Equation (2) is derived assuming equilibrium and therefore, hybridizations according to the present invention are most preferably performed under conditions of probe excess and for sufficient time to achieve equilibrium. The time required to reach equilibrium can be shortened by inclusion of a hybridization accelerator such as dextran sulfate or another high volume polymer in the hybridization buffer.

[0750] Stringency can be controlled during the hybridization reaction or after hybridization has occurred by altering the salt and temperature conditions of the wash solutions used. The formulas shown above are equally valid when used to compute the stringency of a wash solution. Preferred wash solution stringencies lie within the ranges stated above; high stringency is 5-8° C. below Tₘ, medium or moderate stringency is 26-29° C. below Tₘ and low stringency is 45-48° C. below Tₘ.

Substantially free of: A composition containing A is “substantially free of” B when at least 85% by weight of the total A+B in the composition is A. Preferably, A comprises at least about 90% by weight of the total of A+B in the composition, more preferably at least about 95% or even 99% by weight. For example, a plant gene or DNA sequence can be considered substantially free of other plant genes or DNA sequences.
Translational start site: In the context of the current invention, a “translational start site” is usually an ATG in the cDNA transcript, more usually the first ATG. A single cDNA, however, may have multiple translational start sites.
Transcription start site: “Transcription start site” is used in the current invention to describe the point at which transcription is initiated. This point is typically located about 25 nucleotides downstream from a TFIID binding site, such as a TATA box. Transcription can initiate at one or more sites within the gene, and a single gene may have multiple transcriptional start sites, some of which may be specific for transcription in a particular cell-type or tissue.
Untranslated region (UTR): A “UTR” is any contiguous series of nucleotide bases that is transcribed, but is not translated. These untranslated regions may be associated with particular functions such as increasing mRNA message stability. Examples of UTRs include, but are not limited to polyadenylation signals, terminations sequences, sequences located between the transcriptional start site and the first exon (5′ UTR) and sequences located between the last exon and the end of the mRNA (3′ UTR).
Variant: The term “variant” is used herein to denote a polypeptide or protein or polynucleotide molecule that differs from others of its kind in some way. For example, polypeptide and protein variants can consist of changes in amino acid sequence and/or charge and/or post-translational modifications (such as glycosylation, etc).

### IX. EXAMPLES

[0751] The invention is illustrated by way of the following examples. The invention is not limited by these examples as the scope of the invention is defined solely by the claims following.

### Example 1

### cDNA Preparation

[0752] A number of the nucleotide sequences disclosed in the Reference and Sequence tables herein as representative of the SDFs of the invention are obtained by sequencing genomic DNA (gDNA) and/or cDNA from corn plants grown from HYBRID SEED #35A19, purchased from Pioneer Hi-Bred International, Inc., Supply Management, P.O. Box 256, Johnston, Iowa 50131-0256.

[0753] A number of the nucleotide sequences disclosed in the Reference and Sequence tables herein as representative of the SDFs of the invention are also obtained by sequencing genomic DNA from Arabidopsis thaliana, Wassilewskija ecotype or by sequencing cDNA obtained from mRNA from such plants as described below. A.thaliana Wassilewskija is a true breeding strain. Seeds of the plant are available from the Arabidopsis Biological Resource Center at the Ohio State University, under the accession number CS2360. Seeds of this plant were deposited under the terms and conditions of the Budapest Treaty at the American Type Culture Collection, Manassas, Va. on Aug. 31, 1999, and were assigned ATCC No. PTA-595.

[0754] Other methods for cloning full-length cDNA are described, for example, by Seki et al., Plant Journal 15:707-720 (1998) “High-efficiency cloning of Arabidopsis full-length cDNA by biotinylated Cap trapper”; Maruyama et al., Gene 138:171 (1994) “Oligo-capping a simple method to replace the cap structure of eukaryotic mRNAs with oligoribonucleotides”; and WO 96/34981.

[0755] Tissues are, or each organ is, individually pulverized and frozen in liquid nitrogen. Next, the samples are homogenized in the presence of detergents and then centrifuged. The debris and nuclei are removed from the sample and more detergents were added to the sample. The sample is centrifuged and the debris is removed. Then the sample is applied to a 2M sucrose cushion to isolate polysomes. The RNA is isolated by treatment with detergents and proteinase K followed by ethanol precipitation and centrifugation. The polysomal RNA from the different tissues are pooled according to the following mass ratios: 15/15/1 for male inflorescences, female inflorescences and root, respectively. The pooled material is then used for cDNA synthesis by the methods described below.

[0756] Starting material for cDNA synthesis for the exemplary corn cDNA clones with sequences presented in the Reference and Sequence tables is poly(A)-containing polysomal mRNAs from inflorescences and root tissues of corn plants grown from HYBRID SEED #35A19. Male inflorescences and female (pre- and post-fertilization) inflorescences are isolated at various stages of development. Selection for poly(A) containing polysomal RNA is done using oligo d(T) cellulose columns, as described by Cox and Goldberg, “Plant Molecular Biology: A Practical Approach”, pp. 1-35, Shaw ed., c. 1988 by IRL, Oxford. The quality and the integrity of the polyA+ RNAs are evaluated.

[0757] Starting material for cDNA synthesis for the exemplary Arabidopsis cDNA clones with sequences presented in the Reference and Sequence tables is polysomal RNA isolated from the top-most inflorescence tissues of Arabidopsis thaliana Wassilewskija (Ws.) and from roots of Arabidopsis thaliana Landsberg erecta (L. er.), also obtained from the Arabidopsis Biological Resource Center. Nine parts inflorescence to every part root is used, as measured by wet mass. Tissue is pulverized and exposed to liquid nitrogen. Next, the sample is homogenized in the presence of detergents and then centrifuged. The debris and nuclei are removed from the sample and more detergents are added to the sample. The sample is centrifuged and the debris removed and the sample applied to a 2M sucrose cushion to isolate polysomal RNA. Cox et al., “Plant Molecular Biology: A Practical Approach”, pp. 1-35, Shaw ed., c. 1988 by IRL, Oxford. The polysomal RNA is used for cDNA synthesis by the methods described below. Polysomal mRNA is then isolated as described above for corn cDNA. The quality of the RNA is assessed electrophoretically.

[0758] Following preparation of the mRNAs from various tissues as described above, selection of mRNA with intact 5′ ends and specific attachment of an oligonucleotide tag to the 5′ end of such mRNA is performed using either a chemical or enzymatic approach. Both techniques take advantage of the presence of the “cap” structure, which characterizes the 5′ end of most intact mRNAs and which comprises a guanosine generally methylated once, at the 7 position.

[0759] The chemical modification approach involves the optional elimination of the 2′,3′-cis diol of the 3′ terminal ribose, the oxidation of the 2′,3′-cis diol of the ribose linked to the cap of the 5′ends of the mRNAs into a dialdehyde, and the coupling of the such obtained dialdehyde to a derivatized oligonucleotide tag. Further detail regarding the chemical approaches for obtaining mRNAs having intact 5′ ends is disclosed in International Application No. WO96/34981 published Nov. 7, 1996.

[0760] The enzymatic approach for ligating the oligonucleotide tag to the intact 5′ ends of mRNAs involves the removal of the phosphate groups present on the 5′ ends of uncapped incomplete mRNAs, the subsequent decapping of mRNAs having intact 5′ ends and the ligation of the phosphate present at the 5′ end of the decapped mRNA to an oligonucleotide tag. Further detail regarding the enzymatic approaches for obtaining mRNAs having intact 5′ ends is disclosed in Dumas Milne Edwards J. B. (Doctoral Thesis of Paris VI University, Le clonage des ADNc complets: difficultés et perspectives nouvelles. Apports pour l'étude de la regulation de l′ expression de la tryptophane hydroxylase de rat, 20 Dec. 1993), EP0 625572 and Kato et al., Gene 150:243-250 (1994).

[0761] In both the chemical and the enzymatic approach, the oligonucleotide tag has a restriction enzyme site (e.g. an EcoRI site) therein to facilitate later cloning procedures. Following attachment of the oligonucleotide tag to the mRNA, the integrity of the mRNA is examined by performing a Northern blot using a probe complementary to the oligonucleotide tag.

[0762] For the mRNAs joined to oligonucleotide tags using either the chemical or the enzymatic method, first strand cDNA synthesis is performed using an oligo-dT primer with reverse transcriptase. This oligo-dT primer contains an internal tag of at least 4 nucleotides, which can be different from one mRNA preparation to another. Methylated dCTP is used for cDNA first strand synthesis to protect the internal EcoRI sites from digestion during subsequent steps. The first strand cDNA is precipitated using isopropanol after removal of RNA by alkaline hydrolysis to eliminate residual primers.

[0763] Second strand cDNA synthesis is conducted using a DNA polymerase, such as Klenow fragment and a primer corresponding to the 5′ end of the ligated oligonucleotide. The primer is typically 20-25 bases in length. Methylated dCTP is used for second strand synthesis in order to protect internal EcoRI sites in the cDNA from digestion during the cloning process.

[0764] Following second strand synthesis, the full-length cDNAs are cloned into a phagemid vector, such as pBlueScript™ (Stratagene). The ends of the full-length cDNAs are blunted with T4 DNA polymerase (Biolabs) and the cDNA is digested with EcoRI. Since methylated dCTP is used during cDNA synthesis, the EcoRI site present in the tag is the only hemi-methylated site; hence the only site susceptible to EcoRI digestion. In some instances, to facilitate subcloning, an Hind III adapter is added to the 3′ end of full-length cDNAs.

[0765] The full-length cDNAs are then size fractionated using either exclusion chromatography (AcA, Biosepra) or electrophoretic separation which yields 3 to 6 different fractions. The full-length cDNAs are then directionally cloned either into pBlueScript™ using either the EcoRI and SmaI restriction sites or, when the Hind III adapter is present in the full-length cDNAs, the EcoRI and Hind III restriction sites. The ligation mixture is transformed, preferably by electroporation, into bacteria, which are then propagated under appropriate antibiotic selection.

[0766] Clones containing the oligonucleotide tag attached to full-length cDNAs are selected as follows.

[0767] The plasmid cDNA libraries made as described above are purified (e.g. by a column available from Qiagen). A positive selection of the tagged clones is performed as follows. Briefly, in this selection procedure, the plasmid DNA is converted to single stranded DNA using phage F1 gene II endonuclease in combination with an exonuclease (Chang et al., Gene 127:95 (1993)) such as exonuclease III or T7 gene 6 exonuclease. The resulting single stranded DNA is then purified using paramagnetic beads as described by Fry et al., Biotechniques 13: 124 (1992). Here the single stranded DNA is hybridized with a biotinylated oligonucleotide having a sequence corresponding to the 3′ end of the oligonucleotide tag. Preferably, the primer has a length of 20-25 bases. Clones including a sequence complementary to the biotinylated oligonucleotide are selected by incubation with streptavidin coated magnetic beads followed by magnetic capture. After capture of the positive clones, the plasmid DNA is released from the magnetic beads and converted into double stranded DNA using a DNA polymerase such as ThermoSequenase™ (obtained from Amersham Pharmacia Biotech). Alternatively, protocols such as the Gene Trapper™ kit (Gibco BRL) can be used. The double stranded DNA is then transformed, preferably by electroporation, into bacteria. The percentage of positive clones having the 5′ tag oligonucleotide is typically estimated to be between 90 and 98% from dot blot analysis.

[0768] Following transformation, the libraries are ordered in microtiter plates and sequenced. The Arabidopsis library was deposited at the American Type Culture Collection on Jan. 7, 2000 as “E-coli liba 010600” under the accession number PTA-1161.

### A. Example 2

### Southern hybridizations

[0769] The SDFs of the invention are used in Southern hybridizations as described above. The following describes extraction of DNA from nuclei of plant cells, digestion of the nuclear DNA and separation by length, transfer of the separated fragments to membranes, preparation of probes for hybridization, hybridization and detection of the hybridized probe.

[0770] The procedures described herein are used to isolate related polynucleotides or for diagnostic purposes. Moderate stringency hybridization conditions, as defined above, are described in the present example. These conditions result in detection of hybridization between sequences having at least 70% sequence identity. As described above, the hybridization and wash conditions can be changed to reflect the desired percenatge of sequence identity between probe and target sequences that can be detected.

[0771] In the following procedure, a probe for hybridization is produced from two PCR reactions using two primers from genomic sequence of Arabidopsis thaliana. As described above, the particular template for generating the probe can be any desired template.

[0772] The first PCR product is assessed to validate the size of the primer to assure it is of the expected size. Then the product of the first PCR is used as a template, with the same pair of primers used in the first PCR, in a second PCR that produces a labeled product used as the probe.

[0773] Fragments detected by hybridization, or other bands of interest, are isolated from gels used to separate genomic DNA fragments by known methods for further purification and/or characterization.

[0774] Buffers for nuclear DNA extraction

### 1. 10×HB

| | 1000 ml | |
|---|---|---|
| 40 mM | 10.2 g | Spermine (Sigma S-2876) and |
| spermidine | | spermidine (Sigma S-2501) |
| 10 mM | 3.5 g | Stabilize chromatin and the |
| spermine | | nuclear membrane |
| 0.1M EDTA | 37.2 g | EDTA inhibits nuclease |
| (disodium) | | |
| 0.1M Tris | 12.1 g | Buffer |
| 0.8M KCl | 59.6 g | Adjusts ionic strength for |
| | | stability of nuclei |

[0776] Adjust pH to 9.5 with 10 N NaOH. It appears that there is a nuclease present in leaves. Use of pH 9.5 appears to inactivate this nuclease.
   2. 2 M sucrose (684 g per 1000 ml)
[0777] Heat about half the final volume of water to about 50° C. Add the sucrose slowly then bring the mixture to close to final volume; stir constantly until it has dissolved. Bring the solution to volume.
   3. Sarkosyl solution (lyses nuclear membranes)

| | 1000 ml |
|---|---|
| N-lauroyl sarcosine (Sarkosyl) | 20.0 g |
| 0.1M Tris | 12.1 g |
| 0.04M EDTA (Disodium) | 14.9 g |

[0778] Adjust the pH to 9.5 after all the components are dissolved and bring up to the proper volume.

### 4.20% Triton X-100

[0779] 80 ml Triton X-100
[0780] 320 ml 1×HB (w/o (3-ME and PMSF)
[0781] Prepare in advance; Triton takes some time to dissolve

### A. PROCEDURE

[0782] 1. Prepare 1×“H” buffer (keep ice-cold during use)

| | 1000 ml |
|---|---|
| 10X HB | 100 ml |
| 2M sucrose | 250 ml a non-ionic osmoticum |
| Water | 634 ml |
| Added just before use: | |
| 100 mM PMSF* | 10 ml a protease inhibitor; protects |
| | nuclear membrane proteins |
| β-mercaptoethanol | 1 ml inactivates nuclease by |
| | reducing disulfide bonds |

*100 mM PMSF (phenyl methyl sulfonyl fluoride, Sigma P-7626) (add 0.0875 g to 5 ml 100% ethanol)

[0783] 2. Homogenize the tissue in a blender (use 300-400 ml of 1×HB per blender). Be sure that you use 5-10 ml of HB buffer per gram of tissue. Blenders generate heat so be sure to keep the homogenate cold. It is necessary to put the blenders in ice periodically.
[0784] 3. Add the 20% Triton X-100 (25 ml per liter of homogenate) and gently stir on ice for 20 min. This lyses plastid, but not nuclear, membranes.
[0785] 4. Filter the tissue suspension through several nylon filters into an ice-cold beaker. The first filtration is through a 250-micron membrane; the second is through an 85-micron membrane; the third is through a 50-micron membrane; and the fourth is through a 20-micron membrane. Use a large funnel to hold the filters. Filtration can be sped up by gently squeezing the liquid through the filters.
[0786] 5. Centrifuge the filtrate at 1200×g for 20 min. at 4° C. to pellet the nuclei.
[0787] 6. Discard the dark green supernatant. The pellet will have several layers to it. One is starch; it is white and gritty. The nuclei are gray and soft. In the early steps, there may be a dark green and somewhat viscous layer of chloroplasts.
   [0788] Wash the pellets in about 25 ml cold H buffer (with Triton X-100) and resuspend by swirling gently and pipetting. After the pellets are resuspended pellet the nuclei again at 1200-1300×g. Discard the supernatant.
   [0789] Repeat the wash 3-4 times until the supernatant has changed from a dark green to a pale green. This usually happens after 3 or 4 resuspensions. At this point, the pellet is typically grayish white and very slippery. The Triton X-100 in these repeated steps helps to destroy the chloroplasts and mitochondria that contaminate the prep.
   [0790] Resuspend the nuclei for a final time in a total of 15 ml of H buffer and transfer the suspension to a sterile 125 ml Erlenmeyer flask.
[0791] 7. Add 15 ml, dropwise, cold 2% Sarkosyl, 0.1 M Tris, 0.04 M EDTA solution (pH 9.5) while swirling gently. This lyses the nuclei. The solution will become very viscous.
[0792] 8. Add 30 grams of CsCl and gently swirl at room temperature until the CsCl is in solution. The mixture will be gray, white and viscous.
[0793] 9. Centrifuge the solution at 11,400×g at 4° C. for at least 30 min. The longer this spin is, the firmer the protein pellicle.
[0794] 10. The result is typically a clear green supernatant over a white pellet, and (perhaps) under a protein pellicle. Carefully remove the solution under the protein pellicle and above the pellet. Determine the density of the solution by weighing 1 ml of solution and add CsCl if necessary to bring to 1.57 g/ml. The solution contains dissolved solids (sucrose etc) and the refractive index alone will not be an accurate guide to CsCl concentration.
[0795] 11. Add 20 μl of 10 mg/ml EtBr per ml of solution.
[0796] 12. Centrifuge at 184,000×g for 16 to 20 hours in a fixed-angle rotor.
[0797] 13. Remove the dark red supernatant that is at the top of the tube with a plastic transfer pipette and discard. Carefully remove the DNA band with another transfer pipette. The DNA band is usually visible in room light; otherwise, use a long wave UV light to locate the band.
[0798] 14. Extract the ethidium bromide (EtBr) with isopropanol saturated with water and salt. Once the solution is clear, extract at least two more times to ensure that all of the EtBr is gone. Be very gentle, as it is very easy to shear the DNA at this step. This extraction may take a while because the DNA solution tends to be very viscous. If the solution is too viscous, dilute it with TE.
[0799] 15. Dialyze the DNA for at least two days against several changes (at least three times) of TE (10 mM Tris, 1 mM EDTA, pH 8) to remove the cesium chloride.
[0800] 16. Remove the dialyzed DNA from the tubing. If the dialyzed DNA solution contains a lot of debris, centrifuge the DNA solution at least at 2500×g for 10 min. and carefully transfer the clear supernatant to a new tube. Read the A260 concentration of the DNA.
[0801] 17. Assess the quality of the DNA by agarose gel electrophoresis (1% agarose gel) of the DNA. Load 50 ng and 100 ng (based on the OD reading) and compare it with known and good quality DNA. Undigested lambda DNA and a lambda-HindIII-digested DNA are good molecular weight makers.

### Protocol for Digestion of Genomic DNA

### Protocol:

[0802] 1. The relative amounts of DNA for different crop plants that provide approximately a balanced number of genome equivalent is given in Table 3 below. Note that due to the size of the wheat genome, wheat DNA will be underrepresented. Lambda DNA provides a useful control for complete digestion.
[0803] 2. Precipitate the DNA by adding 3 volumes of 100% ethanol. Incubate at −20° C. for at least two hours. Yeast DNA can be purchased and made up at the necessary concentration, therefore no precipitation is necessary for yeast DNA.
[0804] 3. Centrifuge the solution at 11,400×g for 20 min. Decant the ethanol carefully (be careful not to disturb the pellet). Be sure that the residual ethanol is completely removed either by vacuum desiccation or by carefully wiping the sides of the tubes with a clean tissue.
[0805] 4. Resuspend the pellet in an appropriate volume of water. Be sure the pellet is fully resuspended before proceeding to the next step. This may take about 30 min.
[0806] 5. Add the appropriate volume of 10× reaction buffer provided by the manufacturer of the restriction enzyme to the resuspended DNA followed by the appropriate volume of enzymes. Be sure to mix it properly by slowly swirling the tubes.
[0807] 6. Set-up the lambda digestion-control for each DNA that you are digesting.
[0808] 7. Incubate both the experimental and lambda digests overnight at 37° C. Spin down condensation in a microfuge before proceeding.
[0809] 8. After digestion, add 2 μl of loading dye (typically 0.25% bromophenol blue, 0.25% xylene cyanol in 15% Ficoll or 30% glycerol) to the lambda-control digests and load in 1% TPE-agarose gel (TPE is 90 mM Tris-phosphate, 2 mM EDTA, pH 8). If the lambda DNA in the lambda control digests are completely digested, proceed with the precipitation of the genomic DNA in the digests.
[0810] 9. Precipitate the digested DNA by adding 3 volumes of 100% ethanol and incubating in—⁻20° C. for at least 2 hours (preferably overnight).
   [0811] EXCEPTION: Arabidopsis and yeast DNA are digested in an appropriate volume; they don't have to be precipitated.
[0812] 10. Resuspend the DNA in an appropriate volume of TE (e.g., 22 μl×50 blots=1100 μl) and an appropriate volume of 10× loading dye (e.g., 2.4 μl×50 blots=120 μl). Be careful in pipetting the loading dye—it is viscous. Be sure you are pipetting the correct volume.

TABLE 3
Some guide points indigesting genomic DNA.

| | | Size | Genome | Amount |
|---|---|---|---|---|
| | Genome | Relative to | Equivalent to 2 μg | of DNA |
| Species | Size | Arabidopsis | Arabidopsis DNA | per blot |
| Arabidopsis | 120 Mb | 1X | 1X | 2 μg |
| Brassica | 1,100 Mb | 9.2X | 0.54X | 10 μg |
| Corn | 2,800 Mb | 23.3X | 0.43X | 20 μg |
| Cotton | 2,300 Mb | 19.2X | 0.52X | 20 μg |
| Oat | 11,300 Mb | 94X | 0.11X | 20 μg |
| Rice | 400 Mb | 3.3X | 0.75X | 5 μg |
| Soybean | 1,100 Mb | 9.2X | 0.54X | 10 μg |
| Sugarbeet | 758 Mb | 6.3X | 0.8X | 10 μg |
| Sweetclover | 1,100 Mb | 9.2X | 0.54X | 10 μg |
| Wheat | 16,000 Mb | 133X | 0.08X | 20 μg |
| Yeast | 15 Mb | 0.12X | 1X | 0.25 μg |

### Protocol for Southern Blot Analysis

[0813] The digested DNA samples are electrophoresed in 1% agarose gels in 1×TPE buffer. Low voltage, overnight separations are preferred. The gels are stained with EtBr and photographed.
[0814] 1. For blotting the gels, first incubate the gel in 0.25 N HCl (with gentle shaking) for about 15 min.
[0815] 2. Then briefly rinse with water. The DNA is denatured by 2 incubations. Incubate (with shaking) in 0.5 M NaOH in 1.5 M NaCl for 15 min.
[0816] 3. The gel is then briefly rinsed in water and neutralized by incubating twice (with shaking) in 1.5 M Tris pH 7.5 in 1.5 M NaCl for 15 min.
[0817] 4. A nylon membrane is prepared by soaking it in water for at least 5 min, then in 6×SSC for at least 15 min. before use. (20×SSC is 175.3 g NaCl, 88.2 g sodium citrate per liter, adjusted to pH 7.0.)
[0818] 5. The nylon membrane is placed on top of the gel and all bubbles in between are removed. The DNA is blotted from the gel to the membrane using an absorbent medium, such as paper toweling and 6×SCC buffer. After the transfer, the membrane may be lightly brushed with a gloved hand to remove any agarose sticking to the surface.
[0819] 6. The DNA is then fixed to the membrane by UV crosslinking and baking at 80° C. The membrane is stored at 4° C. until use.

### B. Protocol for PCR Amplification of Genomic Fragments in Arabidopsis

[0820] Amplification Procedures:

[0821] 1. Mix the following in a 0.20 ml PCR tube or 96-well PCR plate:

| Volume | Stock | Final Amount or Conc. |
|---|---|---|
| 0.5 μl | ~10 ng/μl genomic DNA¹ | 5 ng |
| 2.5 μl | 10X PCR buffer | 20 mM Tris, 50 mM KCl |
| 0.75 μl | 50 mM MgCl₂ | 1.5 mM |
| 1 μl | 10 pmol/μl Primer 1 (Forward) | 10 pmol |
| 1 μl | 10 pmol/μl Primer 2 (Reverse) | 10 pmol |
| 0.5 μl | 5 mM dNTPs | 0.1 mM |
| 0.1 μl | 5 units/μl Platinum Taq ™ (Life | 1 units |
| | Technologies, Gaithersburg, MD) | |
| | DNA Polymerase | |
| (to 25 μl) | Water | |

¹Arabidopsis DNA is used in the present experiment, but the procedure is a general one.

[0822] 2. The template DNA is amplified using a Perkin Elmer 9700 PCR machine:

[0823] 1) 94° C. for 10 min. followed by

| 2) 5 cycles: | 3) 5 cycles: | 4) 25 cycles: |
|---|---|---|
| 94° C. - 30 sec | 94° C. - 30 sec | 94° C. - 30 sec |
| 62° C. - 30 sec | 58° C. - 30 sec | 53° C. - 30 sec |
| 72° C. - 3 min | 72° C. - 3 min | 72° C. - 3 min |

[0824] 5) 72° C. for 7 min. Then the reactions are stopped by chilling to 4° C.

[0825] The procedure can be adapted to a multi-well format if necessary.

### Quantification and Dilution of PCR Products:

[0826] 1. The product of the PCR is analyzed by electrophoresis in a 1% agarose gel. A linearized plasmid DNA can be used as a quantification standard (usually at 50, 100, 200, and 400 ng). These will be used as references to approximate the amount of PCR products. HindIII-digested Lambda DNA is useful as a molecular weight marker. The gel can be run fairly quickly; e.g., at 100 volts. The standard gel is examined to determine that the size of the PCR products is consistent with the expected size and if there are significant extra bands or smeary products in the PCR reactions.
[0827] 2. The amounts of PCR products are estimated on the basis of the plasmid standard.
[0828] 3. For the small number of reactions that produce extraneous bands, a small amount of DNA from bands with the correct size can be isolated by dipping a sterile 10-μl tip into the band while viewing though a UV Transilluminator. The small amount of agarose gel (with the DNA fragment) is used in the labeling reaction.

### C. Protocol for PCR-Dig-Labeling of DNA

### Solutions:

[0829] Reagents in PCR reactions (diluted PCR products, 10× PCR Buffer, 50 mM MgCl₂, 5 U/μl Platinum Taq Polymerase, and the primers)

10× dNTP+DIG-11-dUTP [1:5]: (2 mM dATP, 2 mM dCTP, 2 mM dGTP, 1.65 mM dTTP, 0.35 mM DIG-11-dUTP)
10× dNTP+DIG-11-dUTP [1:10]: (2 mM dATP, 2 mM dCTP, 2 mM dGTP, 1.81 mM dTTP, 0.19 mM DIG-11-dUTP)
10× dNTP+DIG-11-dUTP [1:15]: (2 mM dATP, 2 mM dCTP, 2 mM dGTP, 1.875 mM dTTP, 0.125 mM DIG-11-dUTP)
TE buffer (10 mM Tris, 1 mM EDTA, pH 8)
Maleate buffer: In 700 ml of deionized distilled water, dissolve 11.61 g maleic acid and 8.77 g NaCl. Add NaOH to adjust the pH to 7.5. Bring the volume to 1 L. Stir for 15 min. and sterilize.
10% blocking solution: In 80 ml deionized distilled water, dissolve 1.16 g maleic acid. Next, add NaOH to adjust the pH to 7.5. Add 10 g of the blocking reagent powder (Boehringer Mannheim, Indianapolis, Ind., Cat. no. 1096176). Heat to 60° C. while stirring to dissolve the powder. Adjust the volume to 100 ml with water. Stir and sterilize.
1% blocking solution: Dilute the 10% stock to 1% using the maleate buffer.
Buffer 3 (100 mM Tris, 100 mM NaCl, 50 mM MgCl₂, pH9.5). Prepared from autoclaved solutions of 1M Tris pH 9.5, 5 M NaCl, and 1 M MgCl₂ in autoclaved distilled water.

### Procedure:

[0830] 1. PCR reactions are performed in 25 μl volumes containing:

| | |
|---|---|
| PCR buffer | 1X |
| MgCl₂ | 1.5 mM |
| 10X dNTP + DIG-11-dUTP | 1X (please see the note below) |
| Platinum Taq ™ Polymerase | 1 unit |
| 10 pg probe DNA | |
| 10 pmol primer 1 | |

Note:

| | |
|---|---|
| | Use for: |
| 10X dNTP + DIG-11-dUTP (1:5) | <1 kb |
| 10X dNTP + DIG-11-dUTP (1:10) | 1 kb to 1.8 kb |
| 10X dNTP + DIG-11-dUTP (1:15) | >1.8 kb |

2. The PCR reaction uses the following amplification cycles:

[0831] 1) 94° C. for 10 min.

| 2) 5 cycles: | 3) 5 cycles: | 4) 25 cycles: |
|---|---|---|
| 95° C. - 30 sec | 95° C. - 30 sec | 95° C. - 30 sec |
| 61° C. - 1 min | 59° C. - 1 min | 51° C. - 1 min |
| 73° C. - 5 min | 75° C. - 5 min | 73° C. - 5 min |

5) 72° C. for 8 min. The reactions are terminated by chilling to 4° C. (hold).
3. The products are analyzed by electrophoresis-in a 1% agarose gel, comparing to an aliquot of the unlabelled probe starting material.
4. The amount of DIG-labeled probe is determined as follows:

[0832] Make serial dilutions of the diluted control DNA in dilution buffer (TE: 10 mM Tris and 1 mM EDTA, pH 8) as shown in the following table:

| DIG-labeled control | | Final Conc. |
|---|---|---|
| DNA starting conc. | Stepwise Dilution | (Dilution Name) |
| 5 ng/μl | 1 μl in 49 μl TE | 100 pg/μl (A) |
| 100 pg/μl (A) | 25 μl in 25 μl TE | 50 pg/μl (B) |
| 50 pg/μl (B) | 25 μl in 25 μl TE | 25 pg/μl (C) |
| 25 pg/μl (C) | 20 μl in 30 μl TE | 10 pg/μl (D) |

a. Serial deletions of a DIG-labeled standard DNA ranging from 100 pg to 10 pg are spotted onto a positively charged nylon membrane, marking the membrane lightly with a pencil to identify each dilution.
b. Serial dilutions (e.g., 1:50, 1:2500, 1:10,000) of the newly labeled DNA probe are spotted.
c. The membrane is fixed by UV crosslinking.
d. The membrane is wetted with a small amount of maleate buffer and then incubated in 1% blocking solution for 15 min at room temp.
e. The labeled DNA is then detected using alkaline phosphatase conjugated anti-DIG antibody (Boehringer Mannheim, Indianapolis, IN, cat. no. 1093274) and an NBT substrate according to the manufacture's instruction.
f. Spot intensities of the control and experimental dilutions are then compared to estimate the concentration of the PCR-DIG-labeled probe.

### D. Prehybridization and Hybridization of Southern Blots

### Solutions:

| | |
|---|---|
| 100% Formamide | purchased from Gibco |
| 20X SSC | (1X = 0.15M NaCl, |
| | 0.015M Na₃citrate) |
| per L: | 175 g NaCl |
| | 87.5 g Na₃citrate 2H₂O |
| 20% Sarkosyl | |
| (N-lauroyl-sarcosine) | |
| 20% SDS (sodium | |
| dodecyl sulphate) | |

[0834] 10% Blocking Reagent: In 80 ml deionized distilled water, dissolve 1.16 g maleic acid. Next, add NaOH to adjust the pH to 7.5. Add 10 g of the blocking reagent powder. Heat to 60° C. while stirring to dissolve the powder. Adjust the volume to 100 ml with water. Stir and sterilize.

### Prehybridization Mix:

| Final | | Volume | |
|---|---|---|---|
| Concentration | Components | (per 100 ml) | Stock |
| 50% | Formamide | 50 ml | 100% |
| 5X | SSC | 25 ml | 20X |
| 0.1% | Sarkosyl | 0.5 ml | 20% |
| 0.02% | SDS | 0.1 ml | 20% |
| 2% | Blocking Reagent | 20 ml | 10% |
| | Water | 4.4 ml | |

### General Procedures:

[0836] 1. Place the blot in a heat-sealable plastic bag and add an appropriate volume of prehybridization solution (30 ml/100 cm²) at room temperature. Seal the bag with a heat sealer, avoiding bubbles as much as possible. Lay down the bags in a large plastic tray (one tray can accommodate at least 4-5 bags). Ensure that the bags are lying flat in the tray so that the prehybridization solution is evenly distributed throughout the bag. Incubate the blot for at least 2 hours with gentle agitation using a waver shaker.
[0837] 2. Denature DIG-labeled DNA probe by incubating for 10 min. at 98° C. using the PCR machine and immediately cool it to 4° C.
[0838] 3. Add probe to prehybridization solution (25 ng/ml; 30 ml=750 ng total probe) and mix well but avoid foaming. Bubbles may lead to background.
[0839] 4. Pour off the prehybridization solution from the hybridization bags and add new prehybridization and probe solution mixture to the bags containing the membrane.
[0840] 5. Incubate with gentle agitation for at least 16 hours.
[0841] 6. Proceed to medium stringency post-hybridization wash:

[0842] Three times for 20 min. each with gentle agitation using 1×SSC, 1% SDS at 60° C.

[0843] All wash solutions must be prewarmed to 60° C. Use about 100 ml of wash solution per membrane.

[0844] To avoid background keep the membranes fully submerged to avoid drying in spots; agitate sufficiently to avoid having membranes stick to one another.
[0845] 7. After the wash, proceed to immunological detection and CSPD development.
   E. Procedure for Immunological Detection with CSPD

### Solutions:

[0846] Buffer 1: Maleic acid buffer (0.1 M maleic acid, 0.15 M NaCl; adjusted to pH 7.5 with NaoH)
[0847] Washing buffer: Maleic acid buffer with 0.3% (v/v) Tween 20.
[0848] Blocking stock solution 10% blocking reagent in buffer 1. Dissolve (10× concentration): blocking reagent powder (Boehringer Mannheim, Indianapolis, Ind., cat. no. 1096176) by constantly stirring on a 65° C. heating block or heat in a microwave, autoclave and store at 4° C.

### Buffer 2

[0849] (1× blocking solution): Dilute the stock solution 1:10 in Buffer 1.
Detection buffer: 0.1 M Tris, 0.1 M NaCl, pH 9.5

### Procedure:

[0850] 1. After the post-hybridization wash the blots are briefly rinsed (1-5 min.) in the maleate washing buffer with gentle shaking.
[0851] 2. Then the membranes are incubated for 30 min. in Buffer 2 with gentle shaking.
[0852] 3. Anti-DIG-AP conjugate (Boehringer Mannheim, Indianapolis, Ind., cat. no. 1093274) at 75 mU/ml (1:10,000) in Buffer 2 is used for detection. 75 ml of solution can be used for 3 blots.
[0853] 4. The membrane is incubated for 30 min. in the antibody solution with gentle shaking.
[0854] 5. The membrane are washed twice in washing buffer with gentle shaking. About 250 mls is used per wash for 3 blots.
[0855] 6. The blots are equilibrated for 2-5 min in 60 ml detection buffer.
[0856] 7. Dilute CSPD (1:200) in detection buffer. (This can be prepared ahead of time and stored in the dark at dC).
   [0857] The following steps must be done individually. Bags (one for detection and one for exposure) are generally cut and ready before doing the following steps.
[0858] 8. The blot is carefully removed from the detection buffer and excess liquid removed without drying the membrane. The blot is immediately placed in a bag and 1.5 ml of CSPD solution is added. The CSPD solution can be spread over the membrane. Bubbles present at the edge and on the surface of the blot are typically removed by gentle rubbing. The membrane is incubated for 5 min. in CSPD solution.
[0859] 9. Excess liquid is removed and the membrane is blotted briefly (DNA side up) on Whatman 3mM paper. Do not let the membrane dry completely.
[0860] 10. Seal the damp membrane in a hybridization bag and incubate for 10 min at 37″C to enhance the luminescent reaction.
[0861] 11. Expose for 2 hours at room temperature to X-ray film. Multiple exposures can be taken. Luminescence continues for at least 24 hours and signal intensity increases during the first hours.

### Example 3

### Microarray Experiments and Results

### 1. Sample Tissue Preparation

[0862] (a) Abscissic acid (ABA)

[0863] Seeds of Arabidopsis thaliana (ecotype Wassilewskija) are sown in trays and left at 4° C. for 4 days to vernalize. They are then transferred to a growth chamber having grown 16 hr light/8 hr dark, 13,000 LUX, 70% humidity, and 20° C. and watered twice a week with 1 L of 1× Hoagland's solution. Approximately 1,000 14 day old plants are sprayed with 200-250 mls of 100 μM ABA in a 0.02% solution of the detergent Silwet L-77. Whole seedlings, including roots, are harvested within a 15 to 20 minute time period at 1 hr and 6 hr after treatment, flash-frozen in liquid nitrogen and stored at ⁻80° C.

[0864] Seeds of maize hybrid 35A (Pioneer) are sown in water-moistened sand in flats (10 rows, 5-6 seed/row) and covered with clear, plastic lids before being placed in a growth chamber having 16 hr light (25° C.)/8 hr dark (20° C.), 75% relative humidity and 13,000-14,000 LUX. Covered flats are watered every three days for 7 days. Seedlings are carefully removed from the sand and placed in 1-liter beakers with 100 μM ABA for treatment. Control plants are treated with water. After 6 hr and 24 hr, aerial and root tissues are separated and flash frozen in liquid nitrogen prior to storage at ⁻80° C.

### (b) Ap2

[0865] Seeds of Arabidopsis thaliana (ecotype Landesberg erecta) and floral mutant apetala2 (Jofuku et al., 1994, Plant Cell 6:1211-1225) are sown in pots and left at 4° C. for two to three days to vernalize. They are then transferred to a growth chamber. Plants are grown under long-day (16 hr light, 8 hr dark) conditions 7000-8000 LUX light intensity, 70% humidity and 22° C. temperature. Inflorescences containing immature floral buds (stages 1-7; Bowman, 1994) as wel as the inflorescence meristem are harvested and flashfrozen. Polysomal polyA+ RNA is isolated from tissue according to Cox and Goldberg, 1988).

### (c) Arabidopsis Endosperm

[0866] mea/mea Fruits 0-10 mm

[0867] Seeds of Arabidopsis thaliana heterozygous for the fertilization-independent endosperm1 (fie1) [Ohad et al., 1996; ecotype Landsberg erecta (Ler)] are sown in pots and left at 4° C. for two to three days to vernalize. Kiyosue et al. (1999) subsequently determined that fie1 was allelic to the gametophytic maternal effect mutant medea (Grossniklaus et al., 1998). Imbibed seeds are then transferred to a growth chamber. Plants are grown under long-day (16 hr light: 8 hr dark) conditions, 7000-8000 LUX light intensity, 70% humidity, and 22° C. temperature. 1-2 siliques (fruits) bearing developing seeds just prior to dessication [9 days after flowering (DAF)] are selected from each plant and are hand-dissected to identify wild-type, mea/+ heterozygotes, and mea/mea homozygous mutant plants. At this stage, homozygous mea/mea plants produce short siliques that contain>70% aborted seed and can be distinguished from those produced by wild-type (100% viable seed) and mea/+ heterozygous (50% viable seed) plants (Ohad et al., 1996; Grossniklaus et al., 1998; Kiyosue et al., 1999). Siliques 0-10 mm in length containing developing seeds 0-9 DAF produced by homozygous mea/mea plants are harvested and flash frozen in liquid nitrogen.

[0868] Pods 0-10 mm (Control Tissue for Sample 70)

[0869] Seeds of Arabidopsis thaliana heterozygous for the fertilization-independent endosperm1 (fie1) [Ohad et al., 1996; ecotype Landsberg erecta (Ler)] are sown in pots and left at 4° C. for two to three days to vernalize. Kiyosue et al. (1999) subsequently determined that fie1 was allelic to the gametophytic maternal effect mutant medea (Grossniklaus et al., 1998). Imbibed seeds are then transferred to a growth chamber. Plants are grown under long-day (16 hr light: 8 hr dark) conditions, 7000-8000 LUX light intensity, 70% humidity, and 22° C. temperature. 1-2 siliques (fruits) bearing developing seeds just prior to dessication [9 days after flowering (DAF)] are selected from each plant and are hand-dissected to identify wild-type, mea/+ heterozygotes, and mea/mea homozygous mutant plants. At this stage, homozygous mea/mea plants produce short siliques that contain>70% aborted seed and can be distinguished from those produced by wild-type (100% viable seed) and mea/+ heterozygous (50% viable seed) plants (Ohad et al., 1996; Grossniklaus et al., 1998; Kiyosue et al., 1999). Siliques 0-10 mm in length containing developing seeds 0-9 DAF produced by segregating wild-type plants are opened and the seeds removed. The remaining tissues (pods minus seed) are harvested and flash frozen in liquid nitrogen.

### (d) Arabidopsis Seeds

[0870] Fruits (pod+seed) 0-5 mm

[0871] Seeds of Arabidopsis thaliana (ecotype Wassilewskija) are sown in pots and left at 4° C. for two to three days to vernalize. They are then transferred to a growth chamber. Plants are grown under long-day (16 hr light: 8 hr dark) conditions, 7000-8000 LUX light intensity, 70% humidity, and 22° C. temperature. 3-4 siliques (fruits) bearing developing seeds are selected from at least 3 plants and are hand-dissected to determine what developmental stage(s) is represented by the enclosed embryos. Description of the stages of Arabidopsis embryogenesis used in this determination were summarized by Bowman (1994). Silique lengths are then determined and used as an approximate determinant for embryonic stage. Siliques 0-5 mm in length containing post fertilization through pre-heart stage [0-72 hours after fertilization (HAF)] embryos are harvested and flash frozen in liquid nitrogen.

[0872] Fruits(pod+seed) 5-10 mm

[0873] Seeds of Arabidopsis thaliana (ecotype Wassilewskija) are sown in pots and left at 4° C. for two to three days to vernalize. They are then transferred to a growth chamber. Plants are grown under long-day (16 hr light: 8 hr dark) conditions, 7000-8000 LUX light intensity, 70% humidity, and 22° C. temperature. 3-4 siliques (fruits) bearing developing seeds were selected from at least 3 plants and are hand-dissected to determine what developmental stage(s) are represented by the enclosed embryos. Description of the stages of Arabidopsis embryogenesis used in this determination are summarized by Bowman (1994). Silique lengths are then determined and used as an approximate determinant for embryonic stage. Siliques 5-10 mm in length containing heart-through early upturned-U-stage [72-120 hours after fertilization (HAF)] embryos are harvested and flash frozen in liquid nitrogen.

[0874] Fruits(pod+seed)>10 mm

[0875] Seeds of Arabidopsis thaliana (ecotype Wassilewskija) are sown in pots and left at 4° C. for two to three days to vernalize. They are then transferred to a growth chamber. Plants are grown under long-day (16 hr light: 8 hr dark) conditions, 7000-8000 LUX light intensity, 70% humidity, and 22° C. temperature. 3-4 siliques (fruits) bearing developing seeds are selected from at least 3 plants and were hand-dissected to determine what developmental stage(s) are represented by the enclosed embryos. Description of the stages of Arabidopsis embryogenesis used in this determination were summarized by Bowman (1994). Silique lengths are then determined and used as an approximate determinant for embryonic stage. Siliques>10 mm in length containing green, late upturned-U-stage [>120 hours after fertilization (HAF)-9 days after flowering (DAF)] embryos are harvested and flash frozen in liquid nitrogen.

[0876] Green Pods 5-10 mm (Control Tissue for Samples 72-74)

[0877] Seeds of Arabidopsis thaliana (ecotype Wassilewskija) are sown in pots and left at 4° C. for two to three days to vernalize. They are then transferred to a growth chamber. Plants are grown under long-day (16 hr light: 8 hr dark) conditions, 7000-8000 LUX light intensity, 70% humidity, and 22° C. temperature. 3-4 siliques (fruits) bearing developing seeds are selected from at least 3 plants and are hand-dissected to determine what developmental stage(s) are represented by the enclosed embryos. Description of the stages of Arabidopsis embryogenesis used in this determination are summarized by Bowman (1994). Silique lengths are then determined and used as an approximate determinant for embryonic stage. Green siliques 5-10 mm in length containing developing seeds 72-120 hours after fertilization (HAF)] are opened and the seeds removed. The remaining tissues (green pods minus seed) were harvested and flash frozen in liquid nitrogen.

[0878] Green Seeds from Fruits>10 mm

[0879] Seeds of Arabidopsis thaliana (ecotype Wassilewskija) are sown in pots and left at 4° C. for two to three days to vernalize. They are then transferred to a growth chamber. Plants are grown under long-day (16 hr light: 8 hr dark) conditions, 7000-8000 LUX light intensity, 70% humidity, and 22° C. temperature. 3-4 siliques (fruits) bearing developing seeds are selected from at least 3 plants and are hand-dissected to determine what developmental stage(s) are represented by the enclosed embryos. Description of the stages of Arabidopsis embryogenesis used in this determination were summarized by Bowman (1994). Silique lengths are then determined and used as an approximate determinant for embryonic stage. Green siliques>10 mm in length containing developing seeds up to 9 days after flowering (DAF)] are opened and the seeds removed and harvested and flash frozen in liquid nitrogen.

[0880] Brown Seeds from Fruits>10 mm

[0881] Seeds of Arabidopsis thaliana (ecotype Wassilewskija) are sown in pots and left at 4° C. for two to three days to vernalize. They are then transferred to a growth chamber. Plants are grown under long-day (16 hr light: 8 hr dark) conditions, 7000-8000 LUX light intensity, 70% humidity, and 22° C. temperature. 3-4 siliques (fruits) bearing developing seeds are selected from at least 3 plants and are hand-dissected to determine what developmental stage(s) are represented by the enclosed embryos. Description of the stages of Arabidopsis embryogenesis used in this determination were summarized by Bowman (1994). Silique lengths are then determined and used as an approximate determinant for embryonic stage. Yellowing siliques>10 mm in length containing brown, dessicating seeds>11 days after flowering (DAF)] are opened and the seeds removed and harvested and flash frozen in liquid nitrogen.

[0882] Green/Brown Seeds from Fruits>10 mm

[0883] Seeds of Arabidopsis thaliana (ecotype Wassilewskija) are sown in pots and left at 4° C. for two to three days to vernalize. They were then transferred to a growth chamber. Plants are grown under long-day (16 hr light: 8 hr dark) conditions, 7000-8000 LUX light intensity, 70% humidity, and 22° C. temperature. 3-4 siliques (fruits) bearing developing seeds are selected from at least 3 plants and are hand-dissected to determine what developmental stage(s) are represented by the enclosed embryos. Description of the stages of Arabidopsis embryogenesis used in this determination were summarized by Bowman (1994). Silique lengths are then determined and used as an approximate determinant for embryonic stage. Green siliques>10 mm in length containing both green and brown seeds>9 days after flowering (DAF)] are opened and the seeds removed and harvested and flash frozen in liquid nitrogen.

[0884] Mature Seeds (24 hours after imbibition)

[0885] Mature dry seeds of Arabidopsis thaliana (ecotype Wassilewskija) are sown onto moistened filter paper and left at 4° C. for two to three days to vernalize. Imbibed seeds are then transferred to a growth chamber [16 hr light: 8 hr dark conditions, 7000-8000 LUX light intensity, 70% humidity, and 22° C. temperature], the emerging seedlings harvested after 48 hours and flash frozen in liquid nitrogen.

[0886] Mature Seeds (Dry)

[0887] Seeds of Arabidopsis thaliana (ecotype Wassilewskija) are sown in pots and left at 4° C. for two to three days to vernalize. They are then transferred to a growth chamber. Plants are grown under long-day (16 hr light: 8 hr dark) conditions, 7000-8000 LUX light intensity, 70% humidity, and 22° C. temperature and taken to maturity. Mature dry seeds are collected, dried for one week at 28° C., and vernalized for one week at 4° C. before use as a source of RNA.

[0888] Ovules(Ler-pi)

[0889] Seeds of Arabidopsis thaliana heterozygous for pistillata (pi) (ecotype Landsberg erecta (Ler)) are sown in pots and left at 4° C. for two to three days to vernalize. They are then transferred to a growth chamber. Plants are grown under long-day (16 hr light: 8 hr dark) conditions, 7000-8000 LUX light intensity, 76% humidity, and 24° C. temperature. Inflorescences are harvested from seedlings about 40 days old. The inflorescences are cut into small pieces and incubated in the following enzyme solution (pH 5) at room temperature for 0.5-1 hr.: 0.2% pectolyase Y-23, 0.04% pectinase, 5 mM MES, 3% Sucrose and MS salts (1900 mg/l KNO₃, 1650 mg/l N̅H₄NO₃, 370 mg/l MgSO₄.7 H₂O, 170 mg/l KH₂PO₄, 440 mg/l CaCl₂.2 H₂O, 6.2 mg/l H₂BO₃, 15.6 mg/l MnSO₄.4 H₂O, 8.6 mg/l ZnSO₄.7 H₂O, 0.25 mg/l NaMoO₄. 2 H₂O, 0.025 mg/l CuCO₄.5 H₂O, 0.025 mg/l CoCl₂.6 H₂O, 0.83 mg/l KI, 27.8 mg/l FeSO₄. 7 H₂O, 37.3 mg/l Disodium EDTA, pH 5.8). At the end of the incubation the mixture of inflorescence material and enzyme solution is passed through a size 60 sieve and then through a sieve with a pore size of 125 μm. Ovules greater than 125 μm in diameter are collected, rinsed twice in B5 liquid medium (2500 mg/l KNO₃, 250 mg/l MgSO₄.7 H₂O, 150 mg/l NaH2PO₄. H₂O, 150 mg/l CaCl₂.2 H₂O, 134 mg/l (NH4)2 CaCl₂.SO₄, 3 mg/l H₂BO₃, 10 mg/l MnSO₄. 4 H₂O, 2 ZnSO₄.7 H₂O, 0.25 mg/l NaMoO₄.2 H₂O, 0.025 mg/l CuCO₄.5 H₂O, 0.025 mg/l CoCl₂.6 H₂O, 0.75 mg/l KI, 40 mg/l EDTA sodium ferric salt, 20 g/l sucrose, 10 mg/l Thiamine hydrochloride, 1 mg/l Pyridoxine hydrochloride, 1 mg/l Nicotinic acid, 100 mg/l myo-inositol, pH 5.5)), rinsed once in deionized water and flash frozen in liquid nitrogen. The supernatant from the 125 μm sieving is passed through subsequent sieves of 50 μm and 32 μm. The tissue retained in the 32 μm sieve is collected and mRNA prepared for use as a control.

### (e) Auxin Responsive (NAA)

[0890] Seeds of Arabidopsis thaliana (ecotype Wassilewskija) are sown in trays and left at 4° C. for 4 days to vernalize. They are then transferred to a growth chamber having 16 hr light/8 hr dark, 13,000 LUX, 70% humidity, 20° C. and watered twice a week with 1 L of 1× Hoagland's solution (recipe recited in Feldmann et al., (1987) Mol. Gen. Genet. 208: 1-9 and described as complete nutrient solution). Approximately 1,000 14 day old plants are spayed with 200-250 mls of 100 μM NAA in a 0.02% solution of the detergent Silwet L-77. Aerial tissues (everything above the soil line) are harvested within a 15 to 20 minute time period 1 hr and 6 hrs after treatment, flash-frozen in liquid nitrogen and stored at ⁻80° C.

[0891] Seeds of maize hybrid 35A (Pioneer) are sown in water-moistened sand in flats (10 rows, 5-6 seed/row) and covered with clear, plastic lids before being placed in a growth chamber having 16 hr light (25° C.)/8 hr dark (20° C.), 75% relative humidity and 13,000-14,000 LUX. Covered flats are watered every three days for 7 days. Seedlings are carefully removed from the sand and placed in 1-liter beakers with 100 μM NAA for treatment. Control plants are treated with water. After 6 hr and 24 hr, aerial and root tissues are separated and flash frozen in liquid nitrogen prior to storage at ⁻80° C.

### (f) Brassinosteroid Responsive (Br, Bz)

[0892] Two separate experiments are performed, one with epi-brassinolide and one with the brassinosteroid biosynthetic inhibitor brassinazole.

In the epi-brassinolide experiments, seeds of wild-type Arabidopsis thaliana (ecotype Wassilewskija) and the brassinosteroid biosynthetic mutant dwf4-1 are sown in trays and left at 4° C. for 4 days to vernalize. They are then transferred to a growth chamber having 16 hr light/8 hr dark, 11,000 LUX, 70% humidity and 22° C. temperature. Four week old plants are spayed with a 1 μM solution of epi-brassinolide and shoot parts (unopened floral primordia and shoot apical meristems) harvested three hours later. Tissue is flash-frozen in liquid nitrogen and stored at ⁻80° C.

[0893] In the brassinazole experiments, seeds of wild-type Arabidopsis thaliana (ecotype Wassilewskija) are grown as described above. Four week old plants are sprayed with a 1 μM solution of brassinazole and shoot parts (unopened floral primordia and shoot apical meristems) harvested three hours later. Tissue is flash-frozen in liquid nitrogen and stored at ⁻80° C.

[0894] In addition to the spray experiments, tissue is prepared from two different mutants; (1) a dwf4-1 knock out mutant and (2) a mutant overexpressing the dwf4-1 gene

[0895] Seeds of wild-type Arabidopsis thaliana (ecotype Wassilewskija) and of the dwf4-1 knock out and overexpressor mutants are sown in trays and left at 4° C. for 4 days to vernalize. They are then transferred to a growth chamber having 16 hr light/8 hr dark, 11,000 LUX, 70% humidity and 22° C. temperature. Tissue from shoot parts (unopened floral primordia and shoot apical meristems) is flash-frozen in liquid nitrogen and stored at ⁻80° C.

[0896] Another experiment is completed with seeds of Arabidopsis thaliana (ecotype Wassilewskija) that are sown in trays and left at 4° C. for 4 days to vernalize. They are then transferred to a growth chamber. Plants are grown under long-day (16 hr light: 8 hr. dark) conditions, 13,000 LUX light intensity, 70% humidity, 20° C. temperature and watered twice a week with 1 L 1× Hoagland's solution (recipe recited in Feldmann et al., (1987) Mol. Gen. Genet. 208: 1-9 and described as complete nutrient solution). Approximately 1,000 14 day old plants are spayed with 200-250 mls of 0.1 μM Epi-Brassinolite in 0.02% solution of the detergent Silwet L-77. At 1 hr. and 6 hrs. after treatment aerial tissues are harvested within a 15 to 20 minute time period and flash-frozen in liquid nitrogen.

[0897] Seeds of maize hybrid 35A (Pioneer) are sown in water-moistened sand in flats (10 rows, 5-6 seed/row) and covered with clear, plastic lids before being placed in a growth chamber having 16 hr light (25° C.)/8 hr dark (20° C.), 75% relative humidity and 13,000-14,000 LUX. Covered flats are watered every three days for 7 days. Seedlings are carefully removed from the sand and placed in 1-liter beakers with 0.1 μM epi-brassinolide for treatment. Control plants are treated with distilled deionized water. After 24 hr, aerial and root tissues are separated and flash frozen in liquid nitrogen prior to storage at ⁻80° C.

### (g) CS237

[0898] CS237 is an ethylene triple response mutant that is insensitive to ethylene and which has an etr1-1 phenotype. Arabidopsis thaliana CS237 seeds are vernalized at 4° C. for 3 days before sowing. Aerial tissue is collected from mutants and wild-type Columbia ecotype plants, flash frozen in liquid nitrogen and stored at −80° C.

### (h) CS6630

[0899] Arabidopsis thaliana (ecotype Wassilewskija) seeds are vernalized at 4° C. for 3 days before sowing on MS media (1%) sucrose on bactor-agar. Roots and shoots are separated 14 days after germination, flash frozen in liquid nitrogen and stored at ⁻80° C.

### (i) CS6632

[0900] Seedlings are grown on regular MS (1% sucrose) bacto-agar. 14 day old seedlings (days after germination) roots and shoots are separated and flash frozen in liquid N₂.

### (j) CS6632_Shoots-Roots

[0901] Seedlings are grown on regular MS (1% sucrose) bacto-agar.14 day old seedlings (days after germination) roots and shoots were separated nand flash frozen in liquid N₂.

### (k) CS6879_Shoots-Roots

[0902] Seedlings are grown vertically on regular MS (1% sucrose) bacto agar plates for 14 days. The roots are then isolated, flash frozen and RNA isolated.

### (1) CS8548

[0903] RNA from wild-type and mutant whole plants is prepared and compared.

### (m) Caf

[0904] Carple factory (Cal) is a double-stranded RNAse protein that is hypothesized to process small RNAs in Arabidopsis. The protein is closely related to a Drosophila protein named DICER that functions in the RNA degradation steps of RNA interference. Arabidopsis thaliana Caf mutant seeds are vernalized at 4° C. for 3 days before sowing in flats of MetroMix 200. Flats are placed in the greenhouse, watered and grown to the 8 leaf, pre-flower stage. Stems and rosette leaves are harvested from the mutants and the wild-type segregants, flash frozen and stored at −80° C.

[0905] (n) Cold (8 deg)

[0906] Sterilized Arabidopsis thaliana (ecotype Wassilewskija) seeds are kept at 4° C. in dark for three days and carefully spread on 0.5XMS plates by dispersing ˜300-500 seeds on agar surface. Plates are left to dry in the hood for 15-20 min. and then sealed with micropore tape. Plates are placed in a Percival growth chamber set at 22 C, 16 h light/8 h dark. By day 7 (9 AM), half of plates are moved into another Percival growth chamber whose setting is identical to the previous one except that the temperature is set to 8° C. Plants are gently pulled out from plates and harvested/frozen at 2 hrs, 4 hrs, 8 hrs, 2 days, 4 days, 7 days, 9 days and 11 days after transfer. Samples kept in the 22° C. chamber are harvested at the same time as the cold-treated samples.

### (o) Cold Shock Treatment

[0907] Seeds of Arabidopsis thaliana (ecotype Wassilewskija) are sown in trays and left at 4° C. for three days to vernalize before being transferred to a growth chamber having 16 hr light/8 hr dark, 12,000-14,000 LUX, 20° C. and 70% humidity. Fourteen day old plants are transferred to a 4° C. dark growth chamber and aerial tissues are harvested 1 hour and 6 hours later. Control plants are maintained at 20° C. and covered with foil to avoid exposure to light. Tissues are flash-frozen in liquid nitrogen and stored at ⁻80° C.

[0908] Seeds of maize hybrid 35A (Pioneer) are sown in water-moistened sand in flats (10 rows, 5-6 seed/row) and covered with clear, plastic lids before being placed in a growth chamber having 16 hr light (25° C.)/8 hr dark (20° C.), 75% relative humidity and 13,000-14,000 LUX. Covered flats are watered every three days for 7 days. Seedlings are carefully removed from the sand and placed in 1-liter beakers containing 4° C. water for treatment. Control plants are treated with water at 25° C. After 1 hr and 6 hr aerial and root tissues are separated and flash frozen in liquid nitrogen prior to storage at −80° C.

### (p) Cytokinin (BA)

[0909] Seeds of Arabidopsis thaliana (ecotype Wassilewskija) are sown in trays and left at 4° C. for 4 days to vernalize. They are then transferred to a growth chamber having 16 hr light/8 hr dark, 13,000 LUX, 70% humidity, 20° C. temperature and watered twice a week with 1 L of 1× Hoagland's solution. Approximately 1,000 14 day old plants are spayed with 200-250 mls of 100 μM BA in a 0.02% solution of the detergent Silwet L-77. Aerial tissues (everything above the soil line) are harvested within a 15 to 20 minute time period 1 hr and 6 hrs after treatment, flash-frozen in liquid nitrogen and stored at ⁻80° C.

[0910] Seeds of maize hybrid 35A (Pioneer) are sown in water-moistened sand in flats (10 rows, 5-6 seed/row) and covered with clear, plastic lids before being placed in a growth chamber having 16 hr light (25° C.)/8 hr dark (20° C.), 75% relative humidity and 13,000-14,000 LUX. Covered flats were watered every three days for 7 days. Seedlings are carefully removed from the sand and placed in 1-liter beakers with 100 μM BA for treatment. Control plants are treated with water. After 6 hr, aerial and root tissues are separated and flash frozen in liquid nitrogen prior to storage at ⁻80° C.

### (q) Diversity_Expt

[0911] Sterilized and wild-type Arabidopsis thaliana seeds (ecotype Wassilewskija) and wild-type Arabis holboellii seeds are sown in MS boxes (0.5% sucrose, 1.5% agar) after 3 day-cold treatment. The boxes are placed horizontally in a Percival growth chamber (16:8 light cycles, 22° C.) so that hypocotyls grow upward. The hypocotyls are harvested after 7d in the chamber, flash-frozen in liquid nitrogen and stored at −80° C.

### (r) DMT-II

[0912] Demeter (dmt) is a mutant of a methyl transferase gene and is similar to fie. Arabidopsis thaliana (ecotype Wassilewskija) seeds are vernalized at 4° C. for 3 days before sowing. Cauline leaves and closed flowers are isolated from 35S::DMT and dmt−/− plant lines, flash frozen in liquid nitrogen and stored at −80° C.

### (s) Drought Reproduction

[0913] Arabidopsis thaliana (ecotype Wassilewskija) seeds are kept at 4° C. in dark for three days and then sown in soil mix (Metromix 200) with a regular watering schedule (1.5-2 L per flat per week). Drought treatment by withholding water starts when plants are 30-days-old. The control samples are watered as before. Rosettes, flowers (with siliques less than 5 mm) and siliques (>5 mm) are harvested separately on day 5, 7 and 10 post-drought-treatment (PDT). By day 10 PDT, the majority of drought plants are wilted and unable to recover after re-watering and the experiment is terminated. The samples are harvested between 2-5 PM. Plants are grown in a walk-in growth chamber under these conditions: 16 h light/8 hr dark, 70% relative humidity, 20° C. light/18° C. dark for the first 10 days, and under 22° C. light/20° C. dark for the following days.

(t) Drought stress

[0914] Seeds of Arabidopsis thaliana (ecotype Wassilewskija) are sown in pots and left at 4° C. for three days to vernalize before being transferred to a growth chamber having 16 hr light/8 hr dark, 150,000-160,000 LUX, 20° C. and 70% humidity. After 14 days, aerial tissues are cut and left to dry on 3MM Whatman paper in a petri-plate for 1 hour and 6 hours. Aerial tissues exposed for 1 hour and 6 hours to 3 MM Whatman paper wetted with 1× Hoagland's solution serve as controls. Tissues are harvested, flash-frozen in liquid nitrogen and stored at −80° C.

[0915] Alternatively, Arabidopsis thaliana (ecotype Wassilewskija) seed is vernalized at 4° C. for 3 days before sowing in Metromix soil type 350. Flats are placed in a growth chamber with 23° C., 16 hr light/8 hr. dark, 80% relative humidity, ˜13,000 LUX for germination and growth. Plants are watered with 1-1.5 L of water every four days. Watering is stopped 16 days after germination for the treated samples, but continues for the control samples. Rosette leaves and stems, flowers and siliques are harvested 2 d, 3 d, 4 d, 5 d, 6 d and 7 d after watering is stopped. Tissue is flash frozen in liquid nitrogen and kept at ⁻80° C. until RNA is isolated. Flowers and siliques are also harvested on day 8 from plants that had undergone a 7 d drought treatment followed by 1 day of watering. Control plants (whole plants) are harvested after 5 weeks, flash frozen in liquid nitrogen and stored as above.

[0916] Seeds of maize hybrid 35A (Pioneer) are sown in water-moistened sand in flats (10 rows, 5-6 seed/row) and covered with clear, plastic lids before being placed in a growth chamber having 16 hr light (25° C.)/8 hr dark (20° C.), 75% relative humidity and 13,000-14,000 LUX. Covered flats are watered every three days for 7 days. Seedlings are carefully removed from the sand and placed in empty 1-liter beakers at room temperature for treatment. Control plants are placed in water. After 1 hr, 6 hr, 12 hr and 24 hr aerial and root tissues are separated and flash frozen in liquid nitrogen prior to storage at ⁻80° C.

### (u) Far-red-enriched-adult

[0917] Wildtype Arabidopsis thaliana (ecotype Columbia) seeds are planted on soil and vernalized for 4 days at 4° C. Soil sown plants are grown in a growth room (16 h light/8 h dark, 22° C.; 4 bulbs total alternating Gro-Lux and cool whites); light measurements are as follows: Red=330.9 μW/cm², Blue=267 μW/cm², Far Red=56.1 μW/cm². At 4 weeks after germination, the soil pots are transferred to shade environment (16 h light/8 h dark; Red=376 μW/cm², Blue=266 pW/cm², Far Red=552 tW/cm²) for various durations of exposure time (1, 4, 8, 16, 24, 48, and 72 hrs). After timed exposure, above ground tissue is flash frozen with liquid nitrogen and stored at −80° C. Control seedlings are not transferred, but are collected at the same time as corresponding shade-exposed experimental samples.

### (v) Far-Red-Induction

[0918] Seeds from wildtype Arabidopsis thaliana (ecotype Columbia) are vernalized in sterile water for 4 days at 4° C. prior to planting. Seeds are then sterilized and evenly planted on 0.5% sucrose MS media plates. Plates are sealed with Scotch micropore tape to allow for gas exchange and prevent contamination. Plates are grown in a growth room (16 h light/8 h dark, 22° C.; 6 bulbs total Gro-Lux); light measurements are as follows: Red=646.4 μW/cm², Blue=387 μW/cm², Far Red=158.7 μW/cm². At 7 days after germination, the plates containing the seedlings are transferred to Far Red light only (Far Red=525 μW/cm²) for various durations of exposure time (1, 4, 8, and 24 hrs). After timed exposure, tissue is flash frozen with liquid nitrogen and stored at −80° C. Control seedlings are not transferred, but are collected at same time as the corresponding far-red exposed experimental samples.

### (w) Far-Red-Induction-Adult

[0919] Wildtype Arabidopsis thaliana (ecotype Columbia) seeds are planted on soil and vernalized for 4 days at 4° C. Soil sown plants are grown in a growth room (16 h light/8 h dark, 22° C.; 4 bulbs total alternating Gro-Lux and cool whites); light measurements are as follows: Red=330.9 μW/cm², Blue=267 μW/cm², Far Red=56.1 μW/cm². At 4 weeks after germination, the soil pots are transferred to shade environment (16 h light/8 h dark; Red=376 μW/cm², Blue=266 μW/cm², Far Red=552 μW/cm²) for various durations of exposure time (1, 4, 8, 16, 24, 48, and 72 hrs). After timed exposure, above ground tissue is flash frozen with liquid nitrogen and stored at −80° C. Control seedlings are not transferred, but are collected at same time as the corresponding shade-exposed experimental samples.

(x) Flowers (green, white or buds)

[0920] Approximately 10 μl of Arabidopsis thaliana seeds (ecotype Wassilewskija) are sown on 350 soil (containing 0.03% marathon) and vernalized at 4 C for 3 days. Plants are then grown at room temperature under fluorescent lighting until flowering. Flowers are harvested after 28 days in three different categories. Buds that had not opened at all and are completely green are categorized as “flower buds” (also referred to as green buds by the investigator). Buds that had started to open, with white petals emerging slightly are categorized as “green flowers” (also referred to as white buds by the investigator). Flowers that are mostly opened (with no silique elongation) with white petals completely visible are categorized as “white flowers” (also referred to as open flowers by the investigator). Buds and flowers are harvested with forceps, flash frozen in liquid nitrogen and stored at ⁻80° C. until RNA is isolated.

### (y) Germination

[0921] Arabidopsis thaliana seeds (ecotype Wassilewskija) is sterilized in bleach and rinsed with sterile water. The seeds are placed in 100 mm petri plates containing soaked autoclaved filter paper. Plates are foil-wrapped and left at 4° C. for 3 nights to vernalize. After cold treatment, the foil is removed and plates are placed into a growth chamber having 16 hr light/8 hr dark cycles, 23° C., 70% relative humidity and ˜11,000 lux. Seeds are collected 1 d, 2 d, 3 d and 4 d later, flash frozen in liquid nitrogen and stored at −80° C. until RNA is isolated.

### (z) Gibberillic Acid (GA)

[0922] Seeds of Arabidopsis thaliana (ecotype Wassilewskija) are sown in trays and left at 4° C. for 4 days to vernalize. They are then transferred to a growth chamber having 16 hr light/8 hr. dark, 13,000 LUX, 70% humidity, 20° C. and watered twice a week with 1 L of 1× Hoagland's solution. Approximately 1,000 14 day old plants are sprayed with 200-250 mls of 100 μM gibberillic acid in a 0.02% solution of the detergent Silwet L-77. At 1 hr. and 6 hrs. after treatment, aerial tissues (everything above the soil line) are harvested within a 15 to 20 minute time period, flash-frozen in liquid nitrogen and stored at ⁻80° C.

[0923] Alternatively, seeds of Arabidopsis thaliana (ecotype Ws) are sown in Metro-mix soil type 350 and left at 4° C. for 3 days to vernalize. They are then transferred to a growth chamber having 16 hr light/8 hr dark, 13,000 LUX, 80% humidity, 20° C. temperature and watered every four days with 1.5 L water. Fourteen (14) days after germination, plants are sprayed with 100 μM gibberillic acid or with water. Aerial tissues are harvested 1 hr 6 hrs 12 hrs and 24 hrs post-treatment, flash frozen and stored at ⁻80° C.

[0924] Seeds of maize hybrid 35A (Pioneer) are sown in water-moistened sand in flats (10 rows, 5-6 seed/row) and covered with clear, plastic lids before being placed in a growth chamber having 16 hr light (25° C.)/8 hr dark (20° C.), 75% relative humidity and 13,000-14,000 LUX. Covered flats are watered every three days for 7 days. Seedlings are carefully removed from the sand and placed in 1-liter beakers with 100 μM gibberillic acid for treatment. Control plants are treated with water. After 1 hr, 6 hr and 12 hr, aerial and root tissues were separated and flash frozen in liquid nitrogen prior to storage at ⁻80° C.

### (aa) Guard Cells

[0925] Arabidopsis thaliana (ecotype Wassilewskija) seeds are vernalized at 4° C. for 3 days before sowing. Leaves are harvested, homogenized and centrifuged to isolate the guard cell containing fraction. Homogenate from leaves served as the control. Samples are flash frozen in liquid nitrogen and stored at −80° C. Identical experiments using leaf tissue from canola are performed.

### (bb) Heat Shock Treatment

[0926] Seeds of Arabidopsis thaliana (ecotype Wassilewskija) are sown in trays and left at 4° C. for three days to vernalize before being transferred to a growth chamber with 16 hr light/8 hr dark, 12,000-14,000 LUX, 70% humidity and 20° C., fourteen day old plants are transferred to a 42° C. growth chamber and aerial tissues are harvested 1 hr and 6 hr after transfer. Control plants are left at 20° C. and aerial tissues are harvested. Tissues are flash-frozen in liquid nitrogen and stored at ⁻80° C.

[0927] Seeds of maize hybrid 35A (Pioneer) are sown in water-moistened sand in flats (10 rows, 5-6 seed/row) and covered with clear, plastic lids before being placed in a growth chamber having 16 hr light (25° C.)/8 hr dark (20° C.), 75% relative humidity and 13,000-14,000 LUX. Covered flats are watered every three days for 7 days. Seedlings are carefully removed from the sand and placed in 1-liter beakers containing 42° C. water for treatment. Control plants are treated with water at 25° C. After 1 hr and 6 hr aerial and root tissues are separated and flash frozen in liquid nitrogen prior to storage at ⁻80° C.

### (cc) Herbicide Treatment

[0928] Arabidopsis thaliana (ecotype Wassilewskija) seeds are sterilized for 5 min. with 30% bleach, 50 μl Triton in a total volume of 50 ml. Seeds are vernalized at 4° C. for 3 days before being plated onto GM agar plates at a density of about 144 seeds per plate. Plates are incubated in a Percival growth chamber having 16 hr light/8 hr dark, 80% relative humidity, 22° C. and 11,000 LUX for 14 days.

[0929] Plates are sprayed (−0.5 mls/plate) with water, Finale (1.128 g/L), Glean (1.88 g/L), RoundUp (0.01 g/L) or Trimec (0.08 g/L). Tissue is collected and flash frozen in liquid nitrogen at the following time points: 0, 1, 2, 4, 8, 12, and 24 hours. Frozen tissue is stored at ⁻80° C. prior to RNA isolation.

### (dd) Imbibed Seed

[0930] Seeds of maize hybrid 35A (Pioneer) are sown in water-moistened sand in covered flats (10 rows, 5-6 seed/row) and covered with clear, plastic lids before being placed in a growth chamber having 16 hr light (25° C.)/8 hr dark (20° C.), 75% relative humidity and 13,000-14,000 LUX. One day after sowing, whole seeds are flash frozen in liquid nitrogen prior to storage at −80° C. Two days after sowing, embryos and endosperm are isolated and flash frozen in liquid nitrogen prior to storage at −80° C. On days 3-6, aerial tissues, roots and endosperm are isolated and flash frozen in liquid nitrogen prior to storage at ⁻80° C.

### (ee) Interploidy Crosses

[0931] Interploidy crosses involving a 6× parent are lethal. Crosses involving a 4× parent are complete and analyzed. The imbalance in the maternal/paternal ratio produced from the cross can lead to big seeds. Arabidopsis thaliana (ecotype Wassilewskija) seeds are vernalized at 4° C. for 3 days before sowing. Small siliques are harvested at 5 days after pollination, flash frozen in liquid nitrogen and stored at −80° C.

### (ff) Leaf Mutant 3642:

[0932] Mutant 3642 is a recessive mutation that causes abnormal leaf development. The leaves of mutant 3642 plants are characterized by leaf twisting and irregular leaf shape. Mutant 3642 plants also exhibit abnormally shaped floral organs which results in reduced fertility.

[0933] Seed segregating for the mutant phenotype are sown in Metro-mix 350 soil and grown in a Conviron growth chamber with watering by sub-irrigation twice a week. Environmental conditions are set at 20 degrees Celsius, 70% humidity with an 8 hour day, 16 hour night light regime. Plants are harvested after 4 weeks of growth and the entire aerial portion of the plant is harvested and immediately frozen in liquid nitrogen and stored at ⁻80° C. Mutant phenotype plants are harvested separately from normal phenotype plants, which serve as the control tissue.

### (gg) Line Comparisons

[0934] Alkaloid 35S over-expressing lines are used to monitor the expression levels of terpenoid/alkaloid biosynthetic and P450 genes to identify the transcriptional regulatory points in the biosynthesis pathway and the related P450 genes. Arabidopsis thaliana (ecotype Wassilewskija) seeds are vernalized at 4° C. for 3 days before sowing in vermiculite soil (Zonolite) supplemented by Hoagland solution. Flats are placed in Conviron growth chambers under long day conditions (16 hr light, 23° C./8 hr dark, 20° C.). Basta spray and selection of the overexpressing lines is conducted about 2 weeks after germination. Approximately 2-3 weeks after bolting (approximately 5-6 weeks after germination), aerial portions (e.g. stem and siliques) from the over-expressing lines and from wild-type plants are harvested, flash frozen in liquid nitrogen and stored at −80° C.

### (hh) Methyl Jasmonate (MeJ)

[0935] Seeds of Arabidopsis thaliana (ecotype Wassilewskija) are sown in trays and left at 4° C. for 4 days to vernalize before being transferred to a growth chamber having 16 hr light/8 hr. dark, 13,000 LUX, 70% humidity, 20° C. temperature and watered twice a week with 1 L of a 1× Hoagland's solution. Approximately 1,000 14 day old plants are sprayed with 200-250 mls of 0.001% methyl jasmonate in a 0.02% solution of the detergent Silwet L-77. At 1 hr and 6 hrs after treatment, whole seedlings, including roots, are harvested within a 15 to 20 minute time period, flash-frozen in liquid nitrogen and stored at ⁻80° C.

[0936] Seeds of maize hybrid 35A (Pioneer) are sown in water-moistened sand in flats (10 rows, 5-6 seed/row) and covered with clear, plastic lids before being placed in a growth chamber having 16 hr light (25° C.)/8 hr dark (20° C.), 75% relative humidity and 13,000-14,000 LUX. Covered flats are watered every three days for 7 days. Seedlings are carefully removed from the sand and placed in 1-liter beakers with 0.001% methyl jasmonate for treatment. Control plants are treated with water. After 24 hr, aerial and root tissues are separated and flash frozen in liquid nitrogen prior to storage at ⁻80° C.

### (ii) Nitric Oxide Treatment (Nanp)

[0937] Seeds of Arabidopsis thaliana (ecotype Wassilewskija) are sown in trays and left at 4° C. for three days to vernalize before being transferred to a growth chamber having 16 hr light/8 hr dark, 12,000-14,000 LUX, 20° C. and 70% humidity. Fourteen day old plants are sprayed with 5 mM sodium nitroprusside in a 0.02% Silwett L-77 solution. Control plants are sprayed with a 0.02% Silwett L-77 solution. Aerial tissues are harvested 1 hour and 6 hours after spraying, flash-frozen in liquid nitrogen and stored at ⁻80° C.

[0938] Seeds of maize hybrid 35A (Pioneer) are sown in water-moistened sand in flats (10 rows, 5-6 seed/row) and covered with clear, plastic lids before being placed in a growth chamber having 16 hr light (25° C.)/8 hr dark (20° C.), 75% relative humidity and 13,000-14,000 LUX. Covered flats are watered every three days for 7 days. Seedlings are carefully removed from the sand and placed in 1-liter beakers with 5 mM nitroprusside for treatment. Control plants are treated with water. After 1 hr, 6 hr and 12 hr, aerial and root tissues are separated and flash frozen in liquid nitrogen prior to storage at ⁻80° C.

### (jj) Nitrogen: Low to High

[0939] Arabidopsis thaliana (ecotype Wassilewskija) seeds are sown on flats containing 4 L of a 1:2 mixture of Grace Zonolite vermiculite and soil. Flats are watered with 3 L of water and vernalized at 4° C. for five days. Flats are placed in a Conviron growth chamber having 16 hr light/8 hr dark at 20° C., 80% humidity and 17,450 LUX. Flats are watered with approximately 1.5 L of water every four days. Mature, bolting plants (24 days after germination) are bottom treated with 2 L of either a control (100 mM mannitol pH 5.5) or an experimental (50 mM ammonium nitrate, pH 5.5) solution. Roots, leaves and siliques are harvested separately 30, 120 and 240 minutes after treatment, flash frozen in liquid nitrogen and stored at ⁻80° C.

[0940] Hybrid maize seed (Pioneer hybrid 35A19) are aerated overnight in deionized water. Thirty seeds are plated in each flat, which contained 4 liters of Grace zonolite vermiculite. Two liters of water are bottom fed and flats were kept in a Conviron growth chamber with 16 hr light/8 hr dark at 20° C. and 80% humidity. Flats are watered with 1 L of tap water every three days. Five day old seedlings are treated as described above with 2 L of either a control (100 mM mannitol pH 6.5) solution or 1 L of an experimental (50 mM ammonium nitrate, pH 6.8) solution. Fifteen shoots per time point per treatment are harvested 10, 90 and 180 minutes after treatment, flash frozen in liquid nitrogen and stored at ⁻80° C.

[0941] Alternatively, seeds of Arabidopsis thaliana (ecotype Wassilewskija) are left at 4° C. for 3 days to vernalize. They are then sown on vermiculite in a growth chamber having 16 hours light/8 hours dark, 12,000-14,000 LUX, 70% humidity, and 20° C. They are bottom-watered with tap water, twice weekly. Twenty-four days old plants are sprayed with either water (control) or 0.6% ammonium nitrate at 4 μL/cm² of tray surface. Total shoots and some primary roots are cleaned of vermiculite, flash-frozen in liquid nitrogen and stored at ⁻80° C.

### (kk) Nitrogen High to Low

[0942] Wild type Arabidopsis thaliana seeds (ecotype Wassilewskija) are surface sterilized with 30% Clorox, 0.1% Triton X-100 for 5 minutes. Seeds are then rinsed with 4-5 exchanges of sterile double distilled deionized water. Seeds are vernalized at 4° C. for 2-4 days in darkness. After cold treatment, seeds are plated on modified 1×MS media (without NH₄NO₃ or KNO₃), 0.5% sucrose, 0.5 g/L MES pH5.7, 1% phytagar and supplemented with KNO₃ to a final concentration of 60 mM (high nitrate modified 1×MS media). Plates are then grown for 7 days in a Percival growth chamber at 22° C. with 16 hr. light/8 hr dark.

[0943] Germinated seedlings are then transferred to a sterile flask containing 50 mL of high nitrate modified 1×MS liquid media. Seedlings are grown with mild shaking for 3 additional days at 22° C. in 16 hr. light/8 hr dark (in a Percival growth chamber) on the high nitrate modified 1×MS liquid media.

[0944] After three days of growth on high nitrate modified 1×MS liquid media, seedlings are transferred either to a new sterile flask containing 50 mL of high nitrate modified 1×MS liquid media or to low nitrate modified 1×MS liquid media (containing 20 μM KNO₃). Seedlings are grown in these media conditions with mild shaking at 22° C. in 16 hr light/8 hr dark for the appropriate time points and whole seedlings harvested for total RNA isolation via the Trizol method (LifeTech.). The time points used for the microarray experiments are 10 min. and 1 hour time points for both the high and low nitrate modified 1×MS media.

[0945] Alternatively, seeds that are surface sterilized in 30% bleach containing 0.1% Triton X-100 and further rinsed in sterile water, are planted on MS agar, (0.5% sucrose) plates containing 50 mM KNO₃ (potassium nitrate). The seedlings are grown under constant light (3500 LUX) at 22° C. After 12 days, seedlings are transferred to MS agar plates containing either 1 mM KNO₃ or 50 mM KNO₃. Seedlings transferred to agar plates containing 50 mM KNO₃ are treated as controls in the experiment. Seedlings transferred to plates with 1 mM KNO₃ are rinsed thoroughly with sterile MS solution containing 1 mM KNO₃. There are ten plates per transfer. Root tissue was collected and frozen in 15 mL Falcon tubes at various time points which included 1 hour, 2 hours, 3 hours, 4 hours, 6 hours, 9 hours, 12 hours, 16 hours, and 24 hours.

[0946] Maize 35A19 Pioneer hybrid seeds are sown on flats containing sand and grown in a Conviron growth chamber at 25° C., 16 hr light/8 hr dark, ˜13,000 LUX and 80% relative humidity. Plants are watered every three days with double distilled deionized water. Germinated seedlings are allowed to grow for 10 days and are watered with high nitrate modified 1×MS liquid media (see above). On day 11, young corn seedlings are removed from the sand (with their roots intact) and rinsed briefly in high nitrate modified 1× MS liquid media. The equivalent of half a flat of seedlings is then submerged (up to their roots) in a beaker containing either 500 mL of high or low nitrate modified 1×MS liquid media (see above for details).

[0947] At appropriate time points, seedlings are removed from their respective liquid media, the roots separated from the shoots and each tissue type flash frozen in liquid nitrogen and stored at ⁻80° C. This is repeated for each time point. Total RNA is isolated using the Trizol method (see above) with root tissues only.

[0948] Corn root tissues isolated at the 4 hr and 16 hr time points are used for the microarray experiments. Both the high and low nitrate modified 1×MS media are used.

### (11) Osmotic Stress (PEG)

[0949] Seeds of Arabidopsis thaliana (ecotype Wassilewskija) are sown in trays and left at 4° C. for three days to vernalize before being transferred to a growth chamber having 16 hr light/8 hr dark, 12,000-14,000 LUX, 20° C., and 70% humidity. After 14 days, the aerial tissues are cut and placed on 3 mM Whatman paper in a petri-plate wetted with 20% PEG (polyethylene glycol-Mᵣ 8,000) in 1× Hoagland's solution. Aerial tissues on 3 mM Whatman paper containing 1× Hoagland's solution alone serve as the control. Aerial tissues are harvested at 1 hour and 6 hours after treatment, flash-frozen in liquid nitrogen and stored at ⁻80° C.

[0950] Seeds of maize hybrid 35A (Pioneer) are sown in water-moistened sand in flats (10 rows, 5-6 seed/row) and covered with clear, plastic lids before being placed in a growth chamber having 16 hr light (25° C.)/8 hr dark (20° C.), 75% relative humidity and 13,000-14,000 LUX. Covered flats are watered every three days for 7 days. Seedlings are carefully removed from the sand and placed in 1-liter beakers with 20% PEG (polyethylene glycol-Mᵣ 8,000) for treatment. Control plants are treated with water. After 1 hr and 6 hr aerial and root tissues are separated and flash frozen in liquid nitrogen prior to storage at ⁻80° C.

[0951] Seeds of maize hybrid 35A (Pioneer) are sown in water-moistened sand in flats (10 rows, 5-6 seed/row) and covered with clear, plastic lids before being placed in a growth chamber having 16 hr light (25° C.)/8 hr dark (20° C.), 75% relative humidity and 13,000-14,000 LUX. Covered flats are watered every three days for 7 days. Seedlings are carefully removed from the sand and placed in 1-liter beakers with 150 mM NaCl for treatment. Control plants were treated with water. After 1 hr, 6 hr, and 24 hr aerial and root tissues are separated and flash frozen in liquid nitrogen prior to storage at ⁻80° C.

### (mm) Oxidative Stress-Hydrogen Peroxide Treatment (H₂O₂)

[0952] Seeds of Arabidopsis thaliana (ecotype Wassilewskija) are sown in trays and left at 4° C. for three days to vernalize before being transferred to a growth chamber having 16 hr light/8 hr dark, 12,000-14,000 LUX, 20° C. and 70% humidity. Fourteen day old plants are sprayed with 5 mM H₂O₂ (hydrogen peroxide) in a 0.02% Silwett L-77 solution. Control plants are sprayed with a 0.02% Silwett L-77 solution. Aerial tissues are harvested 1 hour and 6 hours after spraying, flash-frozen in liquid nitrogen and stored at ⁻80° C.

[0953] Seeds of maize hybrid 35A (Pioneer) are sown in water-moistened sand in flats (10 rows, 5-6 seed/row) and covered with clear, plastic lids before being placed in a growth chamber having 16 hr light (25° C.)/8 hr dark (20° C.), 75% relative humidity and 13,000-14,000 LUX. Covered flats are watered every three days for 7 days. Seedlings are carefully removed from the sand and placed in 1-liter beakers with 5 mM H₂O₂ for treatment. Control plants are treated with water. After 1 hr, 6 hr and 24 hr, aerial and root tissues are separated and flash frozen in liquid nitrogen prior to storage at ⁻80° C.

### (nn) Petals

[0954] Arabidopsis thaliana (ecotype Wassilewskija) seeds are vernalized at 4° C. for 3 days before sowing in flats containing vermiculite soil. Flats are watered placed at 20° C. in a Conviron growth chamber having 16 hr light/8 hr dark. Whole plants (used as the control) and petals from inflorescences 23-25 days after germination are harvested, flash frozen in liquid nitrogen and stored at −80° C.

### (oo) Pollen

[0955] Arabidopsis thaliana (ecotype Wassilewskija) seeds are vernalized at 4° C. for 3 days before sowing in flats containing vermiculite soil. Flats are watered and placed at 20° C. in a Conviron growth chamber having 16 hr light/8 hr dark. Whole plants (used as controls) and pollen from plants 38 dap is harvested, flash frozen in liquid nitrogen and stored at −80° C.

### (pp) Protein Degradation

[0956] Arabidopsis thaliana (ecotype Wassilewskija) wild-type and 13B12-1 (homozygous) mutant seed are sown in pots containing Metro-mix 350 soil and incubated at 4° C. for four days. Vernalized seeds are germinated in the greenhouse (16 hr light/8 hr dark) over a 7 day period. Mutant seedlings are sprayed with 0.02% (active ingredient) Finale to confirm their transgenic standing. Plants were grown until the mutant phenotype (either multiple pistils in a single flower and/or multiple branching per node) is apparent. Young inflorescences immediately forming from the multiple-branched stems are cut and flash frozen in liquid nitrogen. Young inflorescences from wild-type plants grown in parallel and under identical conditions are collected as controls. All collected tissue is stored at ⁻80° C. until RNA isolation.

### (qq) Roots

[0957] Seeds of Arabidopsis thaliana (ecotype Wassilewskija) are sterilized in full strength bleach for less than 5 min., washed more than 3 times in sterile distilled deionized water and plated on MS agar plates. The plates are placed at 4° C. for 3 nights and then placed vertically into a growth chamber having 16 hr light/8 hr dark cycles, 23° C., 70% relative humidity and ˜11,000 LUX. After 2 weeks, the roots are cut from the agar, flash frozen in liquid nitrogen and stored at −80° C.

### (rr) Root Hairless Mutants

[0958] Plants mutant at the rhl gene locus lack root hairs. This mutation is maintained as a heterozygote.

[0959] Seeds of Arabidopsis thaliana (ecotype Landsberg erecta) mutated at the rhl gene locus are sterilized using 30% bleach with 1 ul/ml 20% Triton-X 100 and then vernalized at 4° C. for 3 days before being plated onto GM agar plates. Plates are placed in growth chamber with 16 hr light/8 hr. dark, 23° C., 14,500-15,900 LUX, and 70% relative humidity for germination and growth.

[0960] After 7 days, seedlings are inspected for root hairs using a dissecting microscope. Mutants are harvested and the cotyledons removed so that only root tissue remained. Tissue is then flash frozen in liquid nitrogen and stored at ⁻80 C.

[0961] Arabidopsis thaliana (Landsberg erecta) seedlings grown and prepared as above are used as controls.

[0962] Alternatively, seeds of Arabidopsis thaliana (ecotype Landsberg erecta), heterozygous for the rhl1 (root hairless) mutation, are surface-sterilized in 30% bleach containing 0.1% Triton X-100 and further rinsed in sterile water. They are then vernalized at 4° C. for 4 days before being plated onto MS agar plates. The plates are maintained in a growth chamber at 24° C. with 16 hr light/8 hr dark for germination and growth. After 10 days, seedling roots that expressed the phenotype (i.e. lacking root hairs) are cut below the hypocotyl junction, frozen in liquid nitrogen and stored at −80° C. Those seedlings with the normal root phenotype (heterozygous or wt) are collected as described for the mutant and used as controls.

(ss) Root tips

[0963] Seeds of Arabidopsis thaliana (ecotype Wassilewskija) are placed on MS plates and vernalized at 4° C. for 3 days before being placed in a 25° C. growth chamber having 16 hr light/8 hr dark, 70% relative humidty and about 3 W/m². After 6 days, young seedlings are transferred to flasks containing B5 liquid medium, 1% sucrose and 0.05 mg/l indole-3-butyric acid. Flasks are incubated at room temperature with 100 rpm agitation. Media is replaced weekly. After three weeks, roots are harvested and incubated for 1 hr with 2% pectinase, 0.2% cellulase, pH 7 before straining through a #80 (Sigma) sieve. The root body material remaining on the sieve (used as the control) is flash frozen and stored at −80° C. until use. The material that passes through the #80 sieve is strained through a #200 (Sigma) sieve and the material remaining on the sieve (root tips) is flash frozen and stored at ⁻80° C. until use. Approximately 10 mg of root tips are collected from one flask of root culture.

[0964] Seeds of maize hybrid 35A (Pioneer) are sown in water-moistened sand in flats (10 rows, 5-6 seed/row) and covered with clear, plastic lids before being placed in a growth chamber having 16 hr light (25° C.)/8 hr dark (20° C.), 75% relative humidity and 13,000-14,000 LUX. Covered flats are watered every three days for 8 days. Seedlings are carefully removed from the sand and the root tips (˜2 mm long) are removed and flash frozen in liquid nitrogen prior to storage at ⁻80° C. The tissues above the root tips (˜1 cm long) are cut, treated as above and used as control tissue.

### (tt) Rosette Leaves, Stems, and Siliques

[0965] Arabidopsis thaliana (ecotype Wassilewskija) seed was vernalized at 4° C. for 3 days before sowing in Metro-mix soil type 350. Flats are placed in a growth chamber having 16 hr light/8 hr dark, 80% relative humidity, 23° C. and 13,000 LUX for germination and growth. After 3 weeks, rosette leaves, stems, and siliques are harvested, flash frozen in liquid nitrogen and stored at −80° C. until use. After 4 weeks, siliques (<5 mm, 5-10 mm and >10 mm) are harvested, flash frozen in liquid nitrogen and stored at −80° C. until use. Five week old whole plants (used as controls) are harvested, flash frozen in liquid nitrogen and kept at ⁻80° C. until RNA is isolated.

(uu) Rough Sheath2-R (rs2-R) Mutants (1400-6/S-17)

[0966] This experiment is conducted to identify abnormally expressed genes in the shoot apex of rough sheath2-R (rs2-R) mutant plants. rs2 encodes a myb domain DNA binding protein that functions in repression of several shoot apical meristem expressed homeobox genes. Two homeobox gene targets are known for rs2 repression, rough sheath1, liguleless 3. The recessive loss of function phenotype of rs2-R homozygous plants is described in Schneeberger et al. 1998, Development 125: 2857-2865.

[0967] The seed stock genetically segregates 1:1 for rs2-R/rs2-R: rs2-R/+

[0968] Preparation of tissue samples: 160 seedlings pooled from 2 and 3 week old plants grown in sand. Growth conditions; Conviron #107 at 12 hr days/12 hr night, 25° C., 75% humidity. Shoot apex was dissected to include leaf three and older.

[0969] 1) rough sheath2-R homozygous (mutant) shoot apex

[0970] 2) rough sheath2-R heterozygous (wild-type, control) shoot apex.

(vv) rt1

[0971] The rt1 allele is a variation of rt1 rootless1 and is recessive. Plants displaying the rt1 phenotype have few or no secondary roots.

[0972] Seed from plants segregating for rt1 are sown on sand and placed in a growth chamber having 16 hr light/8 hr dark, 13,000 LUX, 70% humidity and 20° C. temperature. Plants are watered every three days with tap water. Eleven (11) day old seedlings are carefully removed from the sand, keeping the roots intact. rt1-type seedlings are separated from their wild-type counterparts and the root tissue isolated. Root tissue from normal seedlings (control) and rt1 mutants is flash frozen in liquid nitrogen and stored at ⁻80° C. until use.

### (ww) S4 Immature Buds, Inflorescence Meristem

[0973] Seeds of Arabidopsis thaliana (ecotype Wassilewskija) are sown in pots and left at 4° C. for two to three days to vernalize. They are then transferred to a growth chamber. Plants are grown under long-day (16 hr light: 8 hr dark) conditions, 7000-8000 LUX light intensity, 70% humidity, and 22° C. temperature. Inflorescences containing immature floral buds [stages 1-12; Smyth et al., 1990] as well as the inflorescence meristem are harvested and flash frozen in liquid nitrogen

### (xx) S5 Flowers (Opened)

[0974] Seeds of Arabidopsis thaliana (ecotype Wassilewskija) are sown in pots and left at 4° C. for two to three days to vernalize. They are then transferred to a growth chamber. Plants are grown under long-day (16 hr light: 8 hr dark) conditions, 7000-8000 LUX light intensity, 70% humidity, and 22° C. temperature. Mature, unpollinated flowers [stages 12-14; Smyth et al. 1990] are harvested and flash frozen in liquid nitrogen.

### (yy) S6 Siliques (All Stages)

[0975] Seeds of Arabidopsis thaliana (ecotype Wassilewskija) are sown in pots and left at 4° C. for two to three days to vernalize. They are then transferred to a growth chamber. Plants are grown under long-day (16 hr light: 8 hr dark) conditions, 7000-8000 LUX light intensity, 70% humidity, and 22° C. temperature. Siliques bearing developing seeds containing post fertilization through pre-heart stage [0-72 hours after fertilization (HAF)], heart-through early curled cotyledon stage [72-120 HAF] and late-curled cotyledon stage [>120 HAF] embryos are harvested separately and pooled prior to RNA isolation in a mass ratio of 1:1:1. The tissues are then flash frozen in liquid nitrogen. Bowman (1994) reviews and provides a description of the stages of Arabidopsis embryogenesis used.

### (zz) Salicylic Acid (Sa)

[0976] Seeds of Arabidopsis thaliana (ecotype Wassilewskija) are sown in trays and left at 4° C. for 4 days to vernalize before being transferred to a growth chamber having 16 hr light/8 hr. dark, 13,000 LUX, 70% humidity, 20° C. temperature and watered twice a week with 1 L of a 1× Hoagland's solution. Approximately 1,000 14 day old plants are sprayed with 200-250 mls of 5 mM salicylic acid (solubilized in 70% ethanol) in a 0.02% solution of the detergent Silwet L-77. At 1 hr and 6 hrs after treatment, whole seedlings, including roots, are harvested within a 15 to 20 minute time period flash-frozen in liquid nitrogen and stored at ⁻80° C.

[0977] Alternatively, seeds of wild-type Arabidopsis thaliana (ecotype Columbia) and mutant CS3726 are sown in soil type 200 mixed with osmocote fertilizer and Marathon insecticide and left at 4° C. for 3 days to vernalize. Flats are incubated at room temperature with continuous light. Sixteen days post germination plants are sprayed with 2 mM SA, 0.02% SilwettL-77 or control solution (0.02% SilwettL-77. Aerial parts or flowers were harvested 1 hr, 4 hr, 6 hr, 24 hr and 3 weeks post-treatment flash frozen and stored at −80° C.

[0978] Seeds of maize hybrid 35A (Pioneer) are sown in water-moistened sand in flats (10 rows, 5-6 seed/row) and covered with clear, plastic lids before being placed in a growth chamber having 16 hr light (25° C.)/8 hr dark (20° C.), 75% relative humidity and 13,000-14,000 LUX. Covered flats are watered every three days for 7 days. Seedlings are carefully removed from the sand and placed in 1-liter beakers with 2 mM SA for treatment. Control plants are treated with water. After 12 hr and 24 hr, aerial and root tissues are separated and flash frozen in liquid nitrogen prior to storage at ⁻80° C.

(aaa) Salt

[0979] Arabidopsis thaliana (ecotype Wassilewskija) seeds are vernalized at 4° C. for 3 days before sowing in flats containing vermiculite soil. Flats are placed at 20° C. in a conviron growth chamber having 16 hr light/8 hr dark. Whole plants (used as controls) receive water. Other plants are treated with 100 mm nacl. After 6 hr and 72 hr, aerial and root tissues are harvested and flash frozen in liquid nitrogen prior to storage at −80° C.

(bbb) Shoots

[0980] Sterilized wild-type Arabidopsis thaliana seeds (ecotype Wassilewskija) are sown on MS plates (0.5% sucrose, 1.5% agar) after 3 day-cold treatment. The plates are placed vertically in a Percival growth chamber (16:8 light cycles, 22° C.) so that roots grow vertically on the agar surface. The shoots or aerials, harvested after 7d- and 14d-growth in the chamber, are used as the experimental samples. The control sample is derived from tissues harvested from 3 week-old plants that are grown in soil in a Conviron chamber (16:8 light cycles, 22° C.), including rosettes, roots, stems, flowers, and siliques.

(ccc) Shoot Apical Meristem (stm)

[0981] Arabidopsis thaliana (ecotype Landsberg erecta) plants mutant at the stm gene locus lack shoot meristems, produce aerial rosettes, have a reduced number of flowers per inflorescence, as well as a reduced number of petals, stamens and carpels, and is female sterile. This mutation is maintained as a heterozygote.

[0982] Seeds of Arabidopsis thaliana (ecotype Landsberg erecta) mutated at the stm locus are sterilized using 30% bleach with 1 ul/ml 20% Triton-X100. The seeds are vernalized at 4° C. for 3 days before being plated onto GM agar plates. Half are then put into a 22° C., 24 hr light growth chamber and half in a 24° C. 16 hr light/8 hr dark growth chamber having 14,500-15,900 LUX, and 70% relative humidity for germination and growth.

[0983] After 7 days, seedlings are examined for leaf primordia using a dissecting microscope. Presence of leaf primordia indicated a wild type phenotype. Mutants are selected based on lack of leaf primordia. Mutants are then harvested and hypocotyls removed leaving only tissue in the shoot region. Tissue is then flash frozen in liquid nitrogen and stored at −80° C.

[0984] Control tissue is isolated from 5 day old Landsberg erecta seedlings grown in the same manner as above. Tissue from the shoot region is harvested in the same manner as the stm tissue, but only contains material from the 24° C., 16 hr light/8 hr dark long day cycle growth chamber.

[0985] Seeds of maize hybrid 35A (Pioneer) are sown in water-moistened sand in flats (10 rows, 5-6 seed/row) and covered with clear, plastic lids before being placed in a growth chamber having 16 hr light (25° C.)/8 hr dark (20° C.), 75% relative humidity and 13,000-14,000 LUX. Covered flats are watered every three days for 8 days. Seedlings are carefully removed from the sand and the outer layers of leaf shealth removed. About 2 mm sections are cut and flash frozen in liquid nitrogen prior to storage at ⁻80° C. The tissues above the shoot apices (˜1 cm long) are cut, treated as above and used as control tissue.

(ddd) Siliques

[0986] Wild type Arabidopsis thaliana (ecotype Wassilewskija) seeds are sown in moistened soil mix, metromix 200 with osmocote, and stratified at 4° C. for 3 days in dark. Flats are placed in a Conviron growth chamber maintained at 16 h light (22° C.), 8 h dark (20° C.) and 70% humidity. After 3 weeks, siliques (<5 mm long) are collected in liquid nitrogen. The control samples are 3-week old whole plants (including all tissue types) grown in the same Conviron growth chamber.

(eee) Trichomes

[0987] Arabidopsis thaliana (Colombia glabrous) inflorescences are used as a control and CS8143 (hairy inflorescence ecotype) inflorescences, having increased trichomes, are used as the experimental sample.

[0988] Approximately 10 μl of each type of seed is sown on a flat of 350 soil (containing 0.03% marathon) and vernalized at 4° C. for 3 days. Plants are then grown at room temperature under florescent lighting. Young inflorescences are collected at 30 days for the control plants and 37 days for the experimental plants. Each inflorescence is cut into one-half inch (½″) pieces, flash frozen in liquid nitrogen and stored at −80° C. until RNA is isolated.

(fff) Wounding

[0989] Seeds of Arabidopsis thaliana (Wassilewskija) are sown in trays and left at 4° C. for three days to vernalize before being transferred to a growth chamber having 16 hr light/8 hr dark, 12,000-14,000 LUX, 70% humidity and 20° C. After 14 days, the leaves are wounded with forceps. Aerial tissues are harvested 1 hour and 6 hours after wounding. Aerial tissues from unwounded plants serve as controls. Tissues are flash-frozen in liquid nitrogen and stored at ⁻80° C.

[0990] Seeds of maize hybrid 35A (Pioneer) are sown in water-moistened sand in flats (10 rows, 5-6 seed/row) and covered with clear, plastic lids before being placed in a growth chamber having 16 hr light (25° C.)/8 hr dark (20° C.), 75% relative humidity and 13,000-14,000 LUX. Covered flats are watered every three days for 7 days. Seedlings are wounded (one leaf nicked by scissors) and placed in 1-liter beakers of water for treatment. Control plants are treated not wounded. After 1 hr and 6 hr aerial and root tissues are separated and flash frozen in liquid nitrogen prior to storage at ⁻80° C.

(ggg) 3642-1

[0991] 3642-1 is a T-DNA mutant that affects leaf development. This mutant segregates 3:1, wild-type:mutant. Arabidopsis thaliana 3642-1 mutant seeds are vernalized at 4° C. for 3 days before sowing in flats of MetroMix 200. Flats are placed in the greenhouse, watered and grown to the 8 leaf, pre-flower stage. Stems and rosette leaves are harvested from the mutants and the wild-type segregants, flash frozen and stored at −80° C.

### 2. Microarray Hybridization Procedures

[0992] Microarray technology provides the ability to monitor mRNA transcript levels of thousands of genes in a single experiment. These experiments simultaneously hybridize two differentially labeled fluorescent cDNA pools to glass slides that have been previously spotted with cDNA clones of the same species. Each arrayed cDNA spot will have a corresponding ratio of fluorescence that represents the level of disparity between the respective mRNA species in the two sample pools. Thousands of polynucleotides can be spotted on one slide, and each experiment generates a global expression pattern.

[0993] The microarray consists of a chemically coated microscope slide, referred herein as a “chip” with numerous polynucleotide samples arrayed at a high density. The poly-L-lysine coating allows for this spotting at high density by providing a hydrophobic surface, reducing the spreading of spots of DNA solution arrayed on the slides. Glass microscope slides (Gold Seal #3010 manufactured by Gold Seal Products, Portsmouth, N.H., USA) are coated with a 0.1% W/V solution of Poly-L-lysine (Sigma, St. Louis, Mo.).

[0994] Polynucleotides are amplified from Arabidopsis cDNA clones using insert specific probes. The resulting 100 uL PCR reactions are purified and PCR products from cDNA clones are spotted onto the poly-L-Lysine coated glass slides using an arrangement of quill-tip pins (ChipMaker 3 spotting pins; Telechem, International, Inc., Sunnyvale, Calif., USA) and a robotic arrayer (PixSys 3500, Cartesian Technologies, Irvine, Calif., USA). Slides containing maize sequences are purchased from Agilent Technology (Palo Alto, Calif. 94304).

[0995] After arraying, slides are processed through a series of steps—rehydration, UV cross-linking, blocking and denaturation-required prior to hybridization. Slides are rehydrated by placing them over a beaker of warm water (DNA face down), for 2-3 sec, to distribute the DNA more evenly within the spots, and then snap dried on a hot plate (DNA side, face up). The DNA is then cross-linked to the slides by UV irradiation (60-65 mJ; 2400 Stratalinker, Stratagene, La Jolla, Calif., USA).

[0996] The Hybridization process begins with the isolation of mRNA from the two tissues (see “Isolation of total RNA” and “Isolation of mRNA”, below) in question followed by their conversion to single stranded cDNA (see “Generation of probes for hybridization”, below). The cDNA from each tissue is independently labeled with a different fluorescent dye and then both samples are pooled together. This final differentially labeled cDNA pool is then placed on a processed microarray and allowed to hybridize (see “Hybridization and ish conditions”, below).

[0997] mRNA is isolated using the Qiagen Oligotex mRNA Spin-Column protocol (Qiagen, Valencia, California) or using the Stratagene Poly(A) Quik mRNA Isolation Kit (Startagene, La Jolla, Calif.).

[0998] Plasmid DNA is isolated from the following yeast clones using Qiagen filtered maxiprep kits (Qiagen, Valencia, Calif.): YAL022c(Fun26), YAL031c(Fun21), YBRO32w, YDL131w, YDL182w, YDL194w, YDL196w, YDR050c and YDR116c. Plasmid DNA is linearized with either BsrBI (YAL022c(Fun26), YAL031c(Fun21), YDL131w, YDL182w, YDL194w, YDL196w, YDR050c) or AflIII (YBRO32w, YDR116c) and isolated.

### Generation of Probes for Hybridization

[0999] Generation of Labeled Probes for Hybridization from First-Strand cDNA

[1000] Hybridization probes are generated from isolated mRNA using an Atlas™ Glass Fluorescent Labeling Kit (Clontech Laboratories, Inc., Palo Alto, Calif., USA). This entails a two step labeling procedure that first incorporates primary aliphatic amino groups during cDNA synthesis and then couples fluorescent dye to the cDNA by reaction with the amino functional groups.

[1001] The probe is purified using a Qiagen PCR cleanup kit (Qiagen, Valencia, Calif., USA), and eluted with 100 ul EB (kit provided). The sample is loaded on a Microcon YM-30 (Millipore, Bedford, Mass., USA) spin column and concentrated to 4-5 ul in volume.

[1002] Probes for the maize microarrays are generated using the Fluorescent Linear Amplification Kit (cat. No. G2556A) from Agilent Technologies (Palo Alto, Calif.).

[1003] Maize microarrays are hybridized according to the instructions included Fluorescent Linear Amplification Kit (cat. No. G2556A) from Agilent Technologies (Palo Alto, Calif.).

[1004] The chips are scanned using a ScanArray 3000 or 5000 (General Scanning, Watertown, Mass., USA). The chips are scanned at 543 and 633 nm, at 10 um resolution to measure the intensity of the two fluorescent dyes incorporated into the samples hybridized to the chips.

[1005] The images generated by scanning slides consisted of two 16-bit TIFF images representing the fluorescent emissions of the two samples at each arrayed spot. These images are then quantified and processed for expression analysis using the data extraction software Imagene™ (Biodiscovery, Los Angeles, Calif., USA). Imagene output is subsequently analyzed using the analysis program Genespring™ (Silicon Genetics, San Carlos, Calif., USA). In Genespring, the data is imported using median pixel intensity measurements derived from Imagene output. Background subtraction, ratio calculation and normalization are all conducted in Genespring. Normalization is achieved by breaking the data in to 32 groups, each of which represented one of the 32 pin printing regions on the microarray. Groups consist of 360 to 550 spots. Each group is independently normalized by setting the median of ratios to one and multiplying ratios by the appropriate factor.

### Example 6

### Phenotype Screens and Results

### A: Triparental Mating and Vacuum Infiltration Transformation of Plants

[1006] Standard laboratory techniques are as described in Sambrook et al. (1989) unless otherwise stated. Single colonies of Agrobacterium C58 C1Rif, E. coli helper strain HB101 and the E. coli strain containing the transformation construct to be mobilized into Agrobacterium areseparately inoculated into appropriate growth media and stationary cultures produced. 100 μl of each of the three cultures are mixed gently, plated on YEB (5 g Gibco beef extract, 1 g Bacto yeast extract, 1 g Bacto peptone, 5 g sucrose, pH 7.4) solid growth media and incubated overnight at 28° C. The bacteria from the triparental mating are collected in 2 ml of lambda buffer (20 mM Tris (pH 7.5), 100 mM NaCl, 10 mM MgCl₂) and serial dilutions made. An aliquot of the each dilution is then plated and incubated for 2 days at 28° C. on YEB plates supplemented with 100 μg/ml rifampicin and 100 μg/ml carbenicillin for calculation of the number of acceptor cells and on YEB plates supplemented with 100 μg/ml rifampicin, 100 μg/ml carbenicillin and 100 μg/ml spectinomycin for selection of transconjugant cells. The cointegrate structure of purified transconjugants is verified via Southern blot hybridization.

[1007] A transconjugant culture is prepared for vacuum infiltration by innoculating 1 ml of a stationary culture arising from a single colony into liquid YEB media and incubating at 28° C. for approximately 20 hours with shaking (220 rpm) until the OD taken at 600 nm was 0.8-1.0. The culture is then pelleted (8000 rpm, 10 min, 4° C. in a Sorvall SLA 3000 rotor) and the bacteria resuspended in infiltration medium (0.5×MS salts, 5% w/v sucrose, 10 μg/1 BAP, 200 μl/l Silwet L-77, pH 5.8) to a final OD₆₀₀ of 1.0. This prepared transconjugant culture is used within 20 minutes of preparation.

[1008] Wild-type plants for vacuum infiltration are grown in 4-inch pots containing Metromix 200 and Osmocote. Briefly, seeds of Arabidopsis thaliana (ecotype Wassilewskija) are sown in pots and left at 4° C. for two to four days to vernalize. They are then transferred to 22-25° C. and grown under long-day (16 hr light: 8 hr dark) conditions, sub-irrigated with water. After bolting, the primary inflorescence is removed and, after four to eight days, the pots containing the plants are inverted in the vacuum chamber to submerge all of the plants in the prepared transconjugant culture. Vacuum is drawn for two minutes before pots are removed, covered with plastic wrap and incubated in a cool room under darkness or very low light for one to two days. The plastic wrap is then removed, the plants returned to their previous growing conditions and subsequently produced (T1) seed collected.

### B: Selection of T-DNA Insertion Lines

[1009] Approximately 10,750 seeds from the initial vacuum infiltrated plants are sown per flat of Metromix 350 soil. Flats are vernalized for four to five days at 4° C. before being transferred to 22-25° C. and grown under long-day (16 hr light: 8 hr dark) conditions, sub-irrigated with water. Approximately seven to ten days after germination, the (T1) seedlings are sprayed with 0.02% Finale herbicide (AgrEvo). After another five to seven days, herbicide treatment is repeated. Herbicide resistant T1 plants are allowed to self-pollinate and T2 seed are collected from each individual. In the few cases where the T1 plant produced few seed, the T2 seed is planted in bulk, the T2 plants allowed to self-pollinate and T3 seed collected.

### C: Phenotype Screening

[1010] Approximately 40 seed from each T2 (or T3) line are planted in a 4-inch pot containing either Sunshine mix or Metromix 350 soil. Pots are vernalized for four to five days at 4° C. before being transferred to 22-25° C. and grown under long-day (16 hr light: 8 hr dark) conditions, sub-irrigated with water. A first phenotype screen is conducted by visually inspecting the seedlings five to seven days after germination and aberrant phenotypes noted. Plants are then sprayed with Finale herbicide within four days (i.e. about seven to nine days after germination). The second visual screen is conducted on surviving T2 (or T3) plants about sixteen to seventeen days after germination and the final screen was conducted after the plants have bolted and formed siliques. Here, the third and fourth green siliques are collected and aberrant phenotypes noted. The Knock-in Table contains descriptions of identified phenotypes.

[1011] Alternatively, seed are surface sterilized and transferred to agar solidified medium containing Murashige and Skoog salts (1×), 1% sucrose (wt/v) pH 5.7 before autoclaving. Seed re cold treated for 48 hours and transferred to long days [16 hours light and 8 hours dark], 25° C. Plants are screened at 5 and 10 days.

[1012] In another screen, seed are surface sterilized and transferred to agar solidified medium containing Murashige and Skoog salts (1×), and combinations of various nitrogen and sucrose amounts as specified below::

[1013] Medium 1: no sucrose, 20.6 mM NH₄NO₃, 18.8 mM KNO₃;

[1014] Medium 2: 0.5% sucrose, 20.6 mM NH₄NO₃, 18.8 mM KNO₃;

[1015] Medium 3: 3% sucrose, 20.6 mM NH₄NO₃, 18.8 mM KNO₃;

[1016] Medium 4: no sucrose, 20.6 μM NH₄NO₃, 18.8 μM KNO₃;

[1017] Medium 5: 0.5% sucrose, 20.6 μM NH₄NO₃, 18.8 μM KNO₃; and

[1018] Medium 6: 3% sucrose, 20.6 μM NH₄NO₃, 18.8 μM KNO₃.

The 0.5% sucrose is the control concentration for the sucrose. The low nitrogene, 20.6 μM NH₄NO₃, 18.8 μM KNO₃, is the control for the nitrogen. Seed are cold treated for 48 hours and transferred to long days [16 hours light and 8 hours dark], 25° C. Plants are screened at 2, 5, and 10 days.

### D: TAIL-PCR and Fragment Sequencing

[1019] Rosette leaves are collected from each putative mutant and crushed between parafilm and FTA paper (Life Technologies). Two 2 mm² hole punches are isolated from each FTA sample and washed according to the manufacturer's instructions by vortexing with 200 ul of the provided FTA purification reagent. The FTA reagent is removed and the washing procedure repeated two more times. The sample is then washed twice with 200 ul of FTA TE (10 mM Tris, 0.1 mM EDTA, pH 8.0) and vortexing prior to PCR.

Primers used for TAIL-PCR are as follows:

| | |
|---|---|
| AD2: | 5′ NGTCGASWGANAWGAA 3′ (128-fold degeneracy) |
| | S = G or C, W = A or T, and N = A, G, C, or T |
| LB1: | 5′ GTTTAACTGCGGCTCAACTGTCT 3′ |
| LB2: | 5′ CCCATAGACCCTTACCGCTTTAGTT 3′ |
| LB3: | 5′ GAAAGAAAAAGAGGTATAACTGGTA 3′ |

[1020] The extent to which the left and right borders of the T-DNA insert are intact is measured for each line by PCR. The following components are mixed for PCR: 1 2 mm² FTA sample, 38.75 μl distilled water, 5 μl 10× Platinum PCR buffer (Life Technologies), 2 μl 50 mM MgCl₂, 1 μl 10 mM dNTPs, 1 μl 10 μM primer LB1 (or RB1 for analysis of the right border), 1 μl 10 μM primer LB3R (or RB3R for analysis of the right border) and 1.25 U Platinum Taq (Life Technologies). Cycling conditions are: 94° C., 10 sec.; thirty cycles of 94° C., 1 sec.-54° C., 1 sec.—72° C., 1 sec.; 72° C., 4 sec. The expected band size for an intact left border is bp, while an intact right border generates a by band.

[1021] Fragments containing left or right border T-DNA sequence and adjacent genomic DNA sequence are obtained via PCR. First product PCR reactions use the following reaction mixture: 1 2 mm² FTA sample, 12.44 μl distilled water, 2 μl 10× Platinum PCR buffer (Life Technologies), 0.6 μl 50 mM MgCl₂, 0.4 μl 10 mM dNTPs, 0.4 μl 10 μM primer LB1 (or RB1 for analysis of the right border), 3 μl 20 μM primer AD2 and 0.8 U Platinum Taq (Life Technologies). Cycling conditions for these reactions are: 93° C., 1 min.; 95° C., 1 min.; three cycles of 94° C., 45 sec.—62° C., 1 min.—72° C., 2.5 min.; 94° C., 45 sec.; 25° C., 3 min.; ramp to 72° C. in 3 min.; 72° C., 2.5 min.; fourteen cycles of 94° C., 20 sec.—68° C., 1 min.—72° C., 2.5 min.-94° C., 20 sec.; —68° C., 1 min.—72° C., 2.5 min.-94° C., 20 sec.-44° C., 1 min.-72° C., 2.5 min.; 72° C., 5 min.; end; ˜4.5 hrs. For second product PCR reactions 1 μl of a 1:50 dilution of the first PCR product reaction is mixed with 13.44 μl distilled water, 2 μl 10× Platinum PCR buffer (Life Technologies), 0.6 μl 50 mM MgCl₂, 0.4 p. 1 10 mM dNTPs, 0.4 μl 10 μM primer LB2 (or RB2 for analysis of the right border), 2 μl 20 μM primer AD2 and 0.8 U Platinum Taq (Life Technologies). Second product cycling conditions are: eleven cycles of 94° C., 20 sec.—64° C., 1 min.—72° C., 2.5 min.—94° C., 20 sec.—64° C., 1 min.-72° C., 2.5 min.—94° C., 20 sec.—44° C., 1 min.; 72° C., 5 min.; end; ˜3 hrs. Third product PCR reactions were prepared by first diluting 2 p. 1 of the second PCR product with 98 μl of distilled water and then adding 1 μl of the dilution to 13.44 μl distilled water, 2 μl 10× Platinum PCR buffer (Life Technologies), 0.6 μl 50 mM MgCl₂, 0.4 μl 10 mM dNTPs, 0.4 μl 10 μM primer LB3 (or RB3 for analysis of the right border), 2 μl 20 μM primer AD2 and 0.8 U Platinum Taq (Life Technologies). Third product cycling conditions are: twenty cycles of 94° C., 38 sec.—44° C., 1 min.—72° C., 2.5 min.; 72° C., 5 min.; end; ˜2 hrs. Aliquots of the first, second and third PCR products are electrophoresed on 1% TAE (40 mM Tris-acetate, 1 mM EDTA) to determine their size.

[1022] Reactions are purified prior to sequencing by conducting a final PCR reaction. Here, 0.25 μl Platinum PCR Buffer (Life Technologies), 0.1 μl 50 mM MgCl₂, 3.3 U SAP shrimp alkaline phosphatase, 0.33 U Exonuclease and 1.781 μl distilled water are added to a 5 μl third product and the reaction cycled at 37° C., 30 min.; 80° C., 10 min.; 4° C. indefinitely.

[1023] Di-deoxy “Big Dye” sequencing is conducted on Perkin-Elmer 3700 or 377 machines.

### Knock-in Experiments

[1024] For the following examples, a two-component system is constructed in a plant to ectopically express the desired cDNA.

[1025] First, a plant is generated by inserting a sequence encoding a transcriptional activator downstream of a desired promoter, thereby creating a first component where the desired promoter facilitates expression of the activator generated a plant. The first component is also referred to as the activator line.

[1026] Next, the second component is constructed by linking a desired cDNA to a sequence that the transcriptional activator binds to and facilitate expression of the desired cDNA. The second component is inserted into the activator line by transformation. Alternatively, the second component is inserted into a separate plant, also referred to as the target line. Then, the target and activator lines are crossed to generate progeny that have both components.

[1027] Two component lines are generated by both means.

Part I—From crosses

[1028] Target lines containing cDNA constructs are generated using the Agrobacterium-mediated transformation. Selected target lines are genetically crossed to activation lines (or promoter lines). Generally, the promoter lines used are as described above. Evaluation of phenotypes is done on the resulting F1 progenies.

### Part II—From Type I Supertransformation

[1029] Promoter activation lines (generally Vascular/Ovule/Young Seed/Embryo line, Seed/Epidermis/Ovary/Fruit line, Roots/Shoots/Ovule line, and Vasculature/Meristem are transformed with cDNA constructs using the Agrobacterium mediated transformation. Selected transformants (and their progenies) are evaluated for changes in phenotypes. The table for the knock-in of the Type I supertransformation comprises the following information
[1030] Clone ID,
[1031] Pfam,
[1032] Gemini ID
[1033] Trans. Unique ID (which indicates what promoter activation line was transformed
[1034] S Ratio: segregation ratio after the transformed plants are selected for the marker.
[1035] Assay
[1036] Stage: phenotype was observed
[1037] Feature: Where the phenotype was observed
[1038] Phenotype
[1039] P Ratio: phenotype ratio
[1040] Comments

### Part III—From Type II Supertransformation

[1041] Target lines generated using the procedure mentioned in Part I are transformed with T-DNA construct containing constitutive promoter. Selected transformants (and their progenies) are evaluated for changes in phenotypes.

[1042] An additional deposit of an E. coli Library, E. coliLibA021800, was made at the American Type Culture Collection in Manassas, Va., USA on Feb. 22, 2000 to meet the requirements of Budapest Treaty for the international recognition of the deposit of microorganisms. This deposit was assigned ATCC accession no. PTA-1411. Additionaly, ATCC Library deposits; PTA-1161, PTA-1411 and PTA-2007 were made at the American Type Culture Collection in Manassas, Va., USA on; Jan. 7, 2000, February 23, 2000 and Jun. 8, 2000 respectively, to meet the requirements of Budapest Treaty for the international recognition of the deposit of microorganisms.

[1043] The invention being thus described, it will be apparent to one of ordinary skill in the art that various modifications of the materials and methods for practicing the invention can be made. Such modifications are to be considered within the scope of the invention as defined by the following claims.

[1044] The scientific periodical and patent publications that follow are discussed in the Specification and are hereby incorporated by reference in their entirety:
[1045] Ahn et al. (1993) Molecular and General Genetics 241: 483-90
[1046] Albert et al. (1995) Plant J. 7:649
[1047] Alonso-Blanco et al. (c. 1998) Methods in Molecular Biology, vol. 82, “Arabidopsis Protocols”, pp. 137-146, J. M. Martinez-Zapater and J. Salinas, eds., Humana Press, Totowa, N. J.
[1048] Armaleo et al. (1990) Current Genetics 17:97
[1049] Ausubel et al. (1992) Current Protocols in Molecular Biology, Greene Publishing, New York).
[1050] Azpiroz-Leehan et al. (1997) Trends in Genetics 13:152
[1051] Binding (1988) Regeneration of Plants, Plant Protoplasts, pp. 21-73, CRC Press, Boca Raton,
[1052] Bonner et al. (1973) J. Mol. Biol. 81:123
[1053] Bradshaw et al. (1995) Nucl Acids Res 23: 4850-4856
[1054] Buchanan, Gruissem, and Russel (eds) 2000, Biochemistry and Molecular Biology of Plants, Amer. Soc. of Plant Physiologists, Rockville, Md.
[1055] Burke et al. (1987) Science 236:806-812
[1056] Burr (c. 1994) “Mapping Genes with Recombinant Inbreds”, pp. 249-254. In Freeling, M. and V. Walbot (Ed.), The Maize Handbook Springer-Verlag New York, Inc.: New York, N.Y., USA; Berlin Germany
[1057] Burr et al. (1998) Genetics 118: 519
[1058] Carels et al. (1998) J. Mol. Evol. 46: 45
[1059] Chang et al. (1993) Gene 127:95
[1060] Christou, (1995) Euphytica 85 (1-3):13-27
[1061] Chusacultanachai et al. (1999) J. Biol. Chem. 274:23591
[1062] Cox and Goldberg (c. 1988) “Plant Molecular Biology: A Practical Approach”, pp. 1-35, Shaw ed., IRL, Oxford
[1063] De Martinis et al. (1999) Plant Cell 11:1061
[1064] de Vicente and Tanksley (1993) Genetics 134:585
[1065] Dumas Milne Edwards J. B. (20 Dec. 1993) Doctoral Thesis of Paris VI University, Le clonage des ADNc complets: difficultés et perspectives nouvelles. Apports pour l'étude de la régulation de l'expression de la tryptophane hydroxylase de rat.
[1066] Escudero et al. (1996) Plant J. 10:355
[1067] Evans et al., (1983)Protoplasts Isolation and Culture in “Handbook of Plant Cell Culture,” pp. 124-176, MacMillan Publishing Company, New York
[1068] Fennoy et al. (1993) Nucl. Acids Res. 21(23): 5294 (scientific periodical and patent publications incorporated by reference continued)
[1069] Frischauf et al. (1983) J. Mol. Biol 170: 827-842
[1070] Fromm et al. (1985) Proc. Nall Acad. Sci. USA 82:5824
[1071] Fry et al. (1992) Biotechniques 13: 124
[1072] Gardiner, J. et al. (1993) Genetics 134: 917
[1073] Ghosh et al. (1994) J. Biotechnol. 32:1
[1074] Gleave (1992) Plant Mol. Biol. 20:1203
[1075] Golovkin et al. (1999) J. Biol. Chem. 274:36428
[1076] Gould et al. (1991) Plant Physiology 95:426
[1077] Graves and Goldman (1986) Plant Mol. Biol. 7:34
[1078] Hamilton et al (1990) Nature 346:284-287
[1079] Hamilton et al. (1996) Proc. Natl. Acad. Sci. USA 93: 9975-9979
[1080] Hamilton (1997) Gene 200:107
[1081] Haseloff et al. (1988) Nature, 334:585
[1082] Herrera-Estrella et al. (1983) EMBO J. 2:987
[1083] Hochstrasser (2000) Science 289: 563
[1084] Hosoyama et al. (1994) Biosci. Biotechnol. Biochem. 58:1500
[1085] Hu et al. (2000) Methods 20:80
[1086] Huynh et al., In: Glover N M (ed) DNA Cloning: A practical Approach, Val Oxford: IRL Press (1985
[1087] Ichimura et al. (1998) Biochem. Biophys. Res. Comm. 253:532
[1088] Ishida et al. (1996) Nature Biotechnology 14:745
[1089] Joazeiro and Hunter (2001) Science 289: 2061;
[1090] Kaczor et al. (1994) Plant Physiol. 1-4: 1411-7
[1091] Kato et al. (1994) Gene 150:243-250
[1092] Keegstra and Cline (1999) The Plant Cell 11: 557-570
[1093] Keller and M. M. Manak (c. 1993)“DNA Probes”, 2^{nd} Ed. pp. 1-25, by Stockton Press, New York, N.Y.
[1094] Klee et al. (1987) Ann. Rev. of Plant Phys. 38:467
[1095] Klein et al. (1987) Nature 327:773
[1096] Kohler and Milstein (1975) Nature 256: 495
[1097] Koltonow et al. (1990) Plant Cell 2:1201
[1098] Komari et al. (1996) Plant J. 10:165
[1099] Liljegren (1999) Plant Cell 11:1007
[1100] Lin et al. (1997) J. Biol. Chem. 272:27274
[1101] Luo et al. (1997) J. Mol. Biol. 266:479
[1102] Marra et al. (1997) Genomic Research 7:1072-1084
[1103] Mariani et al. (1992) Nature 357: 3 84-3 87
[1104] Martinez et al. (1999) Mol. Gen. Genet. 261:546
[1105] Maruyama et al. (1994) Gene 138:171
[1106] Marty (1999) The Plant Cell 11: 587-599
[1107] Matteucci et al. (1981) J. Am. Chem. Soc. 103:3185
[1108] May et al. (1995) Bio/Technology 13:486
[1109] McAlister-Henn et al. (1999) Methods 19:330
[1110] McCormac et al. (1997) Mol. Biotechnol. 8:199 (scientific periodical and patent publications incorporated by reference continued)
[1111] Michaels et al. (1999) Plant Cell 11:949
[1112] Morgante et al. (1993) The Plant Journal 3: 165
[1113] Muller et al. (1987) Mol. Gen. Genet. 207:171
[1114] Napoli et al. (1990) The Plant Cell 2:279
[1115] Oeller, et al (1991) Science 254:437-439
[1116] Panaud et al. (1995) Genome 38: 1170
[1117] Paszkowski et al. (1984) EMBO J. 3:2717
[1118] Pearson and Lipman (1988) Proc. Natl. Acad. Sci. (USA) 85: 2444
[1119] Pierrou et al., (1995) Anal. Biochem. 229:99
[1120] Refseth et al. (1997) Electrophoresis 18: 1519
[1121] Sakamoto et al. (2001) PNAS Online 141230798
[1122] Salomon et al. (1984) EMBO J. 3:141
[1123] Sambrook et al. (1989) Molecular Cloning: A Laboratory Manual, 2^{nd} ed. Cold Spring Harbor Laboratory Press, New York)
[1124] Schneider (1976) Z. naturforsch. [C] 31: 55-63
[1125] Schwarz et al. (1992) Mol. Cell. Biol. 12:266
[1126] Seki et al. (1998) Plant Journal 15:707-720
[1127] Senior et al. (1996) Crop Science 36: 1676
[1128] Sheehy et al. (1988) Proc. Nat. Acad. Sci. USA, 85:8805
[1129] Shizuya et al. (1992) Proc. Natl. Acad. Sci. USA 89: 8794-8797
[1130] Smith (1988) Biochem. J. 249: 423-8
[1131] Smith and Waterman (1981) Add. APL. Math. 2:482
[1132] Spiker and Thompson (1996) Plant Physiol. 110: 15-21
[1133] Sternberg N. et al. (1990) Proc Natl Acad Sci USA. 87(1):103-7
[1134] Tanksley et al. (1997) Science 277:1063
[1135] Tanksley and McCouch (1997) Science 277:1063
[1136] Taramino et al. (1996) Genome 39: 277
[1137] Tijessen (c. 1993) “Hybridization with Nucleic Acid Probes” in Laboratory Techniques in Biochemistry and Molecular Biology, P. C. vand der Vliet, ed., Elsevier, Amsterdam.
[1138] Urdea et al. (1981) Proc. Natl. Acad. 80:7461
[1139] van der Krol et al. (1990) Plant Cell 2:291
[1140] Venkateswarlu et al. (1991) Biotechnology 9:1103
[1141] Vergunst et al. (1998) Nucleic Acids Res. 26:2729
[1142] Vergunst et al. (1998) Plant Mol. Biol. 38:393
[1143] Vitale and Denecke (1999) The Plant Cell 11: 615-628
[1144] Walden et al. (1990) Mol Cell Biol 1: 175-194
[1145] Weigel and Meyerowitz, (1993) In Molecular Basis of Morphogenesis (ed. M. Bernfield). 51st Annual Symposium of the Society for Developmental Biology, pp. 93-107, New York
[1146] Weising et al. (1988) Ann. Rev. Genet. 22:421
[1147] Wunsch (1970) J. Mol. Biol. 48:443
[1148] Xu et al. (1995) Plant Mol. Biol. 27:237
[1149] Yamamoto et al. (1991) Plant Cell 3:371 (scientific periodical and patent publications incorporated by reference continued)
[1150] Bouckaert et al., U.S. Ser. No. 60/121,700 Atty. Dkt. No. 2750-117P, Client Dkt. No. 00010.001 EPO 625572
[1151] U.S. Pat. No. 4,801,340
[1152] U.S. Pat. No. 5,034,323
[1153] U.S. Pat. No. 5,231,020
[1154] U.S. Pat. No. 5,283,184
[1155] U.S. Pat. No. 5,410,270
[1156] U.S. Pat. No. 5,445,943
[1157] U.S. Pat. No. 5,766,847
[1158] U.S. Pat. No. 5,945,306
[1159] U.S. Pat. No. 5,945,287
[1160] U.S. Pat. No. 5,945,308
[1161] U.S. Pat. No. 5,919,686
[1162] U.S. Pat. No. 5,919,661
[1163] U.S. Pat. No. 5,919,627
[1164] U.S. Pat. No. 5,723,766
[1165] U.S. Pat. No. 5,859,330
[1166] U.S. Pat. No. 5,874,248
[1167] U.S. Pat. No. 5,871,973
[1168] U.S. Pat. No. 5,871,971
[1169] U.S. Pat. No. 5,871,930
[1170] U.S. Pat. No. 6,004,753
[1171] U.S. Pat. No. 6,004,804
[1172] U.S. Pat. No. 6,010,907
[1173] WO 95/35505
[1174] WO 96/34981
[1175] WO 98/07842
[1176] WO 98/10858
[1177] WO 98/58052
[1178] WO 99/06572
[1179] WO 99/07865
[1180] WO 99/15658
[1181] WO 99/31252
[1182] WO 99/33870
[1183] WO 99/33981
[1184] WO 99/46380
[1185] WO 99/58672
[1186] WO 99/58723

PHENO_DATA000 Table

| cDNA_id | | | | | | | |
|---|---|---|---|---|---|---|---|
| or | | | phenotype | | | | |
| clone_id | promoter | line_id | present? | Phenotype observed | | | |
| 3265003 | 35S | ME05809-01 | YES | I14 | [NULL] | 5.10 | ROSETTE LEAVES-Petiole Length-Short Petioles |
| 3265003 | 35S | ME05809-01 | YES | I20 | [NULL] | 5.10 | ROSETTE LEAVES-Shape-Oval |
| 3265003 | 35S | ME05809-02 | YES | I14 | [NULL] | 5.10 | ROSETTE LEAVES-Petiole Length-Short Petioles |
| 3265003 | 35S | ME05809-02 | YES | I20 | [NULL] | 5.10 | ROSETTE LEAVES-Shape-Oval |
| 3265003 | 35S | ME05809-03 | NO | [NULL] | [NULL] | [NULL] | [NULL] |
| 3265003 | 35S | ME05809-04 | YES | I14 | [NULL] | 5.10 | ROSETTE LEAVES-Petiole Length-Short Petioles |
| 3265003 | 35S | ME05809-04 | YES | I20 | [NULL] | 5.10 | ROSETTE LEAVES-Shape-Oval |
| 3265003 | 35S | ME05809-05 | YES | I14 | [NULL] | 5.10 | ROSETTE LEAVES-Petiole Length-Short Petioles |
| 3265003 | 35S | ME05809-05 | YES | I14 | [NULL] | 6.50 | ROSETTE LEAVES-Petiole Length-Short Petioles |
| 3265003 | 35S | ME05809-05 | YES | I20 | [NULL] | 5.10 | ROSETTE LEAVES-Shape-Oval |
| 3265003 | 35S | ME05809-05 | YES | J13 | [NULL] | 6.50 | WHOLE PLANT-Size-Small |
| 3265003 | 35S | ME05809-06 | YES | I14 | [NULL] | 5.10 | ROSETTE LEAVES-Petiole Length-Short Petioles |
| 3265003 | 35S | NE05809-06 | YES | I20 | [NULL] | 5.10 | ROSETTE LEAVES-Shape-Oval |
| 3265003 | 35S | ME05809-07 | YES | I14 | [NULL] | 5.10 | ROSETTE LEAVES-Petiole Length-Short Petioles |
| 3265003 | 35S | ME05809-07 | YES | I20 | [NULL] | 5.10 | ROSETTE LEAVES-Shape-Oval |
| 3265003 | 35S | ME05809-08 | NO | [NULL] | [NULL] | [NULL] | [NULL] |
| 3265003 | 35S | ME05809-09 | YES | I14 | [NULL] | 1.08 | ROSETTE LEAVES-Petiole Length-Short Petioles |
| 3265003 | 35S | ME05809-09 | YES | I22 | [NULL] | 1.08 | ROSETTE LEAVES-Shape-Serrate |
| 3265003 | 35S | ME05809-09 | YES | J13 | [NULL] | 1.08 | WHOLE PLANT-Size-Small |
| 3265003 | 35S | ME05809-09 | YES | J14 | [NULL] | 1.08 | WHOLE PLANT-Other |
| 3265003 | 35S | ME05809-09 | YES | M13 | [NULL] | 1.08 | INFLORESCENCE-Flowering Time-Late Flowering |
| 3265003 | 35S | ME05809-10 | NO | [NULL] | [NULL] | [NULL] | [NULL] |
| 4620132 | 326D | ME09236-01 | YES | M13 | [NULL] | 1.07 | INFLORESCENCE-Flowering Time-Late Flowering |
| 4620132 | 326D | ME09236-02 | YES | M13 | [NULL] | 1.06 | INFLORESCENCE-Flowering Time-Late Flowering |
| 4620132 | 326D | ME09236-03 | YES | M13 | [NULL] | 1.10 | INFLORESCENCE-Flowering Time-Late Flowering |
| 4620132 | 326D | ME09236-04 | YES | M13 | [NULL] | 1.08 | INFLORESCENCE-Flowering Time-Late Flowering |
| 4620132 | 326D | ME09236-05 | YES | M13 | [NULL] | 1.10 | INFLORESCENCE-Flowering Time-Late Flowering |
| 4620132 | 326D | ME09236-06 | YES | M13 | [NULL] | 1.07 | INFLORESCENCE-Flowering Time-Late Flowering |
| 4620132 | 34414F | ME09396-01 | NO | [NULL] | [NULL] | [NULL] | [NULL] |
| 4620132 | 34414F | ME09396-02 | NO | [NULL] | [NULL] | [NULL] | [NULL] |
| 4620132 | 34414F | ME09396-03 | NO | [NULL] | [NULL] | [NULL] | [NULL] |
| 4620132 | 34414F | ME09396-04 | NO | [NULL] | [NULL] | [NULL] | [NULL] |
| 4620132 | 34414F | ME09396-05 | NO | [NULL] | [NULL] | [NULL] | [NULL] |
| 4620132 | 34414F | ME09396-06 | NO | [NULL] | [NULL] | [NULL] | [NULL] |
| 4620132 | 34414F | ME09396-07 | NO | [NULL] | [NULL] | [NULL] | [NULL] |
| 4620132 | 34414F | ME09396-08 | NO | [NULL] | [NULL] | [NULL] | [NULL] |
| 4620132 | 34414F | ME09396-09 | NO | [NULL] | [NULL] | [NULL] | [NULL] |
| 4620132 | 34414F | ME09396-10 | NO | [NULL] | [NULL] | [NULL] | [NULL] |
| 4620132 | 35S | ME05226-01 | YES | I08 | [NULL] | 6.30 | ROSETTE LEAVES-Disorganized Rosette- |
| | | | | | | | Disorganized Rosette |
| 4620132 | 35S | ME05226-01 | YES | I30 | [NULL] | 6.30 | ROSETTE LEAVES-Wax-Glossy |
| 4620132 | 35S | ME05226-01 | YES | J01 | [NULL] | 6.30 | WHOLE PLANT-Color-Dark Green |
| 4620132 | 35S | ME05226-02 | YES | I08 | [NULL] | 6.30 | ROSETTE LEAVES-Disorganized Rosette- |
| | | | | | | | Disorganized Rosette |
| 4620132 | 35S | ME05226-02 | YES | I30 | [NULL] | 6.30 | ROSETTE LEAVES-Wax-Glossy |
| 4620132 | 35S | ME05226-02 | YES | J01 | [NULL] | 6.30 | WHOLE PLANT-Color-Dark Green |
| 4620132 | 35S | ME05226-03 | YES | I08 | [NULL] | 6.30 | ROSETTE LEAVES-Disorganized Rosette- |
| | | | | | | | Disorganized Rosette |
| 4620132 | 35S | ME05226-03 | YES | I30 | [NULL] | 6.30 | ROSETTE LEAVES-Wax-Glossy |
| 4620132 | 35S | ME05226-03 | YES | J01 | [NULL] | 6.30 | WHOLE PLANT-Color-Dark Green |
| 4620132 | 35S | ME05226-04 | YES | I08 | [NULL] | 6.30 | ROSETTE LEAVES-Disorganized Rosette- |
| | | | | | | | Disorganized Rosette |
| 4620132 | 35S | ME05226-04 | YES | I30 | [NULL] | 6.30 | ROSETTE LEAVES-Wax-Glossy |
| 4620132 | 35S | ME05226-04 | YES | J01 | [NULL] | 6.30 | WHOLE PLANT-Color-Dark Green |
| 4620132 | 35S | ME05226-05 | YES | I08 | [NULL] | 6.30 | ROSETTE LEAVES-Disorganized Rosette- |
| | | | | | | | Disorganized Rosette |
| 4620132 | 35S | ME05226-05 | YES | I30 | [NULL] | 6.30 | ROSETTE LEAVES-Wax-Glossy |
| 4620132 | 35S | ME05226-05 | YES | J01 | [NULL] | 6.30 | WHOLE PLANT-Color-Dark Green |
| 4620132 | 35S | ME05226-06 | YES | I08 | [NULL] | 6.30 | ROSETTE LEAVES-Disorganized Rosette- |
| | | | | | | | Disorganized Rosette |
| 4620132 | 35S | ME05226-06 | YES | I30 | [NULL] | 6.30 | ROSETTE LEAVES-Wax-Glossy |
| 4620132 | 35S | ME05226-06 | YES | J01 | [NULL] | 6.30 | WHOLE PLANT-Color-Dark Green |
| 4620132 | 35S | ME05226-07 | YES | I08 | [NULL] | 6.30 | ROSETTE LEAVES-Disorganized Rosette- |
| | | | | | | | Disorganized Rosette |
| 4620132 | 35S | ME05226-07 | YES | I30 | [NULL] | 6.30 | ROSETTE LEAVES-Wax-Glossy |
| 4620132 | 35S | ME05226-07 | YES | J01 | [NULL] | 6.30 | WHOLE PLANT-Color-Dark Green |
| 4620132 | 35S | ME05226-08 | YES | I08 | [NULL] | 6.30 | ROSETTE LEAVES-Disorganized Rosette- |
| | | | | | | | Disorganized Rosette |
| 4620132 | 35S | ME05226-08 | YES | I30 | [NULL] | 6.30 | ROSETTE LEAVES-Wax-Glossy |
| 4620132 | 35S | ME05226-08 | YES | J01 | [NULL] | 6.30 | WHOLE PLANT-Color-Dark Green |
| 4620132 | 35S | ME05226-09 | YES | I08 | [NULL] | 6.30 | ROSETTE LEAVES-Disorganized Rosette- |
| | | | | | | | Disorganized Rosette |
| 4620132 | 35S | ME05226-09 | YES | I30 | [NULL] | 6.30 | ROSETTE LEAVES-Wax-Glossy |
| 4620132 | 35S | ME05226-09 | YES | J01 | [NULL] | 6.30 | WHOLE PLANT-Color-Dark Green |
| 4620132 | 35S | ME05226-10 | YES | I08 | [NULL] | 6.30 | ROSETTE LEAVES-Disorganized Rosette- |
| | | | | | | | Disorganized Rosette |
| 4620132 | 35S | ME05226-10 | YES | I30 | [NULL] | 6.30 | ROSETTE LEAVES-Wax-Glossy |
| 4620132 | 35S | ME05226-10 | YES | J01 | [NULL] | 6.30 | WHOLE PLANT-Color-Dark Green |
| 4865327 | 326D | ME09238-01 | NO | [NULL] | [NULL] | [NULL] | [NULL] |
| 4865327 | 326D | ME09238-02 | NO | [NULL] | [NULL] | [NULL] | [NULL] |
| 4865327 | 326D | ME09238-03 | NO | [NULL] | [NULL] | [NULL] | [NULL] |
| 4865327 | 326D | ME09238-04 | NO | [NULL] | [NULL] | [NULL] | [NULL] |
| 4865327 | 326D | ME09238-05 | QUESTIONABLE | I20 | [NULL] | 5.10 | ROSETTE LEAVES-Shape-Oval |
| 4865327 | 326D | ME09238-05 | QUESTIONABLE | J01 | [NULL] | 5.10 | WHOLE PLANT-Color-Dark Green |
| 4865327 | 326D | ME09238-05 | QUESTIONABLE | J13 | [NULL] | 5.10 | WHOLE PLANT-Size-Small |
| 4865327 | 34414F | ME09398-01 | YES | M13 | [NULL] | 1.06 | INFLORESCENCE-Flowering Time-Late |
| | | | | | | | Flowering |
| 4865327 | 34414F | ME09398-02 | NO | [NULL] | [NULL] | [NULL] | [NULL] |
| 4865327 | 34414F | ME09398-03 | NO | [NULL] | [NULL] | [NULL] | [NULL] |
| 4865327 | 34414F | ME09398-04 | YES | I20 | [NULL] | 1.05 | ROSETTE LEAVES-Shape-Oval |
| 4865327 | 34414F | ME09398-04 | YES | M13 | [NULL] | 1.06 | INFLORESCENCE-Flowering Time-Late |
| | | | | | | | Flowering |
| 4865327 | 34414F | ME09398-04 | YES | M25 | [NULL] | 1.05 | INFLORESCENCE-Other |
| 4865327 | 34414F | ME09398-05 | NO | [NULL] | [NULL] | [NULL] | [NULL] |
| 4865327 | 34414F | ME09398-06 | NO | [NULL] | [NULL] | [NULL] | [NULL] |
| 4865327 | 34414F | ME09398-07 | YES | I20 | [NULL] | 1.07 | ROSETTE LEAVES-Shape-Oval |
| 4865327 | 34414F | ME09398-07 | YES | M13 | [NULL] | 1.06 | INFLORESCENCE-Flowering Time-Late |
| | | | | | | | Flowering |
| 4865327 | 34414F | ME09398-07 | YES | M25 | [NULL] | 1.07 | INFLORESCENCE-Other |
| 4865327 | 34414F | ME09398-08 | NO | [NULL] | [NULL] | [NULL] | [NULL] |
| 4865327 | 34414F | ME09398-09 | YES | M13 | [NULL] | 1.06 | INFLORESCENCE-Flowering Time-Late |
| | | | | | | | Flowering |
| 4865327 | 34414F | ME09398-10 | NO | [NULL] | [NULL] | [NULL] | [NULL] |
| 4865327 | 35S | ME05235-01 | YES | J01 | [NULL] | 6.00 | WHOLE PLANT-Color-Dark Green |
| 4865327 | 35S | ME05235-01 | YES | J13 | [NULL] | 6.00 | WHOLE PLANT-Size-Small |
| 4865327 | 35S | ME05235-02 | YES | J01 | [NULL] | 6.00 | WHOLE PLANT-Color-Dark Green |
| 4865327 | 35S | ME05235-02 | YES | J13 | [NULL] | 6.00 | WHOLE PLANT-Size-Small |
| 4865327 | 35S | ME05235-03 | YES | J01 | [NULL] | 6.00 | WHOLE PLANT-Color-Dark Green |
| 4865327 | 35S | ME05235-03 | YES | J13 | [NULL] | 6.00 | WHOLE PLANT-Size-Small |
| 4865327 | 35S | ME05235-04 | YES | J01 | [NULL] | 6.00 | WHOLE PLANT-Color-Dark Green |
| 4865327 | 35S | ME05235-04 | YES | J13 | [NULL] | 6.00 | WHOLE PLANT-Size-Small |
| 4865327 | 35S | ME05235-05 | YES | J01 | [NULL] | 6.00 | WHOLE PLANT-Color-Dark Green |
| 4865327 | 35S | ME05235-05 | YES | J13 | [NULL] | 6.00 | WHOLE PLANT-Size-Small |
| 4865327 | 35S | ME05235-06 | YES | J01 | [NULL] | 6.00 | WHOLE PLANT-Color-Dark Green |
| 4865327 | 35S | ME05235-06 | YES | J13 | [NULL] | 6.00 | WHOLE PLANT-Size-Small |
| 4865327 | 35S | ME05235-07 | YES | J01 | [NULL] | 6.00 | WHOLE PLANT-Color-Dark Green |
| 4865327 | 35S | ME05235-07 | YES | J13 | [NULL] | 6.00 | WHOLE PLANT-Size-Small |
| 4865327 | 35S | ME05235-08 | YES | J01 | [NULL] | 6.00 | WHOLE PLANT-Color-Dark Green |
| 4865327 | 35S | ME05235-08 | YES | J13 | [NULL] | 6.00 | WHOLE PLANT-Size-Small |
| 4865327 | 35S | ME05235-09 | YES | J01 | [NULL] | 6.00 | WHOLE PLANT-Color-Dark Green |
| 4865327 | 35S | ME05235-09 | YES | J13 | [NULL] | 6.00 | WHOLE PLANT-Size-Small |
| 4865327 | 35S | ME05235-10 | YES | J01 | [NULL] | 6.00 | WHOLE PLANT-Color-Dark Green |
| 4865327 | 35S | ME05235-10 | YES | J13 | [NULL] | 6.00 | WHOLE PLANT-Size-Small |
| 12321108 | 35S | ME06415-01 | YES | I31 | [NULL] | 5.10 | ROSETTE LEAVES-Other |
| 12321108 | 35S | ME06415-01 | YES | J13 | [NULL] | 5.10 | WHOLE PLANT-Size-Small |
| 12321108 | 35S | ME06415-01 | YES | K24 | [NULL] | 6.50 | CAULINE LEAVES-Size-Small |
| 12321108 | 35S | ME06415-01 | YES | M14 | [NULL] | 6.50 | INFLORESCENCE-Height-Short |
| 12321108 | 35S | ME06415-01 | YES | M17 | [NULL] | 6.50 | INFLORESCENCE-Internode Length-Short Internode |
| 12321108 | 35S | ME06415-02 | NO | [NULL] | [NULL] | [NULL] | [NULL] |
| 12321108 | 35S | ME06415-03 | NO | [NULL] | [NULL] | [NULL] | [NULL] |
| 12321108 | 35S | ME06415-04 | NO | [NULL] | [NULL] | [NULL] | [NULL] |
| 12321108 | 35S | ME06415-05 | NO | [NULL] | [NULL] | [NULL] | [NULL] |
| 12321108 | 35S | ME06415-06 | NO | [NULL] | [NULL] | [NULL] | [NULL] |
| 12321108 | 35S | ME06415-07 | NO | [NULL] | [NULL] | [NULL] | [NULL] |
| 12321108 | 35S | ME06415-08 | YES | I06 | [NULL] | 5.10 | ROSETTE LEAVES-Curled-Curled 4 |
| 12321108 | 35S | ME06415-08 | YES | I14 | [NULL] | 5.10 | ROSETTE LEAVES-Petiole Length-Short Petioles |
| 12321108 | 35S | ME06415-08 | YES | J13 | [NULL] | 5.10 | WHOLE PLANT-Size-Small |
| 12321108 | 35S | ME06415-08 | YES | M14 | [NULL] | 6.50 | INFLORESCENCE-Height-Short |
| 12321108 | 35S | ME06415-09 | NO | [NULL] | [NULL] | [NULL] | [NULL] |
| 12321108 | 35S | ME06415-10 | YES | I08 | [NULL] | 1.05 | ROSETTE LEAVES-Disorganized Rosette- |
| | | | | | | | Disorganized Rosette |
| 12321108 | 35S | ME06415-10 | YES | I14 | [NULL] | 1.05 | ROSETTE LEAVES-Petiole Length-Short Petioles |
| 12321108 | 35S | ME06415-10 | YES | J01 | [NULL] | 1.05 | WHOLE PLANT-Color-Dark Green |
| 12321108 | 35S | ME06415-10 | YES | J13 | [NULL] | 1.05 | WHOLE PLANT-Size-Small |
| 12321108 | 35S | ME06415-10 | YES | M13 | [NULL] | 1.05 | INFLORESCENCE-Flowering Time-Late Flowering |
| 12321495 | 35S | ME05629-01 | YES | J01 | [NULL] | 1.04 | WHOLE PLANT-Color-Dark Green |
| 12321495 | 35S | ME05629-01 | YES | J13 | [NULL] | 1.04 | WHOLE PLANT-Size-Small |
| 12321495 | 35S | ME05629-02 | YES | I31 | [NULL] | 1.10 | ROSETTE LEAVES-Other |
| 12321495 | 35S | ME05629-02 | YES | J13 | [NULL] | 1.10 | WHOLE PLANT-Size-Small |
| 12321495 | 35S | ME05629-03 | NO | [NULL] | [NULL] | [NULL] | [NULL] |
| 12321495 | 35S | ME05629-04 | YES | J13 | [NULL] | 1.08 | WHOLE PLANT-Size-Small |
| 12321495 | 35S | ME05629-05 | NO | [NULL] | [NULL] | [NULL] | [NULL] |
| 12321495 | 35S | ME05629-06 | YES | J13 | [NULL] | 1.05 | WHOLE PLANT-Size-Small |
| 12321495 | 35S | ME05629-07 | NO | [NULL] | [NULL] | [NULL] | [NULL] |
| 12321495 | 35S | ME05629-08 | NO | [NULL] | [NULL] | [NULL] | [NULL] |
| 12321495 | 35S | ME05629-09 | NO | [NULL] | [NULL] | [NULL] | [NULL] |
| 12322291 | 35S | ME03910-01 | NO | [NULL] | [NULL] | [NULL] | [NULL] |
| 12322291 | 35S | ME03910-02 | NO | [NULL] | [NULL] | [NULL] | [NULL] |
| 12322291 | 35S | ME03910-03 | NO | [NULL] | [NULL] | [NULL] | [NULL] |
| 12322291 | 35S | ME03910-04 | NO | [NULL] | [NULL] | [NULL] | [NULL] |
| 12322291 | 35S | ME03910-05 | NO | [NULL] | [NULL] | [NULL] | [NULL] |
| 12322291 | 35S | ME03910-06 | YES | J03 | [NULL] | 5.10 | WHOLE PLANT-Color-Yellow-Green Viable 1 |
| 12322291 | 35S | ME03910-06 | YES | M13 | [NULL] | 5.10 | INFLORESCENCE-Flowering Time-Late Flowering |
| 12322291 | 35S | ME03910-07 | NO | [NULL] | [NULL] | [NULL] | [NULL] |
| 12322291 | 35S | ME03910-08 | YES | J03 | [NULL] | 5.10 | WHOLE PLANT-Color-Yellow-Green Viable 1 |
| 12322291 | 35S | ME03910-08 | YES | M13 | [NULL] | 5.10 | INFLORESCENCE-Flowering Time-Late Flowering |
| 12322291 | 35S | ME03910-09 | YES | I04 | [NULL] | 5.10 | ROSETTE LEAVES-Curled-Curled 2 |
| 12322291 | 35S | ME03910-09 | YES | J03 | [NULL] | 5.10 | WHOLE PLANT-Color-Yellow-Green Viable 1 |
| 12322291 | 35S | ME03910-09 | YES | M13 | [NULL] | 5.10 | INFLORESCENCE-Flowering Time-Late Flowering |
| 12322291 | 35S | ME03910-10 | NO | [NULL] | [NULL] | [NULL] | [NULL] |
| 12322747 | 35S | ME04367-01 | NO | [NULL] | [NULL] | [NULL] | [NULL] |
| 12322747 | 35S | ME04367-02 | NO | [NULL] | [NULL] | [NULL] | [NULL] |
| 12322747 | 35S | ME04367-03 | NO | [NULL] | [NULL] | [NULL] | [NULL] |
| 12322747 | 35S | ME04367-04 | YES | N02 | [NULL] | 6.50 | SILIQUES-Length-Short |
| 12322747 | 35S | ME04367-05 | YES | J01 | [NULL] | 6.50 | WHOLE PLANT-Color-Dark Green |
| 12322747 | 35S | ME04367-05 | YES | M15 | [NULL] | 6.50 | INFLORESCENCE-Height-Tall |
| 12322747 | 35S | ME04367-05 | YES | M19 | [NULL] | 6.50 | INFLORESCENCE-Strength-Strong |
| 12322747 | 35S | ME04367-05 | YES | M25 | [NULL] | 6.50 | INFLORESCENCE-Other |
| 12322747 | 35S | ME04367-05 | YES | N01 | [NULL] | 6.50 | SILIQUES-Length-Long |
| 12322747 | 35S | ME04367-06 | YES | J13 | [NULL] | 6.50 | WHOLE PLANT-Size-Small |
| 12322747 | 35S | ME04367-06 | YES | M14 | [NULL] | 6.50 | INFLORESCENCE-Height-Short |
| 12322747 | 35S | ME04367-07 | YES | M15 | [NULL] | 6.50 | INFLORESCENCE-Height-Tall |
| 12322747 | 35S | ME04367-07 | YES | N01 | [NULL] | 6.50 | SILIQUES-Length-Long |
| 12322747 | 35S | ME04367-08 | NO | [NULL] | [NULL] | [NULL] | [NULL] |
| 12322747 | 35S | ME04367-09 | YES | M15 | [NULL] | 6.50 | INFLORESCENCE-Height-Tall |
| 12322747 | 35S | ME04367-09 | YES | N01 | [NULL] | 6.50 | SILIQUES-Length-Long |
| 12323094 | 32449 | ME01244-01 | NO | [NULL] | [NULL] | [NULL] | [NULL] |
| 12323094 | 32449 | ME01244-02 | NO | [NULL] | [NULL] | [NULL] | [NULL] |
| 12323094 | 32449 | ME01244-03 | NO | [NULL] | [NULL] | [NULL] | [NULL] |
| 12323094 | 32449 | ME01244-04 | NO | [NULL] | [NULL] | [NULL] | [NULL] |
| 12323094 | 32449 | ME01244-05 | NO | [NULL] | [NULL] | [NULL] | [NULL] |
| 12323094 | 35S | ME01851-01 | NO | [NULL] | [NULL] | [NULL] | [NULL] |
| 12323094 | 35S | ME01851-02 | NO | [NULL] | [NULL] | [NULL] | [NULL] |
| 12323094 | 35S | ME01851-03 | YES | L11 | [NULL] | 6.50 | FLOWERS-Other |
| 12323094 | 35S | ME01851-03 | YES | P04 | [NULL] | 6.50 | FERTILITY-Fertility-Reduced |
| 12323094 | 35S | ME01851-04 | YES | I08 | [NULL] | 1.08 | ROSETTE LEAVES-Disorganized Rosette- |
| | | | | | | | Disorganized Rosette |
| 12323094 | 35S | ME01851-04 | YES | I31 | [NULL] | 5.10 | ROSETTE LEAVES-Other |
| 12323094 | 35S | ME01851-05 | NO | [NULL] | [NULL] | [NULL] | [NULL] |
| 12323094 | 35S | ME01851-06 | NO | [NULL] | [NULL] | [NULL] | [NULL] |
| 12323094 | 35S | ME01851-07 | NO | [NULL] | [NULL] | [NULL] | [NULL] |
| 12323094 | 35S | ME01851-08 | YES | N07 | [NULL] | 6.90 | SILIQUES-Other |
| 12323094 | 35S | ME01851-08 | YES | P04 | [NULL] | 6.90 | FERTILITY-Fertility-Reduced |
| 12323094 | 35S | ME01851-09 | YES | I31 | [NULL] | 5.10 | ROSETTE LEAVES-Other |
| 12323094 | 35S | ME01851-09 | YES | K31 | [NULL] | 6.30 | CAULINE LEAVES-Other |
| 12323094 | 35S | ME01851-10 | NO | [NULL] | [NULL] | [NULL] | [NULL] |
| 12323302 | 35S | ME04362-01 | YES | I08 | [NULL] | 6.50 | ROSETTE LEAVES-Disorganized Rosette- |
| | | | | | | | Disorganized Rosette |
| 12323302 | 35S | ME04362-01 | YES | I22 | [NULL] | 6.00 | ROSETTE LEAVES-Shape-Serrate |
| 12323302 | 35S | ME04362-01 | YES | I22 | [NULL] | 6.50 | ROSETTE LEAVES-Shape-Serrate |
| 12323302 | 35S | ME04362-01 | YES | J01 | [NULL] | 6.00 | WHOLE PLANT-Color-Dark Green |
| 12323302 | 35S | ME04362-01 | YES | J01 | [NULL] | 6.50 | WHOLE PLANT-Color-Dark Green |
| 12323302 | 35S | ME04362-01 | YES | K20 | [NULL] | 6.50 | CAULINE LEAVES-Shape-Serrate |
| 12323302 | 35S | ME04362-01 | YES | K23 | [NULL] | 6.50 | CAULINE LEAVES-Size-Large |
| 12323302 | 35S | ME04362-01 | YES | P05 | [NULL] | 6.50 | FERTILITY-Fertility-Sterile |
| 12323302 | 35S | ME04362-02 | NO | [NULL] | [NULL] | [NULL] | [NULL] |
| 12323302 | 35S | ME04362-03 | NO | [NULL] | [NULL] | [NULL] | [NULL] |
| 12323302 | 35S | ME04362-04 | YES | I31 | [NULL] | 6.50 | ROSETTE LEAVES-Other |
| 12323302 | 35S | ME04362-04 | YES | J01 | [NULL] | 6.10 | WHOLE PLANT-Color-Dark Green |
| 12323302 | 35S | ME04362-04 | YES | M14 | [NULL] | 6.50 | INFLORESCENCE-Height-Short |
| 12323302 | 35S | ME04362-04 | YES | P04 | [NULL] | 6.50 | FERTILITY-Fertility-Reduced |
| 12323302 | 35S | ME04362-05 | NO | [NULL] | [NULL] | [NULL] | [NULL] |
| 12323401 | 35S | ME05824-01 | NO | [NULL] | [NULL] | [NULL] | [NULL] |
| 12323401 | 35S | ME05824-02 | NO | [NULL] | [NULL] | [NULL] | [NULL] |
| 12323401 | 35S | ME05824-03 | YES | I06 | [NULL] | 1.06 | ROSETTE LEAVES-Curled-Curled 4 |
| 12323401 | 35S | ME05824-03 | YES | I18 | [NULL] | 1.06 | ROSETTE LEAVES-Shape-Lanceolate |
| 12323401 | 35S | ME05824-03 | YES | J01 | [NULL] | 1.06 | WHOLE PLANT-Color-Dark Green |
| 12323401 | 35S | ME05824-03 | YES | M13 | [NULL] | 6.50 | INFLORESCENCE-Flowering Time-Late Flowering |
| 12323401 | 35S | ME05824-03 | YES | P05 | [NULL] | 6.50 | FERTILITY-Fertility-Sterile |
| 12323401 | 35S | ME05824-04 | YES | I06 | [NULL] | 1.07 | ROSETTE LEAVES-Curled-Curled 4 |
| 12323401 | 35S | ME05824-04 | YES | J01 | [NULL] | 1.07 | WHOLE PLANT-Color-Dark Green |
| 12323401 | 35S | ME05824-04 | YES | M13 | [NULL] | 6.50 | INFLORESCENCE-Flowering Time-Late Flowering |
| 12323401 | 35S | ME05824-04 | YES | P05 | [NULL] | 6.50 | FERTILITY-Fertility-Sterile |
| 12323401 | 35S | ME05824-05 | NO | [NULL] | [NULL] | [NULL] | [NULL] |
| 12323401 | 35S | ME05824-06 | YES | I20 | [NULL] | 1.07 | ROSETTE LEAVES-Shape-Oval |
| 12323401 | 35S | ME05824-06 | YES | J01 | [NULL] | 1.07 | WHOLE PLANT-Color-Dark Green |
| 12323401 | 35S | ME05824-06 | YES | P04 | [NULL] | 6.50 | FERTILITY-Fertility-Reduced |
| 12323401 | 35S | ME05824-07 | NO | [NULL] | [NULL] | [NULL] | [NULL] |
| 12323401 | 35S | ME05824-08 | YES | I05 | [NULL] | 1.07 | ROSETTE LEAVES-Curled-Curled 3 |
| 12323401 | 35S | ME05824-08 | YES | J01 | [NULL] | 1.07 | WHOLE PLANT-Color-Dark Green |
| 12323401 | 35S | ME05824-08 | YES | J13 | [NULL] | 1.07 | WHOLE PLANT-Size-Small |
| 12323401 | 35S | ME05824-08 | YES | M13 | [NULL] | 6.50 | INFLORESCENCE-Flowering Time-Late Flowering |
| 12323401 | 35S | ME05824-08 | YES | P05 | [NULL] | 6.50 | FERTILITY-Fertility-Sterile |
| 12323401 | 35S | ME05824-09 | NO | [NULL] | [NULL] | [NULL] | [NULL] |
| 12323401 | 35S | ME05824-10 | NO | [NULL] | [NULL] | [NULL] | [NULL] |
| 12324135 | 35S | ME04316-01 | NO | [NULL] | [NULL] | [NULL] | [NULL] |
| 12324135 | 35S | ME04316-02 | YES | J12 | [NULL] | 6.50 | WHOLE PLANT-Size-Large |
| 12324135 | 35S | ME04316-03 | NO | [NULL] | [NULL] | [NULL] | [NULL] |
| 12324135 | 35S | ME04316-04 | NO | [NULL] | [NULL] | [NULL] | [NULL] |
| 12324135 | 35S | ME04316-05 | NO | [NULL] | [NULL] | [NULL] | [NULL] |
| 12324135 | 35S | ME04316-06 | YES | J12 | [NULL] | 6.50 | WHOLE PLANT-Size-Large |
| 12324135 | 35S | ME04316-07 | YES | J12 | [NULL] | 6.50 | WHOLE PLANT-Size-Large |
| 12324135 | 35S | ME04316-08 | NO | [NULL] | [NULL] | [NULL] | [NULL] |
| 12324135 | 35S | ME04316-09 | YES | J12 | [NULL] | 6.50 | WHOLE PLANT-Size-Large |
| 12324135 | 35S | ME04316-10 | NO | [NULL] | [NULL] | [NULL] | [NULL] |
| 12324325 | 35S | ME03723-01 | NO | [NULL] | [NULL] | [NULL] | [NULL] |
| 12324325 | 35S | ME03723-02 | NO | [NULL] | [NULL] | [NULL] | [NULL] |
| 12324325 | 35S | ME03723-03 | YES | M13 | [NULL] | 6.30 | INFLORESCENCE-Flowering Time-Late Flowering |
| 12324325 | 35S | ME03723-03 | YES | M19 | [NULL] | 6.30 | INFLORESCENCE-Strength-Strong |
| 12324325 | 35S | ME03723-04 | NO | [NULL] | [NULL] | [NULL] | [NULL] |
| 12324325 | 35S | ME03723-05 | NO | [NULL] | [NULL] | [NULL] | [NULL] |
| 12324325 | 35S | ME03723-06 | NO | [NULL] | [NULL] | [NULL] | [NULL] |
| 12324325 | 35S | ME03723-07 | NO | [NULL] | [NULL] | [NULL] | [NULL] |
| 12324325 | 35S | ME03723-08 | YES | J13 | [NULL] | 6.50 | WHOLE PLANT-Size-Small |
| 12324325 | 35S | ME03723-09 | YES | M13 | [NULL] | 5.10 | INFLORESCENCE-Flowering Time-Late Flowering |
| 12324325 | 35S | ME03723-10 | NO | [NULL] | [NULL] | [NULL] | [NULL] |
| 12324532 | 35S | ME05527-01 | NO | [NULL] | [NULL] | [NULL] | [NULL] |
| 12324532 | 35S | ME05527-02 | YES | J13 | [NULL] | 6.10 | WHOLE PLANT-Size-Small |
| 12324532 | 35S | ME05527-03 | YES | J13 | [NULL] | 6.30 | WHOLE PLANT-Size-Small |
| 12324532 | 35S | ME05527-04 | NO | [NULL] | [NULL] | [NULL] | [NULL] |
| 12324532 | 35S | ME05527-05 | NO | [NULL] | [NULL] | [NULL] | [NULL] |
| 12324532 | 35S | ME05527-06 | YES | J13 | [NULL] | 6.30 | WHOLE PLANT-Size-Small |
| 12324532 | 35S | ME05527-07 | NO | [NULL] | [NULL] | [NULL] | [NULL] |
| 12324532 | 35S | ME05527-08 | NO | [NULL] | [NULL] | [NULL] | [NULL] |
| 12324532 | 35S | ME05527-09 | NO | [NULL] | [NULL] | [NULL] | [NULL] |
| 12324532 | 35S | ME05527-10 | NO | [NULL] | [NULL] | [NULL] | [NULL] |
| 12325093 | 35S | ME04213-01 | YES | J13 | [NULL] | 6.50 | WHOLE PLANT-Size-Small |
| 12325093 | 35S | ME04213-01 | YES | M14 | [NULL] | 6.50 | INFLORESCENCE-Height-Short |
| 12325093 | 35S | ME04213-01 | YES | M17 | [NULL] | 6.50 | INFLORESCENCE-Internode Length-Short Internode |
| 12325093 | 35S | ME04213-01 | YES | N02 | [NULL] | 6.50 | SILIQUES-Length-Short |
| 12325093 | 35S | ME04213-01 | YES | N07 | [NULL] | 6.50 | SILIQUES-Other |
| 12325093 | 35S | ME04213-01 | YES | P04 | [NULL] | 6.50 | FERTILITY-Fertility-Reduced |
| 12325093 | 35S | ME04213-02 | YES | L11 | [NULL] | 6.50 | FLOWERS-Other |
| 12325093 | 35S | ME04213-02 | YES | M10 | [NULL] | 6.50 | INFLORESCENCE-Branching-Reduced Apical |
| | | | | | | | Dominance |
| 12325093 | 35S | ME04213-02 | YES | M14 | [NULL] | 6.50 | INFLORESCENCE-Height-Short |
| 12325093 | 35S | ME04213-02 | YES | M17 | [NULL] | 6.50 | INFLORESCENCE-Internode Length-Short Internode |
| 12325093 | 35S | ME04213-02 | YES | N02 | [NULL] | 6.50 | SILIQUES-Length-Short |
| 12325093 | 35S | ME04213-02 | YES | P04 | [NULL] | 6.50 | FERTILITY-Fertility-Reduced |
| 12325093 | 35S | ME04213-02 | YES | R02 | [NULL] | 6.50 | SENESCENCE TIME-Senescence Time-Late Senescence |
| 12325093 | 35S | ME04213-03 | YES | I22 | [NULL] | 6.00 | ROSETTE LEAVES-Shape-Serrate |
| 12325093 | 35S | ME04213-03 | YES | I22 | [NULL] | 6.50 | ROSETTE LEAVES-Shape-Serrate |
| 12325093 | 35S | ME04213-03 | YES | I31 | [NULL] | 6.00 | ROSETTE LEAVES-Other |
| 12325093 | 35S | ME04213-03 | YES | I31 | [NULL] | 6.50 | ROSETTE LEAVES-Other |
| 12325093 | 35S | ME04213-03 | YES | J13 | [NULL] | 6.00 | WHOLE PLANT-Size-Small |
| 12325093 | 35S | ME04213-03 | YES | J13 | [NULL] | 6.50 | WHOLE PLANT-Size-Small |
| 12325093 | 35S | ME04213-03 | YES | M10 | [NULL] | 6.50 | INFLORESCENCE-Branching-Reduced Apical |
| | | | | | | | Dominance |
| 12325093 | 35S | ME04213-03 | YES | M14 | [NULL] | 6.50 | INFLORESCENCE-Height-Short |
| 12325093 | 35S | ME04213-03 | YES | M17 | [NULL] | 6.50 | INFLORESCENCE-Internode Length-Short Internode |
| 12325093 | 35S | ME04213-03 | YES | M20 | [NULL] | 6.50 | INFLORESCENCE-Strength-Weak |
| 12325093 | 35S | ME04213-03 | YES | N02 | [NULL] | 6.50 | SILIQUES-Length-Short |
| 12325093 | 35S | ME04213-03 | YES | P04 | [NULL] | 6.50 | FERTILITY-Fertility-Reduced |
| 12325093 | 35S | ME04213-03 | YES | R02 | [NULL] | 6.50 | SENESCENCE TIME-Senescence Time-Late Senescence |
| 12325093 | 35S | ME04213-04 | YES | I18 | [NULL] | 5.10 | ROSETTE LEAVES-Shape-Lanceolate |
| 12325093 | 35S | ME04213-04 | YES | I22 | [NULL] | 6.50 | ROSETTE LEAVES-Shape-Serrate |
| 12325093 | 35S | ME04213-04 | YES | I31 | [NULL] | 6.50 | ROSETTE LEAVES-Other |
| 12325093 | 35S | ME04213-04 | YES | J13 | [NULL] | 5.10 | WHOLE PLANT-Size-Small |
| 12325093 | 35S | ME04213-04 | YES | J13 | [NULL] | 6.50 | WHOLE PLANT-Size-Small |
| 12325093 | 35S | ME04213-04 | YES | M17 | [NULL] | 6.50 | INFLORESCENCE-Internode Length-Short Internode |
| 12325093 | 35S | ME04213-04 | YES | P04 | [NULL] | 6.50 | FERTILITY-Fertility-Reduced |
| 12325093 | 35S | ME04213-05 | NO | [NULL] | [NULL] | [NULL] | [NULL] |
| 12325093 | 35S | ME04213-06 | NO | [NULL] | [NULL] | [NULL] | [NULL] |
| 12325093 | 35S | ME04213-07 | NO | [NULL] | [NULL] | [NULL] | [NULL] |
| 12325093 | 35S | ME04213-08 | NO | [NULL] | [NULL] | [NULL] | [NULL] |
| 12325093 | 35S | ME04213-09 | YES | I20 | [NULL] | 5.10 | ROSETTE LEAVES-Shape-Oval |
| 12325093 | 35S | ME04213-09 | YES | I31 | [NULL] | 5.10 | ROSETTE LEAVES-Other |
| 12325093 | 35S | ME04213-09 | YES | J01 | [NULL] | 5.10 | WHOLE PLANT-Color-Dark Green |
| 12325093 | 35S | ME04213-09 | YES | J08 | [NULL] | 5.10 | WHOLE PLANT-Dwarf-Misc. Dwarf |
| 12325093 | 35S | ME04213-09 | YES | J13 | [NULL] | 5.10 | WHOLE PLANT-Size-Small |
| 12325093 | 35S | ME04213-09 | YES | M13 | [NULL] | 5.10 | INFLORESCENCE-Flowering Time-Late Flowering |
| 12325093 | 35S | ME04213-10 | NO | [NULL] | [NULL] | [NULL] | [NULL] |
| 12325093 | 35S | ME04916-01 | NO | [NULL] | [NULL] | [NULL] | [NULL] |
| 12325093 | 35S | ME04916-02 | NO | [NULL] | [NULL] | [NULL] | [NULL] |
| 12325093 | 35S | ME04916-03 | NO | [NULL] | [NULL] | [NULL] | [NULL] |
| 12325093 | 35S | ME04916-04 | NO | [NULL] | [NULL] | [NULL] | [NULL] |
| 12325093 | 35S | ME04916-05 | NO | [NULL] | [NULL] | [NULL] | [NULL] |
| 12325093 | 35S | ME04916-06 | NO | [NULL] | [NULL] | [NULL] | [NULL] |
| 12325093 | 35S | ME04916-07 | NO | [NULL] | [NULL] | [NULL] | [NULL] |
| 12325093 | 35S | ME04916-08 | NO | [NULL] | [NULL] | [NULL] | [NULL] |
| 12325093 | 35S | ME04916-09 | NO | [NULL] | [NULL] | [NULL] | [NULL] |
| 12325093 | 35S | ME04916-10 | NO | [NULL] | [NULL] | [NULL] | [NULL] |
| 12325124 | 13879D | ME09411-01 | NO | [NULL] | [NULL] | [NULL] | [NULL] |
| 12325124 | 13879D | ME09411-02 | NO | [NULL] | [NULL] | [NULL] | [NULL] |
| 12325124 | 13879D | ME09411-03 | NO | [NULL] | [NULL] | [NULL] | [NULL] |
| 12325124 | 13879D | ME09411-04 | NO | [NULL] | [NULL] | [NULL] | [NULL] |
| 12325124 | 13879D | ME09411-05 | YES | M13 | [NULL] | 6.30 | INFLORESCENCE-Flowering Time-Late |
| | | | | | | | Flowering |
| 12325124 | 13879D | ME09411-06 | YES | M13 | [NULL] | 6.30 | INFLORESCENCE-Flowering Time-Late |
| | | | | | | | Flowering |
| 12325124 | 13879D | ME09411-07 | YES | M13 | [NULL] | 6.30 | INFLORESCENCE-Flowering Time-Late |
| | | | | | | | Flowering |
| 12325124 | 13879F | ME09404-01 | NO | [NULL] | [NULL] | [NULL] | [NULL] |
| 12325124 | 13879F | ME09404-02 | NO | [NULL] | [NULL] | [NULL] | [NULL] |
| 12325124 | 13879F | ME09404-03 | NO | [NULL] | [NULL] | [NULL] | [NULL] |
| 12325124 | 13879F | ME09404-04 | NO | [NULL] | [NULL] | [NULL] | [NULL] |
| 12325124 | 13879F | ME09404-05 | NO | [NULL] | [NULL] | [NULL] | [NULL] |
| 12325124 | 13879F | ME09404-06 | NO | [NULL] | [NULL] | [NULL] | [NULL] |
| 12325124 | 13879F | ME09404-07 | NO | [NULL] | [NULL] | [NULL] | [NULL] |
| 12325124 | 13879F | ME09404-08 | NO | [NULL] | [NULL] | [NULL] | [NULL] |
| 12325124 | 13879F | ME09404-09 | NO | [NULL] | [NULL] | [NULL] | [NULL] |
| 12325124 | 13879F | ME09404-10 | NO | [NULL] | [NULL] | [NULL] | [NULL] |
| 12325124 | 28716F | ME09425-01 | NO | [NULL] | [NULL] | [NULL] | [NULL] |
| 12325124 | 28716F | ME09425-02 | YES | M13 | [NULL] | 6.30 | INFLORESCENCE-Flowering Time-Late |
| | | | | | | | Flowering |
| 12325124 | 28716F | ME09425-03 | YES | M13 | [NULL] | 6.30 | INFLORESCENCE-Flowering Time-Late |
| | | | | | | | Flowering |
| 12325124 | 28716F | ME09425-04 | YES | M13 | [NULL] | 6.30 | INFLORESCENCE-Flowering Time-Late |
| | | | | | | | Flowering |
| 12325124 | 28716F | ME09425-05 | NO | [NULL] | [NULL] | [NULL] | [NULL] |
| 12325124 | 28716F | ME09425-06 | NO | [NULL] | [NULL] | [NULL] | [NULL] |
| 12325124 | 32449 | ME00722-01 | NO | [NULL] | [NULL] | [NULL] | [NULL] |
| 12325124 | 32449 | ME00722-02 | NO | [NULL] | [NULL] | [NULL] | [NULL] |
| 12325124 | 32449 | ME00722-03 | NO | [NULL] | [NULL] | [NULL] | [NULL] |
| 12325124 | 32449 | ME00722-04 | NO | [NULL] | [NULL] | [NULL] | [NULL] |
| 12325124 | 326D | ME09203-01 | NO | [NULL] | [NULL] | [NULL] | [NULL] |
| 12325124 | 326D | ME09203-02 | NO | [NULL] | [NULL] | [NULL] | [NULL] |
| 12325124 | 326D | ME09203-03 | NO | [NULL] | [NULL] | [NULL] | [NULL] |
| 12325124 | 326D | ME09203-04 | NO | [NULL] | [NULL] | [NULL] | [NULL] |
| 12325124 | 326F | ME09436-01 | NO | [NULL] | [NULL] | [NULL] | [NULL] |
| 12325124 | 326F | ME09436-02 | NO | [NULL] | [NULL] | [NULL] | [NULL] |
| 12325124 | 326F | ME09436-03 | NO | [NULL] | [NULL] | [NULL] | [NULL] |
| 12325124 | 34414F | ME09361-01 | NO | [NULL] | [NULL] | [NULL] | [NULL] |
| 12325124 | 34414F | ME09361-02 | NO | [NULL] | [NULL] | [NULL] | [NULL] |
| 12325124 | 34414F | ME09361-03 | NO | [NULL] | [NULL] | [NULL] | [NULL] |
| 12325124 | 34414F | ME09361-04 | NO | [NULL] | [NULL] | [NULL] | [NULL] |
| 12325124 | 34414F | ME09361-05 | NO | [NULL] | [NULL] | [NULL] | [NULL] |
| 12325124 | 34414F | ME09361-06 | NO | [NULL] | [NULL] | [NULL] | [NULL] |
| 12325124 | 34414F | ME09361-07 | NO | [NULL] | [NULL] | [NULL] | [NULL] |
| 12325124 | 34414F | ME09361-08 | NO | [NULL] | [NULL] | [NULL] | [NULL] |
| 12325124 | 34414F | ME09361-09 | NO | [NULL] | [NULL] | [NULL] | [NULL] |
| 12325124 | 34414F | ME09361-10 | NO | [NULL] | [NULL] | [NULL] | [NULL] |
| 12325124 | 35S | ME04055-01 | NO | [NULL] | [NULL] | [NULL] | [NULL] |
| 12325124 | 35S | ME04055-02 | NO | [NULL] | [NULL] | [NULL] | [NULL] |
| 12325124 | 35S | ME04055-03 | NO | [NULL] | [NULL] | [NULL] | [NULL] |
| 12325124 | 35S | ME04055-04 | NO | [NULL] | [NULL] | [NULL] | [NULL] |
| 12325124 | 35S | ME04055-05 | YES | I20 | [NULL] | 6.50 | ROSETTE LEAVES-Shape-Oval |
| 12325124 | 35S | ME04055-05 | YES | I22 | [NULL] | 6.50 | ROSETTE LEAVES-Shape-Serrate |
| 12325124 | 35S | ME04055-05 | YES | I31 | [NULL] | 6.50 | ROSETTE LEAVES-Other |
| 12325124 | 35S | ME04055-05 | YES | J12 | [NULL] | 6.10 | WHOLE PLANT-Size-Large |
| 12325124 | 35S | ME04055-05 | YES | J12 | [NULL] | 6.50 | WHOLE PLANT-Size-Large |
| 12325124 | 35S | ME04055-05 | YES | L11 | [NULL] | 6.50 | FLOWERS-Other |
| 12325124 | 35S | ME04055-05 | YES | M13 | [NULL] | 6.10 | INFLORESCENCE-Flowering Time-Late Flowering |
| 12325124 | 35S | ME04055-05 | YES | M15 | [NULL] | 6.50 | INFLORESCENCE-Height-Tall |
| 12325124 | 35S | ME04055-05 | YES | M19 | [NULL] | 6.50 | INFLORESCENCE-Strength-Strong |
| 12325124 | 35S | ME04055-05 | YES | P04 | [NULL] | 6.50 | FERTILITY-Fertility-Reduced |
| 12325124 | 35S | ME04055-06 | NO | [NULL] | [NULL] | [NULL] | [NULL] |
| 12325124 | 35S | ME04055-07 | NO | [NULL] | [NULL] | [NULL] | [NULL] |
| 12325124 | 35S | ME04055-08 | YES | I20 | [NULL] | 1.14 | ROSETTE LEAVES-Shape-Oval |
| 12325124 | 35S | ME04055-08 | YES | J01 | [NULL] | 1.14 | WHOLE PLANT-Color-Dark Green |
| 12325124 | 35S | ME04055-08 | YES | M13 | [NULL] | 1.14 | INFLORESCENCE-Flowering Time-Late Flowering |
| 12325124 | 35S | ME04055-09 | NO | [NULL] | [NULL] | [NULL] | [NULL] |
| 12325212 | 32449 | ME00142-02 | NO | [NULL] | [NULL] | [NULL] | [NULL] |
| 12325212 | 32449 | ME00142-03 | NO | [NULL] | [NULL] | [NULL] | [NULL] |
| 12325212 | 32449 | ME00142-04 | NO | [NULL] | [NULL] | [NULL] | [NULL] |
| 12325212 | 35S | ME04782-01 | NO | [NULL] | [NULL] | [NULL] | [NULL] |
| 12325212 | 35S | ME04782-02 | NO | [NULL] | [NULL] | [NULL] | [NULL] |
| 12325212 | 35S | ME04782-03 | NO | [NULL] | [NULL] | [NULL] | [NULL] |
| 12325212 | 35S | ME04782-04 | YES | I22 | [NULL] | 5.10 | ROSETTE LEAVES-Shape-Serrate |
| 12325212 | 35S | ME04782-04 | YES | J01 | [NULL] | 5.10 | WHOLE PLANT-Color-Dark Green |
| 12325212 | 35S | ME04782-05 | NO | [NULL] | [NULL] | [NULL] | [NULL] |
| 12325212 | 35S | ME04782-06 | YES | J01 | [NULL] | 5.10 | WHOLE PLANT-Color-Dark Green |
| 12325212 | 35S | ME04782-07 | NO | [NULL] | [NULL] | [NULL] | [NULL] |
| 12325212 | 35S | ME04782-08 | YES | J01 | [NULL] | 5.10 | WHOLE PLANT-Color-Dark Green |
| 12325212 | 35S | ME04782-09 | NO | [NULL] | [NULL] | [NULL] | [NULL] |
| 12325212 | 35S | ME04782-10 | NO | [NULL] | [NULL] | [NULL] | [NULL] |
| 12325212 | 35S | ME05380-01 | NO | [NULL] | [NULL] | [NULL] | [NULL] |
| 12325212 | 35S | ME05380-02 | NO | [NULL] | [NULL] | [NULL] | [NULL] |
| 12325212 | 35S | ME05380-03 | YES | M14 | [NULL] | 6.50 | INFLORESCENCE-Height-Short |
| 12325212 | 35S | ME05380-03 | YES | M25 | [NULL] | 6.50 | INFLORESCENCE-Other |
| 12325212 | 35S | ME05380-03 | YES | N03 | [NULL] | 6.50 | SILIQUES-Shape-Bent |
| 12325212 | 35S | ME05380-03 | YES | N07 | [NULL] | 6.50 | SILIQUES-Other |
| 12325212 | 35S | ME05380-04 | NO | [NULL] | [NULL] | [NULL] | [NULL] |
| 12325212 | 35S | ME05380-05 | NO | [NULL] | [NULL] | [NULL] | [NULL] |
| 12325212 | 35S | ME05380-06 | NO | [NULL] | [NULL] | [NULL] | [NULL] |
| 12325212 | 35S | ME05380-07 | NO | [NULL] | [NULL] | [NULL] | [NULL] |
| 12325212 | 35S | ME05380-08 | NO | [NULL] | [NULL] | [NULL] | [NULL] |
| 12325212 | 35S | ME05380-09 | NO | [NULL] | [NULL] | [NULL] | [NULL] |
| 12325212 | 35S | ME05380-10 | NO | [NULL] | [NULL] | [NULL] | [NULL] |
| 12325212 | 35S | SR01185-01 | NO | [NULL] | [NULL] | [NULL] | [NULL] |
| 12325212 | 35S | SR01185-02 | NO | [NULL] | [NULL] | [NULL] | [NULL] |
| 12325212 | 35S | SR01185-03 | NO | [NULL] | [NULL] | [NULL] | [NULL] |
| 12325212 | 35S | SR01185-04 | NO | [NULL] | [NULL] | [NULL] | [NULL] |
| 12325212 | 35S | SR01185-05 | NO | [NULL] | [NULL] | [NULL] | [NULL] |
| 12325212 | 35S | SR01185-06 | NO | [NULL] | [NULL] | [NULL] | [NULL] |
| 12326370 | 35S | ME02983-01 | NO | [NULL] | [NULL] | [NULL] | [NULL] |
| 12326370 | 35S | ME02983-02 | YES | I08 | [NULL] | 6.50 | ROSETTE LEAVES-Disorganized Rosette- |
| | | | | | | | Disorganized Rosette |
| 12326370 | 35S | ME02983-02 | YES | I22 | [NULL] | 6.50 | ROSETTE LEAVES-Shape-Serrate |
| 12326370 | 35S | ME02983-02 | YES | J13 | [NULL] | 6.50 | WHOLE PLANT-Size-Small |
| 12326370 | 35S | ME02983-02 | YES | K03 | [NULL] | 6.50 | CAULINE LEAVES-Curled-Curled 1 |
| 12326370 | 35S | ME02983-02 | YES | K20 | [NULL] | 6.50 | CAULINE LEAVES-Shape-Serrate |
| 12326370 | 35S | ME02983-03 | YES | I18 | [NULL] | 6.50 | ROSETTE LEAVES-Shape-Lanceolate |
| 12326370 | 35S | ME02983-03 | YES | I22 | [NULL] | 6.50 | ROSETTE LEAVES-Shape-Serrate |
| 12326370 | 35S | ME02983-04 | NO | [NULL] | [NULL] | [NULL] | [NULL] |
| 12326370 | 35S | ME02983-05 | YES | I18 | [NULL] | 6.30 | ROSETTE LEAVES-Shape-Lanceolate |
| 12326370 | 35S | ME02983-05 | YES | I22 | [NULL] | 6.30 | ROSETTE LEAVES-Shape-Serrate |
| 12326370 | 35S | ME02983-05 | YES | J13 | [NULL] | 6.30 | WHOLE PLANT-Size-Small |
| 12326370 | 35S | ME02983-05 | YES | M13 | [NULL] | 6.30 | INFLORESCENCE-Flowering Time-Late Flowering |
| 12326370 | 35S | ME02983-06 | NO | [NULL] | [NULL] | [NULL] | [NULL] |
| 12326370 | 35S | ME02983-07 | NO | [NULL] | [NULL] | [NULL] | [NULL] |
| 12326370 | 35S | ME02983-08 | NO | [NULL] | [NULL] | [NULL] | [NULL] |
| 12326370 | 35S | ME02983-09 | NO | [NULL] | [NULL] | [NULL] | [NULL] |
| 12326370 | 35S | ME02983-10 | NO | [NULL] | [NULL] | [NULL] | [NULL] |
| 12327273 | 35S | ME04884-01 | YES | I31 | [NULL] | 6.30 | ROSETTE LEAVES-Other |
| 12327273 | 35S | ME04884-01 | YES | J01 | [NULL] | 5.10 | WHOLE PLANT-Color-Dark Green |
| 12327273 | 35S | ME04884-01 | YES | J02 | [NULL] | 5.10 | WHOLE PLANT-Color-High Anthocyanin |
| 12327273 | 35S | ME04884-01 | YES | J02 | [NULL] | 6.30 | WHOLE PLANT-Color-High Anthocyanin |
| 12327273 | 35S | ME04884-01 | YES | J13 | [NULL] | 5.10 | WHOLE PLANT-Size-Small |
| 12327273 | 35S | ME04884-01 | YES | J13 | [NULL] | 6.30 | WHOLE PLANT-Size-Small |
| 12327273 | 35S | ME04884-02 | NO | [NULL] | [NULL] | [NULL] | [NULL] |
| 12327273 | 35S | ME04884-03 | YES | J01 | [NULL] | 1.05 | WHOLE PLANT-Color-Dark Green |
| 12327273 | 35S | ME04884-03 | YES | J02 | [NULL] | 1.03 | WHOLE PLANT-Color-High Anthocyanin |
| 12327273 | 35S | ME04884-03 | YES | J02 | [NULL] | 1.05 | WHOLE PLANT-Color-High Anthocyanin |
| 12327273 | 35S | ME04884-03 | YES | J13 | [NULL] | 1.03 | WHOLE PLANT-Size-Small |
| 12327273 | 35S | ME04884-03 | YES | J13 | [NULL] | 1.05 | WHOLE PLANT-Size-Small |
| 12327273 | 35S | ME04884-03 | YES | J14 | [NULL] | 1.05 | WHOLE PLANT-Other |
| 12327273 | 35S | ME04884-03 | YES | M13 | [NULL] | 1.03 | INFLORESCENCE-Flowering Time-Late Flowering |
| 12327273 | 35S | ME04884-03 | YES | M13 | [NULL] | 1.05 | INFLORESCENCE-Flowering Time-Late Flowering |
| 12327273 | 35S | ME04884-04 | NO | [NULL] | [NULL] | [NULL] | [NULL] |
| 12327273 | 35S | ME04884-05 | NO | [NULL] | [NULL] | [NULL] | [NULL] |
| 12327273 | 35S | ME04884-06 | NO | [NULL] | [NULL] | [NULL] | [NULL] |
| 12327273 | 35S | ME04884-07 | NO | [NULL] | [NULL] | [NULL] | [NULL] |
| 12327273 | 35S | ME04884-08 | YES | I20 | [NULL] | 1.14 | ROSETTE LEAVES-Shape-Oval |
| 12327273 | 35S | ME04884-08 | YES | J01 | [NULL] | 1.07 | WHOLE PLANT-Color-Dark Green |
| 12327273 | 35S | ME04884-08 | YES | J02 | [NULL] | 1.07 | WHOLE PLANT-Color-High Anthocyanin |
| 12327273 | 35S | ME04884-08 | YES | J02 | [NULL] | 1.14 | WHOLE PLANT-Color-High Anthocyanin |
| 12327273 | 35S | ME04884-08 | YES | J13 | [NULL] | 1.07 | WHOLE PLANT-Size-Small |
| 12327273 | 35S | ME04884-08 | YES | J13 | [NULL] | 1.14 | WHOLE PLANT-Size-Small |
| 12327273 | 35S | ME04884-08 | YES | J14 | [NULL] | 1.07 | WHOLE PLANT-Other |
| 12327273 | 35S | ME04884-08 | YES | M13 | [NULL] | 1.07 | INFLORESCENCE-Flowering Time-Late Flowering |
| 12327273 | 35S | ME04884-08 | YES | M13 | [NULL] | 1.14 | INFLORESCENCE-Flowering Time-Late Flowering |
| 12327273 | 35S | ME04884-09 | NO | [NULL] | [NULL] | [NULL] | [NULL] |
| 12327273 | 35S | ME04884-10 | YES | I05 | [NULL] | 1.05 | ROSETTE LEAVES-Curled-Curled 3 |
| 12327273 | 35S | ME04884-10 | YES | J01 | [NULL] | 1.05 | WHOLE PLANT-Color-Dark Green |
| 12327273 | 35S | ME04884-10 | YES | J02 | [NULL] | 1.05 | WHOLE PLANT-Color-High Anthocyanin |
| 12327273 | 35S | ME04884-10 | YES | J13 | [NULL] | 1.05 | WHOLE PLANT-Size-Small |
| 12327273 | 35S | ME04884-10 | YES | J14 | [NULL] | 1.05 | WHOLE PLANT-Other |
| 12327273 | 35S | ME04884-10 | YES | M13 | [NULL] | 1.05 | INFLORESCENCE-Flowering Time-Late Flowering |
| 12327520 | 326D | ME09217-01 | YES | J13 | [NULL] | 6.50 | WHOLE PLANT-Size-Small |
| 12327520 | 326D | ME09217-01 | YES | M20 | [NULL] | 6.50 | INFLORESCENCE-Strength-Weak |
| 12327520 | 326D | ME09217-02 | YES | J13 | [NULL] | 6.50 | WHOLE PLANT-Size-Small |
| 12327520 | 326D | ME09217-02 | YES | M20 | [NULL] | 6.50 | INFLORESCENCE-Strength-Weak |
| 12327520 | 326D | ME09217-03 | YES | J13 | [NULL] | 6.50 | WHOLE PLANT-Size-Small |
| 12327520 | 326D | ME09217-03 | YES | M20 | [NULL] | 6.50 | INFLORESCENCE-Strength-Weak |
| 12327520 | 326D | ME09217-04 | YES | J13 | [NULL] | 6.50 | WHOLE PLANT-Size-Small |
| 12327520 | 326D | ME09217-04 | YES | M20 | [NULL] | 6.50 | INFLORESCENCE-Strength-Weak |
| 12327520 | 326D | ME09217-05 | YES | J13 | [NULL] | 6.50 | WHOLE PLANT-Size-Small |
| 12327520 | 326D | ME09217-05 | YES | M20 | [NULL] | 6.50 | INFLORESCENCE-Strength-Weak |
| 12327520 | 326D | ME09217-06 | YES | J13 | [NULL] | 6.50 | WHOLE PLANT-Size-Small |
| 12327520 | 326D | ME09217-06 | YES | M20 | [NULL] | 6.50 | INFLORESCENCE-Strength-Weak |
| 12327520 | 326D | ME09217-07 | YES | J13 | [NULL] | 6.50 | WHOLE PLANT-Size-Small |
| 12327520 | 326D | ME09217-07 | YES | M20 | [NULL] | 6.50 | INFLORESCENCE-Strength-Weak |
| 12327520 | 326D | ME09217-08 | YES | J13 | [NULL] | 6.50 | WHOLE PLANT-Size-Small |
| 12327520 | 326D | ME09217-08 | YES | M20 | [NULL] | 6.50 | INFLORESCENCE-Strength-Weak |
| 12327520 | 326D | ME09217-09 | YES | J13 | [NULL] | 6.50 | WHOLE PLANT-Size-Small |
| 12327520 | 326D | ME09217-09 | YES | M20 | [NULL] | 6.50 | INFLORESCENCE-Strength-Weak |
| 12327520 | 34414F | ME09375-01 | NO | [NULL] | [NULL] | [NULL] | [NULL] |
| 12327520 | 34414F | ME09375-02 | NO | [NULL] | [NULL] | [NULL] | [NULL] |
| 12327520 | 34414F | ME09375-03 | NO | [NULL] | [NULL] | [NULL] | [NULL] |
| 12327520 | 34414F | ME09375-04 | NO | [NULL] | [NULL] | [NULL] | [NULL] |
| 12327520 | 34414F | ME09375-05 | NO | [NULL] | [NULL] | [NULL] | [NULL] |
| 12327520 | 34414F | ME09375-06 | NO | [NULL] | [NULL] | [NULL] | [NULL] |
| 12327520 | 34414F | ME09375-07 | NO | [NULL] | [NULL] | [NULL] | [NULL] |
| 12327520 | 34414F | ME09375-08 | NO | [NULL] | [NULL] | [NULL] | [NULL] |
| 12327520 | 34414F | ME09375-09 | NO | [NULL] | [NULL] | [NULL] | [NULL] |
| 12327520 | 34414F | ME09375-10 | NO | [NULL] | [NULL] | [NULL] | [NULL] |
| 12327520 | 35S | ME03207-01 | YES | J01 | [NULL] | 6.50 | WHOLE PLANT-Color-Dark Green |
| 12327520 | 35S | ME03207-01 | YES | J13 | [NULL] | 6.50 | WHOLE PLANT-Size-Small |
| 12327520 | 35S | ME03207-02 | YES | J01 | [NULL] | 6.50 | WHOLE PLANT-Color-Dark Green |
| 12327520 | 35S | ME03207-02 | YES | J13 | [NULL] | 6.50 | WHOLE PLANT-Size-Small |
| 12327520 | 35S | ME03207-03 | YES | J01 | [NULL] | 6.50 | WHOLE PLANT-Color-Dark Green |
| 12327520 | 35S | ME03207-03 | YES | J13 | [NULL] | 6.50 | WHOLE PLANT-Size-Small |
| 12327520 | 35S | ME03207-04 | YES | J01 | [NULL] | 6.50 | WHOLE PLANT-Color-Dark Green |
| 12327520 | 35S | ME03207-04 | YES | J13 | [NULL] | 6.50 | WHOLE PLANT-Size-Small |
| 12327520 | 35S | ME03207-04 | YES | M13 | [NULL] | 6.50 | INFLORESCENCE-Flowering Time-Late Flowering |
| 12327520 | 35S | ME03207-05 | YES | J01 | [NULL] | 6.50 | WHOLE PLANT-Color-Dark Green |
| 12327520 | 35S | ME03207-05 | YES | J13 | [NULL] | 6.50 | WHOLE PLANT-Size-Small |
| 12327520 | 35S | ME03207-06 | YES | J01 | [NULL] | 6.50 | WHOLE PLANT-Color-Dark Green |
| 12327520 | 35S | ME03207-06 | YES | J13 | [NULL] | 6.50 | WHOLE PLANT-Size-Small |
| 12327520 | 35S | ME03207-07 | YES | J01 | [NULL] | 6.50 | WHOLE PLANT-Color-Dark Green |
| 12327520 | 35S | ME03207-07 | YES | J13 | [NULL] | 6.50 | WHOLE PLANT-Size-Small |
| 12327520 | 35S | ME03207-08 | NO | [NULL] | [NULL] | [NULL] | [NULL] |
| 12327520 | 35S | ME03207-09 | YES | J01 | [NULL] | 5.10 | WHOLE PLANT-Color-Dark Green |
| 12327520 | 35S | ME03207-09 | YES | J13 | [NULL] | 5.10 | WHOLE PLANT-Size-Small |
| 12327520 | 35S | ME03207-10 | NO | [NULL] | [NULL] | [NULL] | [NULL] |
| 12327663 | 326D | ME09202-01 | NO | [NULL] | [NULL] | [NULL] | [NULL] |
| 12327663 | 326D | ME09202-02 | NO | [NULL] | [NULL] | [NULL] | [NULL] |
| 12327663 | 326D | ME09202-03 | NO | [NULL] | [NULL] | [NULL] | [NULL] |
| 12327663 | 326D | ME09202-04 | NO | [NULL] | [NULL] | [NULL] | [NULL] |
| 12327663 | 326D | ME09202-05 | YES | J12 | [NULL] | 6.30 | WHOLE PLANT-Size-Large |
| 12327663 | 326D | ME09202-06 | YES | J12 | [NULL] | 6.30 | WHOLE PLANT-Size-Large |
| 12327663 | 326D | ME09202-07 | YES | J12 | [NULL] | 6.30 | WHOLE PLANT-Size-Large |
| 12327663 | 326D | ME09202-08 | YES | J12 | [NULL] | 6.30 | WHOLE PLANT-Size-Large |
| 12327663 | 34414F | ME09360-01 | YES | I22 | [NULL] | 6.30 | ROSETTE LEAVES-Shape-Serrate |
| 12327663 | 34414F | ME09360-01 | YES | J13 | [NULL] | 6.30 | WHOLE PLANT-Size-Small |
| 12327663 | 34414F | ME09360-02 | YES | I22 | [NULL] | 6.30 | ROSETTE LEAVES-Shape-Serrate |
| 12327663 | 34414F | ME09360-02 | YES | J13 | [NULL] | 6.30 | WHOLE PLANT-Size-Small |
| 12327663 | 34414F | ME09360-03 | YES | I22 | [NULL] | 6.30 | ROSETTE LEAVES-Shape-Serrate |
| 12327663 | 34414F | ME09360-03 | YES | J13 | [NULL] | 6.30 | WHOLE PLANT-Size-Small |
| 12327663 | 34414F | ME09360-04 | YES | I22 | [NULL] | 6.30 | ROSETTE LEAVES-Shape-Serrate |
| 12327663 | 34414F | ME09360-04 | YES | J13 | [NULL] | 6.30 | WHOLE PLANT-Size-Small |
| 12327663 | 34414F | ME09360-05 | NO | [NULL] | [NULL] | [NULL] | [NULL] |
| 12327663 | 34414F | ME09360-06 | YES | I22 | [NULL] | 6.30 | ROSETTE LEAVES-Shape-Serrate |
| 12327663 | 34414F | ME09360-06 | YES | J13 | [NULL] | 6.30 | WHOLE PLANT-Size-Small |
| 12327663 | 34414F | ME09360-07 | YES | I22 | [NULL] | 6.30 | ROSETTE LEAVES-Shape-Serrate |
| 12327663 | 34414F | ME09360-07 | YES | J13 | [NULL] | 6.30 | WHOLE PLANT-Size-Small |
| 12327663 | 34414F | ME09360-08 | YES | I22 | [NULL] | 6.30 | ROSETTE LEAVES-Shape-Serrate |
| 12327663 | 34414F | ME09360-08 | YES | J13 | [NULL] | 6.30 | WHOLE PLANT-Size-Small |
| 12327663 | 34414F | ME09360-09 | NO | [NULL] | [NULL] | [NULL] | [NULL] |
| 12327663 | 34414F | ME09360-10 | YES | I22 | [NULL] | 6.30 | ROSETTE LEAVES-Shape-Serrate |
| 12327663 | 34414F | ME09360-10 | YES | J13 | [NULL] | 6.30 | WHOLE PLANT-Size-Small |
| 12327663 | 35S | ME01313-01 | NO | [NULL] | [NULL] | [NULL] | [NULL] |
| 12327663 | 35S | ME01313-02 | QUESTIONABLE | I08 | [NULL] | 1.08 | ROSETTE LEAVES-Disorganized |
| | | | | | | | Rosette-Disorganized Rosette |
| 12327663 | 35S | ME01313-02 | QUESTIONABLE | I31 | [NULL] | 5.10 | ROSETTE LEAVES-Other |
| 12327663 | 35S | ME01313-02 | QUESTIONABLE | J08 | [NULL] | 6.30 | WHOLE PLANT-Dwarf-Misc. Dwarf |
| 12327663 | 35S | ME01313-02 | QUESTIONABLE | J09 | [NULL] | 6.50 | WHOLE PLANT-Rosette Shape-Bushy |
| 12327663 | 35S | ME01313-02 | QUESTIONABLE | J13 | [NULL] | 6.50 | WHOLE PLANT-Size-Small |
| 12327663 | 35S | ME01313-02 | QUESTIONABLE | M14 | [NULL] | 6.50 | INFLORESCENCE-Height-Short |
| 12327663 | 35S | ME01313-02 | QUESTIONABLE | P04 | [NULL] | 6.50 | FERTILITY-Fertility-Reduced |
| 12327663 | 35S | ME01313-03 | NO | [NULL] | [NULL] | [NULL] | [NULL] |
| 12327663 | 35S | ME01313-04 | NO | [NULL] | [NULL] | [NULL] | [NULL] |
| 12327663 | 35S | ME01313-05 | NO | [NULL] | [NULL] | [NULL] | [NULL] |
| 12327663 | 35S | ME01313-06 | NO | [NULL] | [NULL] | [NULL] | [NULL] |
| 12327663 | 35S | ME01313-07 | NO | [NULL] | [NULL] | [NULL] | [NULL] |
| 12327663 | 35S | ME01313-08 | NO | [NULL] | [NULL] | [NULL] | [NULL] |
| 12327663 | 35S | ME01313-09 | NO | [NULL] | [NULL] | [NULL] | [NULL] |
| 12327663 | 35S | ME01313-10 | NO | [NULL] | [NULL] | [NULL] | [NULL] |
| 12327663 | 35S | ME02090-01 | NO | [NULL] | [NULL] | [NULL] | [NULL] |
| 12327663 | 35S | ME02090-02 | NO | [NULL] | [NULL] | [NULL] | [NULL] |
| 12327663 | 35S | ME02090-03 | NO | [NULL] | [NULL] | [NULL] | [NULL] |
| 12327663 | 35S | ME02090-04 | NO | [NULL] | [NULL] | [NULL] | [NULL] |
| 12327663 | 35S | ME02090-05 | NO | [NULL] | [NULL] | [NULL] | [NULL] |
| 12327663 | 35S | ME02090-06 | NO | [NULL] | [NULL] | [NULL] | [NULL] |
| 12327663 | 35S | ME02090-07 | NO | [NULL] | [NULL] | [NULL] | [NULL] |
| 12327663 | 35S | ME02090-08 | NO | [NULL] | [NULL] | [NULL] | [NULL] |
| 12327663 | 35S | ME02090-09 | QUESTIONABLE | I04 | [NULL] | 5.10 | ROSETTE LEAVES-Curled-Curled 2 |
| 12327663 | 35S | ME02090-09 | QUESTIONABLE | I08 | [NULL] | 5.10 | ROSETTE LEAVES-Disorganized |
| | | | | | | | Rosette-Disorganized Rosette |
| 12327663 | 35S | ME02090-09 | QUESTIONABLE | J13 | [NULL] | 5.10 | WHOLE PLANT-Size-Small |
| 12327663 | 35S | ME02090-09 | QUESTIONABLE | M13 | [NULL] | 5.10 | INFLORESCENCE-Flowering Time-Late |
| | | | | | | | Flowering |
| 12327663 | 35S | ME02090-09 | QUESTIONABLE | M25 | [NULL] | 5.10 | INFLORESCENCE-Other |
| 12327663 | 35S | ME02090-10 | NO | [NULL] | [NULL] | [NULL] | [NULL] |
| 12327663 | 35S | ME02129-01 | NO | [NULL] | [NULL] | [NULL] | [NULL] |
| 12327663 | 35S | ME02129-02 | NO | [NULL] | [NULL] | [NULL] | [NULL] |
| 12327663 | 35S | ME02129-03 | NO | [NULL] | [NULL] | [NULL] | [NULL] |
| 12327663 | 35S | ME02129-04 | NO | [NULL] | [NULL] | [NULL] | [NULL] |
| 12327663 | 35S | ME02129-05 | NO | [NULL] | [NULL] | [NULL] | [NULL] |
| 12327663 | 35S | ME02129-06 | YES | I31 | [NULL] | 1.12 | ROSETTE LEAVES-Other |
| 12327663 | 35S | ME02129-06 | YES | J13 | [NULL] | 1.12 | WHOLE PLANT-Size-Small |
| 12327663 | 35S | ME02129-07 | YES | I31 | [NULL] | 1.12 | ROSETTE LEAVES-Other |
| 12327663 | 35S | ME02129-08 | NO | [NULL] | [NULL] | [NULL] | [NULL] |
| 12327663 | 35S | ME02129-09 | NO | [NULL] | [NULL] | [NULL] | [NULL] |
| 12327663 | 35S | ME02129-10 | NO | [NULL] | [NULL] | [NULL] | [NULL] |
| 12327921 | 35S | ME04940-01 | NO | [NULL] | [NULL] | [NULL] | [NULL] |
| 12327921 | 35S | ME04940-02 | NO | [NULL] | [NULL] | [NULL] | [NULL] |
| 12327921 | 35S | ME04940-03 | YES | I20 | [NULL] | 1.14 | ROSETTE LEAVES-Shape-Oval |
| 12327921 | 35S | ME04940-03 | YES | J13 | [NULL] | 1.14 | WHOLE PLANT-Size-Small |
| 12327921 | 35S | ME04940-03 | YES | J14 | [NULL] | 1.14 | WHOLE PLANT-Other |
| 12327921 | 35S | ME04940-04 | NO | [NULL] | [NULL] | [NULL] | [NULL] |
| 12327921 | 35S | ME04940-05 | NO | [NULL] | [NULL] | [NULL] | [NULL] |
| 12327921 | 35S | ME04940-06 | YES | I20 | [NULL] | 5.10 | ROSETTE LEAVES-Shape-Oval |
| 12327921 | 35S | ME04940-06 | YES | J03 | [NULL] | 5.10 | WHOLE PLANT-Color-Yellow-Green Viable 1 |
| 12327921 | 35S | ME04940-06 | YES | J13 | [NULL] | 5.10 | WHOLE PLANT-Size-Small |
| 12327921 | 35S | ME04940-07 | NO | [NULL] | [NULL] | [NULL] | [NULL] |
| 12327921 | 35S | ME04940-08 | NO | [NULL] | [NULL] | [NULL] | [NULL] |
| 12327921 | 35S | ME04940-09 | NO | [NULL] | [NULL] | [NULL] | [NULL] |
| 12327921 | 35S | ME04940-10 | YES | I20 | [NULL] | 1.14 | ROSETTE LEAVES-Shape-Oval |
| 12327921 | 35S | ME04940-10 | YES | J13 | [NULL] | 1.14 | WHOLE PLANT-Size-Small |
| 12327921 | 35S | ME07256-01 | NO | [NULL] | [NULL] | [NULL] | [NULL] |
| 12327921 | 35S | ME07256-02 | NO | [NULL] | [NULL] | [NULL] | [NULL] |
| 12327921 | 35S | ME07256-03 | NO | [NULL] | [NULL] | [NULL] | [NULL] |
| 12327921 | 35S | ME07256-04 | NO | [NULL] | [NULL] | [NULL] | [NULL] |
| 12327921 | 35S | ME07256-05 | NO | [NULL] | [NULL] | [NULL] | [NULL] |
| 12327921 | 35S | ME07256-06 | NO | [NULL] | [NULL] | [NULL] | [NULL] |
| 12327921 | 35S | ME07256-07 | NO | [NULL] | [NULL] | [NULL] | [NULL] |
| 12327921 | 35S | ME07256-08 | NO | [NULL] | [NULL] | [NULL] | [NULL] |
| 12327921 | 35S | ME07256-09 | NO | [NULL] | [NULL] | [NULL] | [NULL] |
| 12328234 | 35S | ME07241-01 | NO | [NULL] | [NULL] | [NULL] | [NULL] |
| 12328234 | 35S | ME07241-02 | YES | M10 | [NULL] | 6.50 | INFLORESCENCE-Branching-Reduced Apical |
| | | | | | | | Dominance |
| 12328234 | 35S | ME07241-02 | YES | M17 | [NULL] | 6.50 | INFLORESCENCE-Internode Length-Short Internode |
| 12328234 | 35S | ME07241-03 | YES | I20 | [NULL] | 1.06 | ROSETTE LEAVES-Shape-Oval |
| 12328234 | 35S | ME07241-03 | YES | J01 | [NULL] | 1.06 | WHOLE PLANT-Color-Dark Green |
| 12328234 | 35S | ME07241-03 | YES | M10 | [NULL] | 6.50 | INFLORESCENCE-Branching-Reduced Apical |
| | | | | | | | Dominance |
| 12328234 | 35S | ME07241-03 | YES | M17 | [NULL] | 6.50 | INFLORESCENCE-Internode Length-Short Internode |
| 12328234 | 35S | ME07241-04 | NO | [NULL] | [NULL] | [NULL] | [NULL] |
| 12328234 | 35S | ME07241-05 | NO | [NULL] | [NULL] | [NULL] | [NULL] |
| 12328234 | 35S | ME07241-06 | YES | M10 | [NULL] | 6.50 | INFLORESCENCE-Branching-Reduced Apical |
| | | | | | | | Dominance |
| 12328234 | 35S | ME07241-06 | YES | M17 | [NULL] | 6.50 | INFLORESCENCE-Internode Length-Short Internode |
| 12328234 | 35S | ME07241-07 | NO | [NULL] | [NULL] | [NULL] | [NULL] |
| 12328234 | 35S | ME07241-08 | NO | [NULL] | [NULL] | [NULL] | [NULL] |
| 12328234 | 35S | ME07241-09 | YES | I20 | [NULL] | 1.06 | ROSETTE LEAVES-Shape-Oval |
| 12328234 | 35S | ME07241-09 | YES | J01 | [NULL] | 1.06 | WHOLE PLANT-Color-Dark Green |
| 12328234 | 35S | ME07241-09 | YES | M10 | [NULL] | 6.50 | INFLORESCENCE-Branching-Reduced Apical |
| | | | | | | | Dominance |
| 12328234 | 35S | ME07241-09 | YES | M17 | [NULL] | 6.50 | INFLORESCENCE-Internode Length-Short Internode |
| 12328728 | 35S | ME04092-01 | YES | R02 | [NULL] | 6.90 | SENESCENCE TIME-Senescence Time-Late Senescence |
| 12328728 | 35S | ME04092-02 | YES | R02 | [NULL] | 6.90 | SENESCENCE TIME-Senescence Time-Late Senescence |
| 12328728 | 35S | ME04092-03 | YES | R02 | [NULL] | 6.90 | SENESCENCE TIME-Senescence Time-Late Senescence |
| 12328728 | 35S | ME04092-04 | NO | [NULL] | [NULL] | [NULL] | [NULL] |
| 12328756 | 35S | ME04098-01 | NO | [NULL] | [NULL] | [NULL] | [NULL] |
| 12328756 | 35S | ME04098-02 | NO | [NULL] | [NULL] | [NULL] | [NULL] |
| 12328756 | 35S | ME04098-03 | NO | [NULL] | [NULL] | [NULL] | [NULL] |
| 12328756 | 35S | ME04098-04 | NO | [NULL] | [NULL] | [NULL] | [NULL] |
| 12328756 | 35S | ME04098-05 | NO | [NULL] | [NULL] | [NULL] | [NULL] |
| 12328756 | 35S | ME04098-06 | YES | N02 | [NULL] | 6.50 | SILIQUES-Length-Short |
| 12328756 | 35S | ME04098-06 | YES | P04 | [NULL] | 6.50 | FERTILITY-Fertility-Reduced |
| 12328756 | 35S | ME04098-07 | YES | J13 | [NULL] | 6.50 | WHOLE PLANT-Size-Small |
| 12328756 | 35S | ME04098-07 | YES | P05 | [NULL] | 6.50 | FERTILITY-Fertility-Sterile |
| 12328756 | 35S | ME04098-08 | YES | M15 | [NULL] | 6.90 | INFLORESCENCE-Height-Tall |
| 12328756 | 35S | ME04098-08 | YES | N02 | [NULL] | 6.90 | SILIQUES-Length-Short |
| 12328756 | 35S | ME04098-08 | YES | P04 | [NULL] | 6.90 | FERTILITY-Fertility-Reduced |
| 12328756 | 35S | ME04098-09 | NO | [NULL] | [NULL] | [NULL] | [NULL] |
| 12328756 | 35S | ME04098-10 | NO | [NULL] | [NULL] | [NULL] | [NULL] |
| 12330060 | 32449 | ME00486-01 | NO | [NULL] | [NULL] | [NULL] | [NULL] |
| 12330060 | 32449 | ME00486-02 | NO | [NULL] | [NULL] | [NULL] | [NULL] |
| 12330060 | 32449 | ME00486-03 | NO | [NULL] | [NULL] | [NULL] | [NULL] |
| 12330060 | 32449 | ME00486-04 | NO | [NULL] | [NULL] | [NULL] | [NULL] |
| 12330060 | 32449 | ME00486-05 | NO | [NULL] | [NULL] | [NULL] | [NULL] |
| 12330060 | 35S | ME04356-01 | NO | [NULL] | [NULL] | [NULL] | [NULL] |
| 12330060 | 35S | ME04356-02 | YES | I05 | [NULL] | 6.10 | ROSETTE LEAVES-Curled-Curled 3 |
| 12330060 | 35S | ME04356-02 | YES | J03 | [NULL] | 6.10 | WHOLE PLANT-Color-Yellow-Green Viable 1 |
| 12330060 | 35S | ME04356-02 | YES | J03 | [NULL] | 6.30 | WHOLE PLANT-Color-Yellow-Green Viable 1 |
| 12330060 | 35S | ME04356-02 | YES | J13 | [NULL] | 6.10 | WHOLE PLANT-Size-Small |
| 12330060 | 35S | ME04356-02 | YES | J13 | [NULL] | 6.30 | WHOLE PLANT-Size-Small |
| 12330060 | 35S | ME04356-03 | NO | [NULL] | [NULL] | [NULL] | [NULL] |
| 12330060 | 35S | ME04356-04 | YES | I18 | [NULL] | 6.30 | ROSETTE LEAVES-Shape-Lanceolate |
| 12330060 | 35S | ME04356-04 | YES | J03 | [NULL] | 6.10 | WHOLE PLANT-Color-Yellow-Green Viable 1 |
| 12330060 | 35S | ME04356-04 | YES | J13 | [NULL] | 6.10 | WHOLE PLANT-Size-Small |
| 12330060 | 35S | ME04356-04 | YES | J13 | [NULL] | 6.30 | WHOLE PLANT-Size-Small |
| 12330060 | 35S | ME04356-05 | YES | I04 | [NULL] | 6.10 | ROSETTE LEAVES-Curled-Curled 2 |
| 12330060 | 35S | ME04356-05 | YES | I31 | [NULL] | 6.30 | ROSETTE LEAVES-Other |
| 12330060 | 35S | ME04356-05 | YES | J03 | [NULL] | 6.10 | WHOLE PLANT-Color-Yellow-Green Viable 1 |
| 12330060 | 35S | ME04356-05 | YES | J13 | [NULL] | 6.10 | WHOLE PLANT-Size-Small |
| 12330060 | 35S | ME04356-06 | NO | [NULL] | [NULL] | [NULL] | [NULL] |
| 12331498 | 35S | ME05967-01 | NO | [NULL] | [NULL] | [NULL] | [NULL] |
| 12331498 | 35S | ME05967-02 | NO | [NULL] | [NULL] | [NULL] | [NULL] |
| 12331498 | 35S | ME05967-03 | YES | I20 | [NULL] | 1.07 | ROSETTE LEAVES-Shape-Oval |
| 12331498 | 35S | ME05967-04 | NO | [NULL] | [NULL] | [NULL] | [NULL] |
| 12331498 | 35S | ME05967-05 | NO | [NULL] | [NULL] | [NULL] | [NULL] |
| 12331498 | 35S | ME05967-06 | YES | I20 | [NULL] | 1.05 | ROSETTE LEAVES-Shape-Oval |
| 12331498 | 35S | ME05967-06 | YES | J01 | [NULL] | 1.05 | WHOLE PLANT-Color-Dark Green |
| 12331498 | 35S | ME05967-06 | YES | J13 | [NULL] | 1.05 | WHOLE PLANT-Size-Small |
| 12331498 | 35S | ME05967-06 | YES | M13 | [NULL] | 1.05 | INFLORESCENCE-Flowering Time-Late Flowering |
| 12331498 | 35S | ME05967-07 | NO | [NULL] | [NULL] | [NULL] | [NULL] |
| 12331498 | 35S | ME05967-08 | YES | I20 | [NULL] | 1.13 | ROSETTE LEAVES-Shape-Oval |
| 12331498 | 35S | ME05967-08 | YES | I31 | [NULL] | 1.13 | ROSETTE LEAVES-Other |
| 12331498 | 35S | ME05967-09 | NO | [NULL] | [NULL] | [NULL] | [NULL] |
| 12331498 | 35S | ME05967-10 | NO | [NULL] | [NULL] | [NULL] | [NULL] |
| 12332172 | 35S | ME02626-01 | QUESTIONABLE | P04 | [NULL] | 6.10 | FERTILITY-Fertility-Reduced |
| 12332172 | 35S | ME02626-02 | NO | [NULL] | [NULL] | [NULL] | [NULL] |
| 12332172 | 35S | ME02626-03 | YES | I31 | [NULL] | 6.10 | ROSETTE LEAVES-Other |
| 12332172 | 35S | ME02626-03 | YES | J14 | [NULL] | 6.10 | WHOLE PLANT-Other |
| 12332172 | 35S | ME02626-03 | YES | P04 | [NULL] | 6.10 | FERTILITY-Fertility-Reduced |
| 12332172 | 35S | ME02626-04 | NO | [NULL] | [NULL] | [NULL] | [NULL] |
| 12332172 | 35S | ME02626-05 | NO | [NULL] | [NULL] | [NULL] | [NULL] |
| 12332172 | 35S | ME02626-06 | NO | [NULL] | [NULL] | [NULL] | [NULL] |
| 12332172 | 35S | ME02626-07 | NO | [NULL] | [NULL] | [NULL] | [NULL] |
| 12332172 | 35S | ME02626-08 | YES | J14 | [NULL] | 6.30 | WHOLE PLANT-Other |
| 12332172 | 35S | ME02626-09 | YES | I22 | [NULL] | 6.30 | ROSETTE LEAVES-Shape-Serrate |
| 12332172 | 35S | ME02626-09 | YES | J14 | [NULL] | 6.30 | WHOLE PLANT-Other |
| 12332172 | 35S | ME02626-10 | NO | [NULL] | [NULL] | [NULL] | [NULL] |
| 12333831 | 35S | ME04856-01 | NO | [NULL] | [NULL] | [NULL] | [NULL] |
| 12333831 | 35S | ME04856-02 | NO | [NULL] | [NULL] | [NULL] | [NULL] |
| 12333831 | 35S | ME04856-03 | NO | [NULL] | [NULL] | [NULL] | [NULL] |
| 12333831 | 35S | ME04856-04 | NO | [NULL] | [NULL] | [NULL] | [NULL] |
| 12333831 | 35S | ME04856-05 | NO | [NULL] | [NULL] | [NULL] | [NULL] |
| 12333831 | 35S | ME04856-06 | YES | I20 | [NULL] | 6.10 | ROSETTE LEAVES-Shape-Oval |
| 12333831 | 35S | ME04856-06 | YES | I31 | [NULL] | 6.10 | ROSETTE LEAVES-Other |
| 12333831 | 35S | ME04856-06 | YES | J01 | [NULL] | 5.10 | WHOLE PLANT-Color-Dark Green |
| 12333831 | 35S | ME04856-06 | YES | J01 | [NULL] | 6.10 | WHOLE PLANT-Color-Dark Green |
| 12333831 | 35S | ME04856-06 | YES | J13 | [NULL] | 5.10 | WHOLE PLANT-Size-Small |
| 12333831 | 35S | ME04856-06 | YES | J13 | [NULL] | 6.10 | WHOLE PLANT-Size-Small |
| 12333831 | 35S | ME04856-06 | YES | M14 | [NULL] | 6.10 | INFLORESCENCE-Height-Short |
| 12333831 | 35S | ME04856-06 | YES | M20 | [NULL] | 6.10 | INFLORESCENCE-Strength-Weak |
| 12333831 | 35S | ME04856-07 | YES | I22 | [NULL] | 6.00 | ROSETTE LEAVES-Shape-Serrate |
| 12333831 | 35S | ME04856-07 | YES | M14 | [NULL] | 6.00 | INFLORESCENCE-Height-Short |
| 12333831 | 35S | ME04856-07 | YES | M19 | [NULL] | 6.00 | INFLORESCENCE-Strength-Strong |
| 12333831 | 35S | ME04856-08 | YES | I22 | [NULL] | 5.10 | ROSETTE LEAVES-Shape-Serrate |
| 12333831 | 35S | ME04856-08 | YES | I31 | [NULL] | 5.10 | ROSETTE LEAVES-Other |
| 12333831 | 35S | ME04856-08 | YES | J01 | [NULL] | 5.10 | WHOLE PLANT-Color-Dark Green |
| 12333831 | 35S | ME04856-08 | YES | M14 | [NULL] | 5.10 | INFLORESCENCE-Height-Short |
| 12333831 | 35S | ME04856-08 | YES | M19 | [NULL] | 5.10 | INFLORESCENCE-Strength-Strong |
| 12333831 | 35S | ME04856-09 | NO | [NULL] | [NULL] | [NULL] | [NULL] |
| 12333866 | 13879F | ME04683-01 | YES | I07 | [NULL] | 6.50 | ROSETTE LEAVES-Curled-Curled 5 |
| 12333866 | 13879F | ME04683-01 | YES | I08 | [NULL] | 6.50 | ROSETTE LEAVES-Disorganized Rosette- |
| | | | | | | | Disorganized Rosette |
| 12333866 | 13879F | ME04683-01 | YES | I18 | [NULL] | 6.50 | ROSETTE LEAVES-Shape-Lanceolate |
| 12333866 | 13879F | ME04683-01 | YES | I31 | [NULL] | 6.50 | ROSETTE LEAVES-Other |
| 12333866 | 13879F | ME04683-01 | YES | J13 | [NULL] | 6.50 | WHOLE PLANT-Size-Small |
| 12333866 | 13879F | ME04683-01 | YES | J14 | [NULL] | 6.50 | WHOLE PLANT-Other |
| 12333866 | 13879F | ME04683-01 | YES | K07 | [NULL] | 6.50 | CAULINE LEAVES-Curled-Curled 5 |
| 12333866 | 13879F | ME04683-01 | YES | K16 | [NULL] | 6.50 | CAULINE LEAVES-Shape-Lanceolate |
| 12333866 | 13879F | ME04683-01 | YES | K31 | [NULL] | 6.50 | CAULINE LEAVES-Other |
| 12333866 | 13879F | ME04683-01 | YES | L11 | [NULL] | 6.50 | FLOWERS-Other |
| 12333866 | 13879F | ME04683-01 | YES | M14 | [NULL] | 6.50 | INFLORESCENCE-Height-Short |
| 12333866 | 13879F | ME04683-01 | YES | M17 | [NULL] | 6.50 | INFLORESCENCE-Internode Length-Short |
| | | | | | | | Internode |
| 12333866 | 13879F | ME04683-01 | YES | M25 | [NULL] | 6.50 | INFLORESCENCE-Other |
| 12333866 | 13879F | ME04683-01 | YES | N07 | [NULL] | 6.50 | SILIQUES-Other |
| 12333866 | 13879F | ME04683-02 | YES | I07 | [NULL] | 6.50 | ROSETTE LEAVES-Curled-Curled 5 |
| 12333866 | 13879F | ME04683-02 | YES | I08 | [NULL] | 6.50 | ROSETTE LEAVES-Disorganized Rosette- |
| | | | | | | | Disorganized Rosette |
| 12333866 | 13879F | ME04683-02 | YES | I18 | [NULL] | 6.50 | ROSETTE LEAVES-Shape-Lanceolate |
| 12333866 | 13879F | ME04683-02 | YES | I31 | [NULL] | 6.50 | ROSETTE LEAVES-Other |
| 12333866 | 13879F | ME04683-02 | YES | J13 | [NULL] | 6.50 | WHOLE PLANT-Size-Small |
| 12333866 | 13879F | ME04683-02 | YES | J14 | [NULL] | 6.50 | WHOLE PLANT-Other |
| 12333866 | 13879F | ME04683-02 | YES | K07 | [NULL] | 6.50 | CAULINE LEAVES-Curled-Curled 5 |
| 12333866 | 13879F | ME04683-02 | YES | K16 | [NULL] | 6.50 | CAULINE LEAVES-Shape-Lanceolate |
| 12333866 | 13879F | ME04683-02 | YES | K31 | [NULL] | 6.50 | CAULINE LEAVES-Other |
| 12333866 | 13879F | ME04683-02 | YES | L11 | [NULL] | 6.50 | FLOWERS-Other |
| 12333866 | 13879F | ME04683-02 | YES | M14 | [NULL] | 6.50 | INFLORESCENCE-Height-Short |
| 12333866 | 13879F | ME04683-02 | YES | M17 | [NULL] | 6.50 | INFLORESCENCE-Internode Length-Short |
| | | | | | | | Internode |
| 12333866 | 13879F | ME04683-02 | YES | M25 | [NULL] | 6.50 | INFLORESCENCE-Other |
| 12333866 | 13879F | ME04683-02 | YES | N07 | [NULL] | 6.50 | SILIQUES-Other |
| 12333866 | 13879F | ME04683-03 | YES | I07 | [NULL] | 6.50 | ROSETTE LEAVES-Curled-Curled 5 |
| 12333866 | 13879F | ME04683-03 | YES | I08 | [NULL] | 6.50 | ROSETTE LEAVES-Disorganized Rosette- |
| | | | | | | | Disorganized Rosette |
| 12333866 | 13879F | ME04683-03 | YES | I18 | [NULL] | 6.50 | ROSETTE LEAVES-Shape-Lanceolate |
| 12333866 | 13879F | ME04683-03 | YES | I31 | [NULL] | 6.50 | ROSETTE LEAVES-Other |
| 12333866 | 13879F | ME04683-03 | YES | J13 | [NULL] | 6.50 | WHOLE PLANT-Size-Small |
| 12333866 | 13879F | ME04683-03 | YES | J14 | [NULL] | 6.50 | WHOLE PLANT-Other |
| 12333866 | 13879F | ME04683-03 | YES | K07 | [NULL] | 6.50 | CAULINE LEAVES-Curled-Curled 5 |
| 12333866 | 13879F | ME04683-03 | YES | K16 | [NULL] | 6.50 | CAULINE LEAVES-Shape-Lanceolate |
| 12333866 | 13879F | ME04683-03 | YES | K31 | [NULL] | 6.50 | CAULINE LEAVES-Other |
| 12333866 | 13879F | ME04683-03 | YES | L11 | [NULL] | 6.50 | FLOWERS-Other |
| 12333866 | 13879F | ME04683-03 | YES | M14 | [NULL] | 6.50 | INFLORESCENCE-Height-Short |
| 12333866 | 13879F | ME04683-03 | YES | M17 | [NULL] | 6.50 | INFLORESCENCE-Internode Length-Short |
| | | | | | | | Internode |
| 12333866 | 13879F | ME04683-03 | YES | M25 | [NULL] | 6.50 | INFLORESCENCE-Other |
| 12333866 | 13879F | ME04683-03 | YES | N07 | [NULL] | 6.50 | SILIQUES-Other |
| 12333866 | 13879F | ME04683-04 | YES | I07 | [NULL] | 6.50 | ROSETTE LEAVES-Curled-Curled 5 |
| 12333866 | 13879F | ME04683-04 | YES | I08 | [NULL] | 6.50 | ROSETTE LEAVES-Disorganized Rosette- |
| | | | | | | | Disorganized Rosette |
| 12333866 | 13879F | ME04683-04 | YES | I18 | [NULL] | 6.50 | ROSETTE LEAVES-Shape-Lanceolate |
| 12333866 | 13879F | ME04683-04 | YES | I31 | [NULL] | 6.50 | ROSETTE LEAVES-Other |
| 12333866 | 13879F | ME04683-04 | YES | J13 | [NULL] | 6.50 | WHOLE PLANT-Size-Small |
| 12333866 | 13879F | ME04683-04 | YES | J14 | [NULL] | 6.50 | WHOLE PLANT-Other |
| 12333866 | 13879F | ME04683-04 | YES | K07 | [NULL] | 6.50 | CAULINE LEAVES-Curled-Curled 5 |
| 12333866 | 13879F | ME04683-04 | YES | K16 | [NULL] | 6.50 | CAULINE LEAVES-Shape-Lanceolate |
| 12333866 | 13879F | ME04683-04 | YES | K31 | [NULL] | 6.50 | CAULINE LEAVES-Other |
| 12333866 | 13879F | ME04683-04 | YES | L11 | [NULL] | 6.50 | FLOWERS-Other |
| 12333866 | 13879F | ME04683-04 | YES | M14 | [NULL] | 6.50 | INFLORESCENCE-Height-Short |
| 12333866 | 13879F | ME04683-04 | YES | M17 | [NULL] | 6.50 | INFLORESCENCE-Internode Length-Short |
| | | | | | | | Internode |
| 12333866 | 13879F | ME04683-04 | YES | M25 | [NULL] | 6.50 | INFLORESCENCE-Other |
| 12333866 | 13879F | ME04683-04 | YES | N07 | [NULL] | 6.50 | SILIQUES-Other |
| 12333866 | 13879F | ME04683-05 | YES | I07 | [NULL] | 6.50 | ROSETTE LEAVES-Curled-Curled 5 |
| 12333866 | 13879F | ME04683-05 | YES | I08 | [NULL] | 6.50 | ROSETTE LEAVES-Disorganized Rosette- |
| | | | | | | | Disorganized Rosette |
| 12333866 | 13879F | ME04683-05 | YES | I18 | [NULL] | 6.50 | ROSETTE LEAVES-Shape-Lanceolate |
| 12333866 | 13879F | ME04683-05 | YES | I31 | [NULL] | 6.50 | ROSETTE LEAVES-Other |
| 12333866 | 13879F | ME04683-05 | YES | J13 | [NULL] | 6.50 | WHOLE PLANT-Size-Small |
| 12333866 | 13879F | ME04683-05 | YES | J14 | [NULL] | 6.50 | WHOLE PLANT-Other |
| 12333866 | 13879F | ME04683-05 | YES | K07 | [NULL] | 6.50 | CAULINE LEAVES-Curled-Curled 5 |
| 12333866 | 13879F | ME04683-05 | YES | K16 | [NULL] | 6.50 | CAULINE LEAVES-Shape-Lanceolate |
| 12333866 | 13879F | ME04683-05 | YES | K31 | [NULL] | 6.50 | CAULINE LEAVES-Other |
| 12333866 | 13879F | ME04683-05 | YES | L11 | [NULL] | 6.50 | FLOWERS-Other |
| 12333866 | 13879F | ME04683-05 | YES | M14 | [NULL] | 6.50 | INFLORESCENCE-Height-Short |
| 12333866 | 13879F | ME04683-05 | YES | M17 | [NULL] | 6.50 | INFLORESCENCE-Internode Length-Short |
| | | | | | | | Internode |
| 12333866 | 13879F | ME04683-05 | YES | M25 | [NULL] | 6.50 | INFLORESCENCE-Other |
| 12333866 | 13879F | ME04683-05 | YES | N07 | [NULL] | 6.50 | SILIQUES-Other |
| 12333866 | 13879F | ME04683-06 | YES | I07 | [NULL] | 6.50 | ROSETTE LEAVES-Curled-Curled 5 |
| 12333866 | 13879F | ME04683-06 | YES | I08 | [NULL] | 6.50 | ROSETTE LEAVES-Disorganized Rosette- |
| | | | | | | | Disorganized Rosette |
| 12333866 | 13879F | ME04683-06 | YES | I18 | [NULL] | 6.50 | ROSETTE LEAVES-Shape-Lanceolate |
| 12333866 | 13879F | ME04683-06 | YES | I31 | [NULL] | 6.50 | ROSETTE LEAVES-Other |
| 12333866 | 13879F | ME04683-06 | YES | J13 | [NULL] | 6.50 | WHOLE PLANT-Size-Small |
| 12333866 | 13879F | ME04683-06 | YES | J14 | [NULL] | 6.50 | WHOLE PLANT-Other |
| 12333866 | 13879F | ME04683-06 | YES | K07 | [NULL] | 6.50 | CAULINE LEAVES-Curled-Curled 5 |
| 12333866 | 13879F | ME04683-06 | YES | K16 | [NULL] | 6.50 | CAULINE LEAVES-Shape-Lanceolate |
| 12333866 | 13879F | ME04683-06 | YES | K31 | [NULL] | 6.50 | CAULINE LEAVES-Other |
| 12333866 | 13879F | ME04683-06 | YES | L11 | [NULL] | 6.50 | FLOWERS-Other |
| 12333866 | 13879F | ME04683-06 | YES | M14 | [NULL] | 6.50 | INFLORESCENCE-Height-Short |
| 12333866 | 13879F | ME04683-06 | YES | M17 | [NULL] | 6.50 | INFLORESCENCE-Internode Length-Short |
| | | | | | | | Internode |
| 12333866 | 13879F | ME04683-06 | YES | M25 | [NULL] | 6.50 | INFLORESCENCE-Other |
| 12333866 | 13879F | ME04683-06 | YES | N07 | [NULL] | 6.50 | SILIQUES-Other |
| 12333866 | 13879F | ME04683-07 | YES | I07 | [NULL] | 6.50 | ROSETTE LEAVES-Curled-Curled 5 |
| 12333866 | 13879F | ME04683-07 | YES | I08 | [NULL] | 6.50 | ROSETTE LEAVES-Disorganized Rosette- |
| | | | | | | | Disorganized Rosette |
| 12333866 | 13879F | ME04683-07 | YES | I18 | [NULL] | 6.50 | ROSETTE LEAVES-Shape-Lanceolate |
| 12333866 | 13879F | ME04683-07 | YES | I31 | [NULL] | 6.50 | ROSETTE LEAVES-Other |
| 12333866 | 13879F | ME04683-07 | YES | J13 | [NULL] | 6.50 | WHOLE PLANT-Size-Small |
| 12333866 | 13879F | ME04683-07 | YES | J14 | [NULL] | 6.50 | WHOLE PLANT-Other |
| 12333866 | 13879F | ME04683-07 | YES | K07 | [NULL] | 6.50 | CAULINE LEAVES-Curled-Curled 5 |
| 12333866 | 13879F | ME04683-07 | YES | K16 | [NULL] | 6.50 | CAULINE LEAVES-Shape-Lanceolate |
| 12333866 | 13879F | ME04683-07 | YES | K31 | [NULL] | 6.50 | CAULINE LEAVES-Other |
| 12333866 | 13879F | ME04683-07 | YES | L11 | [NULL] | 6.50 | FLOWERS-Other |
| 12333866 | 13879F | ME04683-07 | YES | M14 | [NULL] | 6.50 | INFLORESCENCE-Height-Short |
| 12333866 | 13879F | ME04683-07 | YES | M17 | [NULL] | 6.50 | INFLORESCENCE-Internode Length-Short |
| | | | | | | | Internode |
| 12333866 | 13879F | ME04683-07 | YES | M25 | [NULL] | 6.50 | INFLORESCENCE-Other |
| 12333866 | 13879F | ME04683-07 | YES | N07 | [NULL] | 6.50 | SILIQUES-Other |
| 12333866 | 13879F | ME04683-08 | YES | I07 | [NULL] | 6.50 | ROSETTE LEAVES-Curled-Curled 5 |
| 12333866 | 13879F | ME04683-08 | YES | I08 | [NULL] | 6.50 | ROSETTE LEAVES-Disorganized Rosette- |
| | | | | | | | Disorganized Rosette |
| 12333866 | 13879F | ME04683-08 | YES | I18 | [NULL] | 6.50 | ROSETTE LEAVES-Shape-Lanceolate |
| 12333866 | 13879F | ME04683-08 | YES | I31 | [NULL] | 6.50 | ROSETTE LEAVES-Other |
| 12333866 | 13879F | ME04683-08 | YES | J13 | [NULL] | 6.50 | WHOLE PLANT-Size-Small |
| 12333866 | 13879F | ME04683-08 | YES | J14 | [NULL] | 6.50 | WHOLE PLANT-Other |
| 12333866 | 13879F | ME04683-08 | YES | K07 | [NULL] | 6.50 | CAULINE LEAVES-Curled-Curled 5 |
| 12333866 | 13879F | ME04683-08 | YES | K16 | [NULL] | 6.50 | CAULINE LEAVES-Shape-Lanceolate |
| 12333866 | 13879F | ME04683-08 | YES | K31 | [NULL] | 6.50 | CAULINE LEAVES-Other |
| 12333866 | 13879F | ME04683-08 | YES | L11 | [NULL] | 6.50 | FLOWERS-Other |
| 12333866 | 13879F | ME04683-08 | YES | M14 | [NULL] | 6.50 | INFLORESCENCE-Height-Short |
| 12333866 | 13879F | ME04683-08 | YES | M17 | [NULL] | 6.50 | INFLORESCENCE-Internode Length-Short |
| | | | | | | | Internode |
| 12333866 | 13879F | ME04683-08 | YES | M25 | [NULL] | 6.50 | INFLORESCENCE-Other |
| 12333866 | 13879F | ME04683-08 | YES | N07 | [NULL] | 6.50 | SILIQUES-Other |
| 12333866 | 13879F | ME04683-09 | YES | I07 | [NULL] | 6.50 | ROSETTE LEAVES-Curled-Curled 5 |
| 12333866 | 13879F | ME04683-09 | YES | I08 | [NULL] | 6.50 | ROSETTE LEAVES-Disorganized Rosette- |
| | | | | | | | Disorganized Rosette |
| 12333866 | 13879F | ME04683-09 | YES | I18 | [NULL] | 6.50 | ROSETTE LEAVES-Shape-Lanceolate |
| 12333866 | 13879F | ME04683-09 | YES | I31 | [NULL] | 6.50 | ROSETTE LEAVES-Other |
| 12333866 | 13879F | ME04683-09 | YES | J13 | [NULL] | 6.50 | WHOLE PLANT-Size-Small |
| 12333866 | 13879F | ME04683-09 | YES | J14 | [NULL] | 6.50 | WHOLE PLANT-Other |
| 12333866 | 13879F | ME04683-09 | YES | K07 | [NULL] | 6.50 | CAULINE LEAVES-Curled-Curled 5 |
| 12333866 | 13879F | ME04683-09 | YES | K16 | [NULL] | 6.50 | CAULINE LEAVES-Shape-Lanceolate |
| 12333866 | 13879F | ME04683-09 | YES | K31 | [NULL] | 6.50 | CAULINE LEAVES-Other |
| 12333866 | 13879F | ME04683-09 | YES | L11 | [NULL] | 6.50 | FLOWERS-Other |
| 12333866 | 13879F | ME04683-09 | YES | M14 | [NULL] | 6.50 | INFLORESCENCE-Height-Short |
| 12333866 | 13879F | ME04683-09 | YES | M17 | [NULL] | 6.50 | INFLORESCENCE-Internode Length-Short |
| | | | | | | | Internode |
| 12333866 | 13879F | ME04683-09 | YES | M25 | [NULL] | 6.50 | INFLORESCENCE-Other |
| 12333866 | 13879F | ME04683-09 | YES | N07 | [NULL] | 6.50 | SILIQUES-Other |
| 12333866 | 13879F | ME04683-10 | YES | I07 | [NULL] | 6.50 | ROSETTE LEAVES-Curled-Curled 5 |
| 12333866 | 13879F | ME04683-10 | YES | I08 | [NULL] | 6.50 | ROSETTE LEAVES-Disorganized Rosette- |
| | | | | | | | Disorganized Rosette |
| 12333866 | 13879F | ME04683-10 | YES | I18 | [NULL] | 6.50 | ROSETTE LEAVES-Shape-Lanceolate |
| 12333866 | 13879F | ME04683-10 | YES | I31 | [NULL] | 6.50 | ROSETTE LEAVES-Other |
| 12333866 | 13879F | ME04683-10 | YES | J13 | [NULL] | 6.50 | WHOLE PLANT-Size-Small |
| 12333866 | 13879F | ME04683-10 | YES | J14 | [NULL] | 6.50 | WHOLE PLANT-Other |
| 12333866 | 13879F | ME04683-10 | YES | K07 | [NULL] | 6.50 | CAULINE LEAVES-Curled-Curled 5 |
| 12333866 | 13879F | ME04683-10 | YES | K16 | [NULL] | 6.50 | CAULINE LEAVES-Shape-Lanceolate |
| 12333866 | 13879F | ME04683-10 | YES | K31 | [NULL] | 6.50 | CAULINE LEAVES-Other |
| 12333866 | 13879F | ME04683-10 | YES | L11 | [NULL] | 6.50 | FLOWERS-Other |
| 12333866 | 13879F | ME04683-10 | YES | M14 | [NULL] | 6.50 | INFLORESCENCE-Height-Short |
| 12333866 | 13879F | ME04683-10 | YES | M17 | [NULL] | 6.50 | INFLORESCENCE-Internode Length-Short |
| | | | | | | | Internode |
| 12333866 | 13879F | ME04683-10 | YES | M25 | [NULL] | 6.50 | INFLORESCENCE-Other |
| 12333866 | 13879F | ME04683-10 | YES | N07 | [NULL] | 6.50 | SILIQUES-Other |
| 12333866 | 15529D | ME04739-01 | NO | [NULL] | [NULL] | [NULL] | [NULL] |
| 12333866 | 15529D | ME04739-02 | NO | [NULL] | [NULL] | [NULL] | [NULL] |
| 12333866 | 15529D | ME04739-03 | NO | [NULL] | [NULL] | [NULL] | [NULL] |
| 12333866 | 15529D | ME04739-04 | QUESTIONABLE | I08 | [NULL] | 6.50 | ROSETTE LEAVES-Disorganized |
| | | | | | | | Rosette-Disorganized Rosette |
| 12333866 | 15529D | ME04739-04 | QUESTIONABLE | I31 | [NULL] | 6.50 | ROSETTE LEAVES-Other |
| 12333866 | 15529D | ME04739-04 | QUESTIONABLE | L11 | [NULL] | 6.50 | FLOWERS-Other |
| 12333866 | 15529D | ME04739-04 | QUESTIONABLE | M10 | [NULL] | 6.50 | INFLORESCENCE-Branching- |
| | | | | | | | Reduced Apical Dominance |
| 12333866 | 15529D | ME04739-04 | QUESTIONABLE | M14 | [NULL] | 6.50 | INFLORESCENCE-Height-Short |
| 12333866 | 15529D | ME04739-04 | QUESTIONABLE | P04 | [NULL] | 6.50 | FERTILITY-Fertility-Reduced |
| 12333866 | 15529D | ME04739-05 | NO | [NULL] | [NULL] | [NULL] | [NULL] |
| 12333866 | 15529D | ME04739-06 | NO | [NULL] | [NULL] | [NULL] | [NULL] |
| 12333866 | 15529D | ME04739-07 | NO | [NULL] | [NULL] | [NULL] | [NULL] |
| 12333866 | 15529D | ME04739-08 | QUESTIONABLE | I08 | [NULL] | 6.50 | ROSETTE LEAVES-Disorganized |
| | | | | | | | Rosette-Disorganized Rosette |
| 12333866 | 15529D | ME04739-08 | QUESTIONABLE | I31 | [NULL] | 6.50 | ROSETTE LEAVES-Other |
| 12333866 | 15529D | ME04739-08 | QUESTIONABLE | L11 | [NULL] | 6.50 | FLOWERS-Other |
| 12333866 | 15529D | ME04739-08 | QUESTIONABLE | M10 | [NULL] | 6.50 | INFLORESCENCE-Branching- |
| | | | | | | | Reduced Apical Dominance |
| 12333866 | 15529D | ME04739-08 | QUESTIONABLE | M14 | [NULL] | 6.50 | INFLORESCENCE-Height-Short |
| 12333866 | 15529D | ME04739-09 | NO | [NULL] | [NULL] | [NULL] | [NULL] |
| 12333866 | 15529D | ME04739-10 | NO | [NULL] | [NULL] | [NULL] | [NULL] |
| 12333866 | 32449 | ME00297-01 | YES | I06 | [NULL] | 5.10 | ROSETTE LEAVES-Curled-Curled 4 |
| 12333866 | 32449 | ME00297-01 | YES | I31 | [NULL] | 5.10 | ROSETTE LEAVES-Other |
| 12333866 | 32449 | ME00297-01 | YES | J13 | [NULL] | 5.10 | WHOLE PLANT-Size-Small |
| 12333866 | 32449 | ME00297-02 | YES | I06 | [NULL] | 5.10 | ROSETTE LEAVES-Curled-Curled 4 |
| 12333866 | 32449 | ME00297-02 | YES | I31 | [NULL] | 5.10 | ROSETTE LEAVES-Other |
| 12333866 | 32449 | ME00297-02 | YES | J13 | [NULL] | 5.10 | WHOLE PLANT-Size-Small |
| 12333866 | 32449 | ME00297-03 | YES | I06 | [NULL] | 5.10 | ROSETTE LEAVES-Curled-Curled 4 |
| 12333866 | 32449 | ME00297-03 | YES | I31 | [NULL] | 5.10 | ROSETTE LEAVES-Other |
| 12333866 | 32449 | ME00297-03 | YES | J13 | [NULL] | 5.10 | WHOLE PLANT-Size-Small |
| 12333866 | 32449 | ME00297-04 | NO | [NULL] | [NULL] | [NULL] | [NULL] |
| 12333866 | 32449 | ME00297-05 | NO | [NULL] | [NULL] | [NULL] | [NULL] |
| 12333866 | 32449 | ME00297-06 | YES | I06 | [NULL] | 5.10 | ROSETTE LEAVES-Curled-Curled 4 |
| 12333866 | 32449 | ME00297-06 | YES | I31 | [NULL] | 5.10 | ROSETTE LEAVES-Other |
| 12333866 | 32449 | ME00297-06 | YES | J13 | [NULL] | 5.10 | WHOLE PLANT-Size-Small |
| 12333866 | 34414F | ME04693-01 | YES | I07 | [NULL] | 6.50 | ROSETTE LEAVES-Curled-Curled 5 |
| 12333866 | 34414F | ME04693-01 | YES | I08 | [NULL] | 6.50 | ROSETTE LEAVES-Disorganized Rosette- |
| | | | | | | | Disorganized Rosette |
| 12333866 | 34414F | ME04693-01 | YES | I18 | [NULL] | 6.50 | ROSETTE LEAVES-Shape-Lanceolate |
| 12333866 | 34414F | ME04693-01 | YES | I31 | [NULL] | 6.50 | ROSETTE LEAVES-Other |
| 12333866 | 34414F | ME04693-01 | YES | J13 | [NULL] | 6.50 | WHOLE PLANT-Size-Small |
| 12333866 | 34414F | ME04693-01 | YES | K07 | [NULL] | 6.50 | CAULINE LEAVES-Curled-Curled 5 |
| 12333866 | 34414F | ME04693-01 | YES | K16 | [NULL] | 6.50 | CAULINE LEAVES-Shape-Lanceolate |
| 12333866 | 34414F | ME04693-01 | YES | K31 | [NULL] | 6.50 | CAULINE LEAVES-Other |
| 12333866 | 34414F | ME04693-01 | YES | L11 | [NULL] | 6.50 | FLOWERS-Other |
| 12333866 | 34414F | ME04693-01 | YES | M14 | [NULL] | 6.50 | INFLORESCENCE-Height-Short |
| 12333866 | 34414F | ME04693-01 | YES | M17 | [NULL] | 6.50 | INFLORESCENCE-Internode Length-Short |
| | | | | | | | Internode |
| 12333866 | 34414F | ME04693-01 | YES | M25 | [NULL] | 6.50 | INFLORESCENCE-Other |
| 12333866 | 34414F | ME04693-01 | YES | N07 | [NULL] | 6.50 | SILIQUES-Other |
| 12333866 | 34414F | ME04693-02 | YES | I07 | [NULL] | 6.50 | ROSETTE LEAVES-Curled-Curled 5 |
| 12333866 | 34414F | ME04693-02 | YES | I08 | [NULL] | 6.50 | ROSETTE LEAVES-Disorganized Rosette- |
| | | | | | | | Disorganized Rosette |
| 12333866 | 34414F | ME04693-02 | YES | I18 | [NULL] | 6.50 | ROSETTE LEAVES-Shape-Lanceolate |
| 12333866 | 34414F | ME04693-02 | YES | I31 | [NULL] | 6.50 | ROSETTE LEAVES-Other |
| 12333866 | 34414F | ME04693-02 | YES | J13 | [NULL] | 6.50 | WHOLE PLANT-Size-Small |
| 12333866 | 34414F | ME04693-02 | YES | K07 | [NULL] | 6.50 | CAULINE LEAVES-Curled-Curled 5 |
| 12333866 | 34414F | ME04693-02 | YES | K16 | [NULL] | 6.50 | CAULINE LEAVES-Shape-Lanceolate |
| 12333866 | 34414F | ME04693-02 | YES | K31 | [NULL] | 6.50 | CAULINE LEAVES-Other |
| 12333866 | 34414F | ME04693-02 | YES | L11 | [NULL] | 6.50 | FLOWERS-Other |
| 12333866 | 34414F | ME04693-02 | YES | M14 | [NULL] | 6.50 | INFLORESCENCE-Height-Short |
| 12333866 | 34414F | ME04693-02 | YES | M17 | [NULL] | 6.50 | INFLORESCENCE-Internode Length-Short |
| | | | | | | | Internode |
| 12333866 | 34414F | ME04693-02 | YES | M25 | [NULL] | 6.50 | INFLORESCENCE-Other |
| 12333866 | 34414F | ME04693-02 | YES | N07 | [NULL] | 6.50 | SILIQUES-Other |
| 12333866 | 34414F | ME04693-03 | YES | I07 | [NULL] | 6.50 | ROSETTE LEAVES-Curled-Curled 5 |
| 12333866 | 34414F | ME04693-03 | YES | I08 | [NULL] | 6.50 | ROSETTE LEAVES-Disorganized Rosette- |
| | | | | | | | Disorganized Rosette |
| 12333866 | 34414F | ME04693-03 | YES | I18 | [NULL] | 6.50 | ROSETTE LEAVES-Shape-Lanceolate |
| 12333866 | 34414F | ME04693-03 | YES | I31 | [NULL] | 6.50 | ROSETTE LEAVES-Other |
| 12333866 | 34414F | ME04693-03 | YES | J13 | [NULL] | 6.50 | WHOLE PLANT-Size-Small |
| 12333866 | 34414F | ME04693-03 | YES | K07 | [NULL] | 6.50 | CAULINE LEAVES-Curled-Curled 5 |
| 12333866 | 34414F | ME04693-03 | YES | K16 | [NULL] | 6.50 | CAULINE LEAVES-Shape-Lanceolate |
| 12333866 | 34414F | ME04693-03 | YES | K31 | [NULL] | 6.50 | CAULINE LEAVES-Other |
| 12333866 | 34414F | ME04693-03 | YES | L11 | [NULL] | 6.50 | FLOWERS-Other |
| 12333866 | 34414F | ME04693-03 | YES | M14 | [NULL] | 6.50 | INFLORESCENCE-Height-Short |
| 12333866 | 34414F | ME04693-03 | YES | M17 | [NULL] | 6.50 | INFLORESCENCE-Internode Length-Short |
| | | | | | | | Internode |
| 12333866 | 34414F | ME04693-03 | YES | M25 | [NULL] | 6.50 | INFLORESCENCE-Other |
| 12333866 | 34414F | ME04693-03 | YES | N07 | [NULL] | 6.50 | SILIQUES-Other |
| 12333866 | 34414F | ME04693-04 | YES | I07 | [NULL] | 6.50 | ROSETTE LEAVES-Curled-Curled 5 |
| 12333866 | 34414F | ME04693-04 | YES | I08 | [NULL] | 6.50 | ROSETTE LEAVES-Disorganized Rosette- |
| | | | | | | | Disorganized Rosette |
| 12333866 | 34414F | ME04693-04 | YES | I18 | [NULL] | 6.50 | ROSETTE LEAVES-Shape-Lanceolate |
| 12333866 | 34414F | ME04693-04 | YES | I31 | [NULL] | 6.50 | ROSETTE LEAVES-Other |
| 12333866 | 34414F | ME04693-04 | YES | J13 | [NULL] | 6.50 | WHOLE PLANT-Size-Small |
| 12333866 | 34414F | ME04693-04 | YES | K07 | [NULL] | 6.50 | CAULINE LEAVES-Curled-Curled 5 |
| 12333866 | 34414F | ME04693-04 | YES | K16 | [NULL] | 6.50 | CAULINE LEAVES-Shape-Lanceolate |
| 12333866 | 34414F | ME04693-04 | YES | K31 | [NULL] | 6.50 | CAULINE LEAVES-Other |
| 12333866 | 34414F | ME04693-04 | YES | L11 | [NULL] | 6.50 | FLOWERS-Other |
| 12333866 | 34414F | ME04693-04 | YES | M14 | [NULL] | 6.50 | INFLORESCENCE-Height-Short |
| 12333866 | 34414F | ME04693-04 | YES | M17 | [NULL] | 6.50 | INFLORESCENCE-Internode Length-Short |
| | | | | | | | Internode |
| 12333866 | 34414F | ME04693-04 | YES | M25 | [NULL] | 6.50 | INFLORESCENCE-Other |
| 12333866 | 34414F | ME04693-04 | YES | N07 | [NULL] | 6.50 | SILIQUES-Other |
| 12333866 | 34414F | ME04693-05 | YES | I07 | [NULL] | 6.50 | ROSETTE LEAVES-Curled-Curled 5 |
| 12333866 | 34414F | ME04693-05 | YES | I08 | [NULL] | 6.50 | ROSETTE LEAVES-Disorganized Rosette- |
| | | | | | | | Disorganized Rosette |
| 12333866 | 34414F | ME04693-05 | YES | I18 | [NULL] | 6.50 | ROSETTE LEAVES-Shape-Lanceolate |
| 12333866 | 34414F | ME04693-05 | YES | I31 | [NULL] | 6.50 | ROSETTE LEAVES-Other |
| 12333866 | 34414F | ME04693-05 | YES | J13 | [NULL] | 6.50 | WHOLE PLANT-Size-Small |
| 12333866 | 34414F | ME04693-05 | YES | K07 | [NULL] | 6.50 | CAULINE LEAVES-Curled-Curled 5 |
| 12333866 | 34414F | ME04693-05 | YES | K16 | [NULL] | 6.50 | CAULINE LEAVES-Shape-Lanceolate |
| 12333866 | 34414F | ME04693-05 | YES | K31 | [NULL] | 6.50 | CAULINE LEAVES-Other |
| 12333866 | 34414F | ME04693-05 | YES | L11 | [NULL] | 6.50 | FLOWERS-Other |
| 12333866 | 34414F | ME04693-05 | YES | M14 | [NULL] | 6.50 | INFLORESCENCE-Height-Short |
| 12333866 | 34414F | ME04693-05 | YES | M17 | [NULL] | 6.50 | INFLORESCENCE-Internode Length-Short |
| | | | | | | | Internode |
| 12333866 | 34414F | ME04693-05 | YES | M25 | [NULL] | 6.50 | INFLORESCENCE-Other |
| 12333866 | 34414F | ME04693-05 | YES | N07 | [NULL] | 6.50 | SILIQUES-Other |
| 12333866 | 34414F | ME04693-06 | YES | I07 | [NULL] | 6.50 | ROSETTE LEAVES-Curled-Curled 5 |
| 12333866 | 34414F | ME04693-06 | YES | I08 | [NULL] | 6.50 | ROSETTE LEAVES-Disorganized Rosette- |
| | | | | | | | Disorganized Rosette |
| 12333866 | 34414F | ME04693-06 | YES | I18 | [NULL] | 6.50 | ROSETTE LEAVES-Shape-Lanceolate |
| 12333866 | 34414F | ME04693-06 | YES | I31 | [NULL] | 6.50 | ROSETTE LEAVES-Other |
| 12333866 | 34414F | ME04693-06 | YES | J13 | [NULL] | 6.50 | WHOLE PLANT-Size-Small |
| 12333866 | 34414F | ME04693-06 | YES | K07 | [NULL] | 6.50 | CAULINE LEAVES-Curled-Curled 5 |
| 12333866 | 34414F | ME04693-06 | YES | K16 | [NULL] | 6.50 | CAULINE LEAVES-Shape-Lanceolate |
| 12333866 | 34414F | ME04693-06 | YES | K31 | [NULL] | 6.50 | CAULINE LEAVES-Other |
| 12333866 | 34414F | ME04693-06 | YES | L11 | [NULL] | 6.50 | FLOWERS-Other |
| 12333866 | 34414F | ME04693-06 | YES | M14 | [NULL] | 6.50 | INFLORESCENCE-Height-Short |
| 12333866 | 34414F | ME04693-06 | YES | M17 | [NULL] | 6.50 | INFLORESCENCE-Internode Length-Short |
| | | | | | | | Internode |
| 12333866 | 34414F | ME04693-06 | YES | M25 | [NULL] | 6.50 | INFLORESCENCE-Other |
| 12333866 | 34414F | ME04693-06 | YES | N07 | [NULL] | 6.50 | SILIQUES-Other |
| 12333866 | 34414F | ME04693-07 | YES | I07 | [NULL] | 6.50 | ROSETTE LEAVES-Curled-Curled 5 |
| 12333866 | 34414F | ME04693-07 | YES | I08 | [NULL] | 6.50 | ROSETTE LEAVES-Disorganized Rosette- |
| | | | | | | | Disorganized Rosette |
| 12333866 | 34414F | ME04693-07 | YES | I18 | [NULL] | 6.50 | ROSETTE LEAVES-Shape-Lanceolate |
| 12333866 | 34414F | ME04693-07 | YES | I31 | [NULL] | 6.50 | ROSETTE LEAVES-Other |
| 12333866 | 34414F | ME04693-07 | YES | J13 | [NULL] | 6.50 | WHOLE PLANT-Size-Small |
| 12333866 | 34414F | ME04693-07 | YES | K07 | [NULL] | 6.50 | CAULINE LEAVES-Curled-Curled 5 |
| 12333866 | 34414F | ME04693-07 | YES | K16 | [NULL] | 6.50 | CAULINE LEAVES-Shape-Lanceolate |
| 12333866 | 34414F | ME04693-07 | YES | K31 | [NULL] | 6.50 | CAULINE LEAVES-Other |
| 12333866 | 34414F | ME04693-07 | YES | L11 | [NULL] | 6.50 | FLOWERS-Other |
| 12333866 | 34414F | ME04693-07 | YES | M14 | [NULL] | 6.50 | INFLORESCENCE-Height-Short |
| 12333866 | 34414F | ME04693-07 | YES | M17 | [NULL] | 6.50 | INFLORESCENCE-Internode Length-Short |
| | | | | | | | Internode |
| 12333866 | 34414F | ME04693-07 | YES | M25 | [NULL] | 6.50 | INFLORESCENCE-Other |
| 12333866 | 34414F | ME04693-07 | YES | N07 | [NULL] | 6.50 | SILIQUES-Other |
| 12333866 | 34414F | ME04693-08 | YES | I07 | [NULL] | 6.50 | ROSETTE LEAVES-Curled-Curled 5 |
| 12333866 | 34414F | ME04693-08 | YES | I08 | [NULL] | 6.50 | ROSETTE LEAVES-Disorganized Rosette- |
| | | | | | | | Disorganized Rosette |
| 12333866 | 34414F | ME04693-08 | YES | I18 | [NULL] | 6.50 | ROSETTE LEAVES-Shape-Lanceolate |
| 12333866 | 34414F | ME04693-08 | YES | I31 | [NULL] | 6.50 | ROSETTE LEAVES-Other |
| 12333866 | 34414F | ME04693-08 | YES | J13 | [NULL] | 6.50 | WHOLE PLANT-Size-Small |
| 12333866 | 34414F | ME04693-08 | YES | K07 | [NULL] | 6.50 | CAULINE LEAVES-Curled-Curled 5 |
| 12333866 | 34414F | ME04693-08 | YES | K16 | [NULL] | 6.50 | CAULINE LEAVES-Shape-Lanceolate |
| 12333866 | 34414F | ME04693-08 | YES | K31 | [NULL] | 6.50 | CAULINE LEAVES-Other |
| 12333866 | 34414F | ME04693-08 | YES | L11 | [NULL] | 6.50 | FLOWERS-Other |
| 12333866 | 34414F | ME04693-08 | YES | M14 | [NULL] | 6.50 | INFLORESCENCE-Height-Short |
| 12333866 | 34414F | ME04693-08 | YES | M17 | [NULL] | 6.50 | INFLORESCENCE-Internode Length-Short |
| | | | | | | | Internode |
| 12333866 | 34414F | ME04693-08 | YES | M25 | [NULL] | 6.50 | INFLORESCENCE-Other |
| 12333866 | 34414F | ME04693-08 | YES | N07 | [NULL] | 6.50 | SILIQUES-Other |
| 12333866 | 34414F | ME04693-09 | YES | I07 | [NULL] | 6.50 | ROSETTE LEAVES-Curled-Curled 5 |
| 12333866 | 34414F | ME04693-09 | YES | I08 | [NULL] | 6.50 | ROSETTE LEAVES-Disorganized Rosette- |
| | | | | | | | Disorganized Rosette |
| 12333866 | 34414F | ME04693-09 | YES | I18 | [NULL] | 6.50 | ROSETTE LEAVES-Shape-Lanceolate |
| 12333866 | 34414F | ME04693-09 | YES | I31 | [NULL] | 6.50 | ROSETTE LEAVES-Other |
| 12333866 | 34414F | ME04693-09 | YES | J13 | [NULL] | 6.50 | WHOLE PLANT-Size-Small |
| 12333866 | 34414F | ME04693-09 | YES | K07 | [NULL] | 6.50 | CAULINE LEAVES-Curled-Curled 5 |
| 12333866 | 34414F | ME04693-09 | YES | K16 | [NULL] | 6.50 | CAULINE LEAVES-Shape-Lanceolate |
| 12333866 | 34414F | ME04693-09 | YES | K31 | [NULL] | 6.50 | CAULINE LEAVES-Other |
| 12333866 | 34414F | ME04693-09 | YES | L11 | [NULL] | 6.50 | FLOWERS-Other |
| 12333866 | 34414F | ME04693-09 | YES | M14 | [NULL] | 6.50 | INFLORESCENCE-Height-Short |
| 12333866 | 34414F | ME04693-09 | YES | M17 | [NULL] | 6.50 | INFLORESCENCE-Internode Length-Short |
| | | | | | | | Internode |
| 12333866 | 34414F | ME04693-09 | YES | M25 | [NULL] | 6.50 | INFLORESCENCE-Other |
| 12333866 | 34414F | ME04693-09 | YES | N07 | [NULL] | 6.50 | SILIQUES-Other |
| 12333866 | 34414F | ME04693-10 | YES | I07 | [NULL] | 6.50 | ROSETTE LEAVES-Curled-Curled 5 |
| 12333866 | 34414F | ME04693-10 | YES | I08 | [NULL] | 6.50 | ROSETTE LEAVES-Disorganized Rosette- |
| | | | | | | | Disorganized Rosette |
| 12333866 | 34414F | ME04693-10 | YES | I18 | [NULL] | 6.50 | ROSETTE LEAVES-Shape-Lanceolate |
| 12333866 | 34414F | ME04693-10 | YES | I31 | [NULL] | 6.50 | ROSETTE LEAVES-Other |
| 12333866 | 34414F | ME04693-10 | YES | J13 | [NULL] | 6.50 | WHOLE PLANT-Size-Small |
| 12333866 | 34414F | ME04693-10 | YES | K07 | [NULL] | 6.50 | CAULINE LEAVES-Curled-Curled 5 |
| 12333866 | 34414F | ME04693-10 | YES | K16 | [NULL] | 6.50 | CAULINE LEAVES-Shape-Lanceolate |
| 12333866 | 34414F | ME04693-10 | YES | K31 | [NULL] | 6.50 | CAULINE LEAVES-Other |
| 12333866 | 34414F | ME04693-10 | YES | L11 | [NULL] | 6.50 | FLOWERS-Other |
| 12333866 | 34414F | ME04693-10 | YES | M14 | [NULL] | 6.50 | INFLORESCENCE-Height-Short |
| 12333866 | 34414F | ME04693-10 | YES | M17 | [NULL] | 6.50 | INFLORESCENCE-Internode Length-Short |
| | | | | | | | Internode |
| 12333866 | 34414F | ME04693-10 | YES | M25 | [NULL] | 6.50 | INFLORESCENCE-Other |
| 12333866 | 34414F | ME04693-10 | YES | N07 | [NULL] | 6.50 | SILIQUES-Other |
| 12333953 | 32449 | ME00002-01 | NO | [NULL] | [NULL] | [NULL] | [NULL] |
| 12333953 | 32449 | ME00002-02 | NO | [NULL] | [NULL] | [NULL] | [NULL] |
| 12333953 | 32449 | ME00002-03 | NO | [NULL] | [NULL] | [NULL] | [NULL] |
| 12333953 | 32449 | ME00002-04 | NO | [NULL] | [NULL] | [NULL] | [NULL] |
| 12333953 | 32449 | ME00002-05 | NO | [NULL] | [NULL] | [NULL] | [NULL] |
| 12333953 | 32449 | ME00002-06 | NO | [NULL] | [NULL] | [NULL] | [NULL] |
| 12333953 | 32449 | ME00002-07 | NO | [NULL] | [NULL] | [NULL] | [NULL] |
| 12333953 | 32449 | ME00002-08 | NO | [NULL] | [NULL] | [NULL] | [NULL] |
| 12333953 | 32449 | ME00002-09 | NO | [NULL] | [NULL] | [NULL] | [NULL] |
| 12333953 | 35S | ME04522-01 | YES | I06 | [NULL] | 6.30 | ROSETTE LEAVES-Curled-Curled 4 |
| 12333953 | 35S | ME04522-01 | YES | K05 | [NULL] | 6.30 | CAULINE LEAVES-Curled-Curled 3 |
| 12333953 | 35S | ME04522-01 | YES | N02 | [NULL] | 6.90 | SILIQUES-Length-Short |
| 12333953 | 35S | ME04522-02 | NO | [NULL] | [NULL] | [NULL] | [NULL] |
| 12333953 | 35S | ME04522-03 | NO | [NULL] | [NULL] | [NULL] | [NULL] |
| 12333953 | 35S | ME04522-04 | NO | [NULL] | [NULL] | [NULL] | [NULL] |
| 12333953 | 35S | ME04522-05 | YES | N02 | [NULL] | 6.90 | SILIQUES-Length-Short |
| 12333953 | 35S | ME04522-06 | NO | [NULL] | [NULL] | [NULL] | [NULL] |
| 12333953 | 35S | ME04522-07 | NO | [NULL] | [NULL] | [NULL] | [NULL] |
| 12333953 | 35S | ME04522-08 | YES | I06 | [NULL] | 6.30 | ROSETTE LEAVES-Curled-Curled 4 |
| 12333953 | 35S | ME04522-08 | YES | K05 | [NULL] | 6.30 | CAULINE LEAVES-Curled-Curled 3 |
| 12333953 | 35S | ME04522-08 | YES | N02 | [NULL] | 6.90 | SILIQUES-Length-Short |
| 12333953 | 35S | ME04522-09 | NO | [NULL] | [NULL] | [NULL] | [NULL] |
| 12333953 | 35S | ME04522-10 | NO | [NULL] | [NULL] | [NULL] | [NULL] |
| 12334431 | 35S | ME06727-01 | YES | I07 | [NULL] | 1.02 | ROSETTE LEAVES-Curled-Curled 5 |
| 12334431 | 35S | ME06727-01 | YES | I18 | [NULL] | 1.14 | ROSETTE LEAVES-Shape-Lanceolate |
| 12334431 | 35S | ME06727-01 | YES | I18 | [NULL] | 5.10 | ROSETTE LEAVES-Shape-Lanceolate |
| 12334431 | 35S | ME06727-01 | YES | I31 | [NULL] | 1.14 | ROSETTE LEAVES-Other |
| 12334431 | 35S | ME06727-01 | YES | I31 | [NULL] | 5.10 | ROSETTE LEAVES-Other |
| 12334431 | 35S | ME06727-01 | YES | J01 | [NULL] | 5.10 | WHOLE PLANT-Color-Dark Green |
| 12334431 | 35S | ME06727-01 | YES | M13 | [NULL] | 5.10 | INFLORESCENCE-Flowering Time-Late Flowering |
| 12334431 | 35S | ME06727-01 | YES | R02 | [NULL] | 1.14 | SENESCENCE TIME-Senescence Time-Late Senescence |
| 12334431 | 35S | ME06727-02 | YES | I07 | [NULL] | 1.05 | ROSETTE LEAVES-Curled-Curled 5 |
| 12334431 | 35S | ME06727-02 | YES | I18 | [NULL] | 1.14 | ROSETTE LEAVES-Shape-Lanceolate |
| 12334431 | 35S | ME06727-02 | YES | I18 | [NULL] | 5.10 | ROSETTE LEAVES-Shape-Lanceolate |
| 12334431 | 35S | ME06727-02 | YES | I31 | [NULL] | 1.14 | ROSETTE LEAVES-Other |
| 12334431 | 35S | ME06727-02 | YES | I31 | [NULL] | 5.10 | ROSETTE LEAVES-Other |
| 12334431 | 35S | ME06727-02 | YES | J01 | [NULL] | 5.10 | WHOLE PLANT-Color-Dark Green |
| 12334431 | 35S | ME06727-02 | YES | M13 | [NULL] | 5.10 | INFLORESCENCE-Flowering Time-Late Flowering |
| 12334431 | 35S | ME06727-02 | YES | R02 | [NULL] | 1.14 | SENESCENCE TIME-Senescence Time-Late Senescence |
| 12334431 | 35S | ME06727-03 | NO | [NULL] | [NULL] | [NULL] | [NULL] |
| 12334431 | 35S | ME06727-04 | YES | N02 | [NULL] | 6.50 | SILIQUES-Length-Short |
| 12334431 | 35S | ME06727-04 | YES | N07 | [NULL] | 6.50 | SILIQUES-Other |
| 12334431 | 35S | ME06727-04 | YES | P04 | [NULL] | 6.50 | FERTILITY-Fertility-Reduced |
| 12334431 | 35S | ME06727-04 | YES | R02 | [NULL] | 6.50 | SENESCENCE TIME-Senescence Time-Late Senescence |
| 12334431 | 35S | ME06727-05 | YES | I07 | [NULL] | 1.05 | ROSETTE LEAVES-Curled-Curled 5 |
| 12334431 | 35S | ME06727-05 | YES | I18 | [NULL] | 1.14 | ROSETTE LEAVES-Shape-Lanceolate |
| 12334431 | 35S | ME06727-05 | YES | I18 | [NULL] | 5.10 | ROSETTE LEAVES-Shape-Lanceolate |
| 12334431 | 35S | ME06727-05 | YES | I31 | [NULL] | 1.14 | ROSETTE LEAVES-Other |
| 12334431 | 35S | ME06727-05 | YES | I31 | [NULL] | 5.10 | ROSETTE LEAVES-Other |
| 12334431 | 35S | ME06727-05 | YES | J01 | [NULL] | 5.10 | WHOLE PLANT-Color-Dark Green |
| 12334431 | 35S | ME06727-05 | YES | J02 | [NULL] | 1.14 | WHOLE PLANT-Color-High Anthocyanin |
| 12334431 | 35S | ME06727-05 | YES | M13 | [NULL] | 5.10 | INFLORESCENCE-Flowering Time-Late Flowering |
| 12334431 | 35S | ME06727-05 | YES | R02 | [NULL] | 1.14 | SENESCENCE TIME-Senescence Time-Late Senescence |
| 12334431 | 35S | ME06727-06 | YES | N02 | [NULL] | 6.50 | SILIQUES-Length-Short |
| 12334431 | 35S | ME06727-06 | YES | N07 | [NULL] | 6.50 | SILIQUES-Other |
| 12334431 | 35S | ME06727-06 | YES | P04 | [NULL] | 6.50 | FERTILITY-Fertility-Reduced |
| 12334431 | 35S | ME06727-06 | YES | R02 | [NULL] | 6.50 | SENESCENCE TIME-Senescence Time-Late Senescence |
| 12334431 | 35S | ME06727-07 | NO | [NULL] | [NULL] | [NULL] | [NULL] |
| 12334431 | 35S | ME06727-08 | YES | I07 | [NULL] | 1.03 | ROSETTE LEAVES-Curled-Curled 5 |
| 12334431 | 35S | ME06727-08 | YES | I18 | [NULL] | 1.14 | ROSETTE LEAVES-Shape-Lanceolate |
| 12334431 | 35S | ME06727-08 | YES | I18 | [NULL] | 5.10 | ROSETTE LEAVES-Shape-Lanceolate |
| 12334431 | 35S | ME06727-08 | YES | I31 | [NULL] | 1.14 | ROSETTE LEAVES-Other |
| 12334431 | 35S | ME06727-08 | YES | I31 | [NULL] | 5.10 | ROSETTE LEAVES-Other |
| 12334431 | 35S | ME06727-08 | YES | J01 | [NULL] | 5.10 | WHOLE PLANT-Color-Dark Green |
| 12334431 | 35S | ME06727-08 | YES | J02 | [NULL] | 1.14 | WHOLE PLANT-Color-High Anthocyanin |
| 12334431 | 35S | ME06727-08 | YES | M13 | [NULL] | 5.10 | INFLORESCENCE-Flowering Time-Late Flowering |
| 12334431 | 35S | ME06727-08 | YES | R02 | [NULL] | 1.14 | SENESCENCE TIME-Senescence Time-Late Senescence |
| 12334431 | 35S | ME06727-09 | YES | I07 | [NULL] | 1.07 | ROSETTE LEAVES-Curled-Curled 5 |
| 12334431 | 35S | ME06727-09 | YES | I18 | [NULL] | 5.10 | ROSETTE LEAVES-Shape-Lanceolate |
| 12334431 | 35S | ME06727-09 | YES | I18 | [NULL] | 6.50 | ROSETTE LEAVES-Shape-Lanceolate |
| 12334431 | 35S | ME06727-09 | YES | I31 | [NULL] | 5.10 | ROSETTE LEAVES-Other |
| 12334431 | 35S | ME06727-09 | YES | I31 | [NULL] | 6.50 | ROSETTE LEAVES-Other |
| 12334431 | 35S | ME06727-09 | YES | J01 | [NULL] | 5.10 | WHOLE PLANT-Color-Dark Green |
| 12334431 | 35S | ME06727-09 | YES | M13 | [NULL] | 5.10 | INFLORESCENCE-Flowering Time-Late Flowering |
| 12334431 | 35S | ME06727-09 | YES | M14 | [NULL] | 6.50 | INFLORESCENCE-Height-Short |
| 12334431 | 35S | ME06727-09 | YES | P05 | [NULL] | 6.50 | FERTILITY-Fertility-Sterile |
| 12334431 | 35S | ME06727-09 | YES | R02 | [NULL] | 6.50 | SENESCENCE TIME-Senescence Time-Late Senescence |
| 12334431 | 35S | ME06727-10 | YES | N02 | [NULL] | 6.50 | SILIQUES-Length-Short |
| 12334431 | 35S | ME06727-10 | YES | N07 | [NULL] | 6.50 | SILIQUES-Other |
| 12334431 | 35S | ME06727-10 | YES | P04 | [NULL] | 6.50 | FERTILITY-Fertility-Reduced |
| 12334431 | 35S | ME06727-10 | YES | R02 | [NULL] | 6.50 | SENESCENCE TIME-Senescence Time-Late Senescence |
| 12335031 | 35S | ME06589-01 | YES | J01 | [NULL] | 1.05 | WHOLE PLANT-Color-Dark Green |
| 12335031 | 35S | ME06589-01 | YES | J13 | [NULL] | 1.05 | WHOLE PLANT-Size-Small |
| 12335031 | 35S | ME06589-01 | YES | M14 | [NULL] | 6.50 | INFLORESCENCE-Height-Short |
| 12335031 | 35S | ME06589-01 | YES | M17 | [NULL] | 6.50 | INFLORESCENCE-Internode Length-Short Internode |
| 12335031 | 35S | ME06589-01 | YES | M19 | [NULL] | 6.50 | INFLORESCENCE-Strength-Strong |
| 12335031 | 35S | ME06589-02 | YES | J01 | [NULL] | 1.05 | WHOLE PLANT-Color-Dark Green |
| 12335031 | 35S | ME06589-02 | YES | J13 | [NULL] | 1.05 | WHOLE PLANT-Size-Small |
| 12335031 | 35S | ME06589-03 | YES | J01 | [NULL] | 1.06 | WHOLE PLANT-Color-Dark Green |
| 12335031 | 35S | ME06589-03 | YES | J13 | [NULL] | 1.06 | WHOLE PLANT-Size-Small |
| 12335031 | 35S | ME06589-04 | YES | J01 | [NULL] | 1.07 | WHOLE PLANT-Color-Dark Green |
| 12335031 | 35S | ME06589-04 | YES | J13 | [NULL] | 1.07 | WHOLE PLANT-Size-Small |
| 12335031 | 35S | ME06589-04 | YES | M14 | [NULL] | 6.50 | INFLORESCENCE-Height-Short |
| 12335031 | 35S | ME06589-04 | YES | M17 | [NULL] | 6.50 | INFLORESCENCE-Internode Length-Short Internode |
| 12335031 | 35S | ME06589-05 | NO | [NULL] | [NULL] | [NULL] | [NULL] |
| 12335031 | 35S | ME06589-06 | YES | J01 | [NULL] | 1.06 | WHOLE PLANT-Color-Dark Green |
| 12335031 | 35S | ME06589-06 | YES | J13 | [NULL] | 1.06 | WHOLE PLANT-Size-Small |
| 12335031 | 35S | ME06589-06 | YES | M14 | [NULL] | 6.90 | INFLORESCENCE-Height-Short |
| 12335031 | 35S | ME06589-06 | YES | M17 | [NULL] | 6.90 | INFLORESCENCE-Internode Length-Short Internode |
| 12335031 | 35S | ME06589-07 | YES | I20 | [NULL] | 6.90 | ROSETTE LEAVES-Shape-Oval |
| 12335031 | 35S | ME06589-07 | YES | J01 | [NULL] | 1.07 | WHOLE PLANT-Color-Dark Green |
| 12335031 | 35S | ME06589-07 | YES | J13 | [NULL] | 1.07 | WHOLE PLANT-Size-Small |
| 12335031 | 35S | ME06589-07 | YES | M17 | [NULL] | 6.90 | INFLORESCENCE-Internode Length-Short Internode |
| 12335031 | 35S | ME06589-08 | YES | J01 | [NULL] | 1.05 | WHOLE PLANT-Color-Dark Green |
| 12335031 | 35S | ME06589-08 | YES | J13 | [NULL] | 1.05 | WHOLE PLANT-Size-Small |
| 12335031 | 35S | ME06589-08 | YES | M14 | [NULL] | 6.90 | INFLORESCENCE-Height-Short |
| 12335031 | 35S | ME06589-08 | YES | M17 | [NULL] | 6.90 | INFLORESCENCE-Internode Length-Short Internode |
| 12335031 | 35S | ME06589-09 | NO | [NULL] | [NULL] | [NULL] | [NULL] |
| 12335031 | 35S | ME06589-10 | YES | J01 | [NULL] | 6.90 | WHOLE PLANT-Color-Dark Green |
| 12335031 | 35S | ME06589-10 | YES | M14 | [NULL] | 6.90 | INFLORESCENCE-Height-Short |
| 12335031 | 35S | ME06589-10 | YES | M17 | [NULL] | 6.90 | INFLORESCENCE-Internode Length-Short Internode |
| 12335112 | 35S | ME02931-01 | YES | I06 | [NULL] | 1.14 | ROSETTE LEAVES-Curled-Curled 4 |
| 12335112 | 35S | ME02931-01 | YES | I18 | [NULL] | 1.14 | ROSETTE LEAVES-Shape-Lanceolate |
| 12335112 | 35S | ME02931-01 | YES | M13 | [NULL] | 1.14 | INFLORESCENCE-Flowering Time-Late Flowering |
| 12335112 | 35S | ME02931-02 | YES | I31 | [NULL] | 5.10 | ROSETTE LEAVES-Other |
| 12335112 | 35S | ME02931-02 | YES | J13 | [NULL] | 5.10 | WHOLE PLANT-Size-Small |
| 12335112 | 35S | ME02931-03 | YES | I31 | [NULL] | 1.08 | ROSETTE LEAVES-Other |
| 12335112 | 35S | ME02931-03 | YES | J13 | [NULL] | 1.08 | WHOLE PLANT-Size-Small |
| 12335112 | 35S | ME02931-03 | YES | M13 | [NULL] | 1.08 | INFLORESCENCE-Flowering Time-Late Flowering |
| 12335112 | 35S | ME02931-04 | NO | [NULL] | [NULL] | [NULL] | [NULL] |
| 12335112 | 35S | ME02931-05 | NO | [NULL] | [NULL] | [NULL] | [NULL] |
| 12335112 | 35S | ME02931-06 | NO | [NULL] | [NULL] | [NULL] | [NULL] |
| 12335112 | 35S | ME02931-07 | NO | [NULL] | [NULL] | [NULL] | [NULL] |
| 12335112 | 35S | ME02931-08 | YES | I17 | [NULL] | 6.30 | ROSETTE LEAVES-Shape-Elliptic |
| 12335112 | 35S | ME02931-08 | YES | I31 | [NULL] | 6.30 | ROSETTE LEAVES-Other |
| 12335112 | 35S | ME02931-09 | NO | [NULL] | [NULL] | [NULL] | [NULL] |
| 12335112 | 35S | ME02931-10 | NO | [NULL] | [NULL] | [NULL] | [NULL] |
| 12335159 | 35S | ME06526-01 | YES | J01 | [NULL] | 6.10 | WHOLE PLANT-Color-Dark Green |
| 12335159 | 35S | ME06526-01 | YES | M14 | [NULL] | 6.50 | INFLORESCENCE-Height-Short |
| 12335159 | 35S | ME06526-01 | YES | M17 | [NULL] | 6.50 | INFLORESCENCE-Internode Length-Short Internode |
| 12335159 | 35S | ME06526-01 | YES | M25 | [NULL] | 6.50 | INFLORESCENCE-Other |
| 12335159 | 35S | ME06526-02 | YES | J01 | [NULL] | 6.10 | WHOLE PLANT-Color-Dark Green |
| 12335159 | 35S | ME06526-03 | NO | [NULL] | [NULL] | [NULL] | [NULL] |
| 12335159 | 35S | ME06526-04 | NO | [NULL] | [NULL] | [NULL] | [NULL] |
| 12335159 | 35S | ME06526-05 | NO | [NULL] | [NULL] | [NULL] | [NULL] |
| 12335159 | 35S | ME06526-06 | YES | M14 | [NULL] | 6.50 | INFLORESCENCE-Height-Short |
| 12335159 | 35S | ME06526-06 | YES | M17 | [NULL] | 6.50 | INFLORESCENCE-Internode Length-Short Internode |
| 12335159 | 35S | ME06526-06 | YES | M25 | [NULL] | 6.50 | INFLORESCENCE-Other |
| 12335159 | 35S | ME06526-07 | YES | M14 | [NULL] | 6.50 | INFLORESCENCE-Height-Short |
| 12335159 | 35S | ME06526-07 | YES | M17 | [NULL] | 6.50 | INFLORESCENCE-Internode Length-Short Internode |
| 12335159 | 35S | ME06526-07 | YES | M25 | [NULL] | 6.50 | INFLORESCENCE-Other |
| 12335159 | 35S | ME06526-08 | YES | J01 | [NULL] | 6.10 | WHOLE PLANT-Color-Dark Green |
| 12335159 | 35S | ME06526-08 | YES | M14 | [NULL] | 6.50 | INFLORESCENCE-Height-Short |
| 12335159 | 35S | ME06526-08 | YES | M17 | [NULL] | 6.50 | INFLORESCENCE-Internode Length-Short Internode |
| 12335159 | 35S | ME06526-08 | YES | M25 | [NULL] | 6.50 | INFLORESCENCE-Other |
| 12335159 | 35S | ME06526-09 | NO | [NULL] | [NULL] | [NULL] | [NULL] |
| 12335159 | 35S | ME06526-10 | YES | M14 | [NULL] | 6.50 | INFLORESCENCE-Height-Short |
| 12335159 | 35S | ME06526-10 | YES | M17 | [NULL] | 6.50 | INFLORESCENCE-Internode Length-Short Internode |
| 12335159 | 35S | ME06526-10 | YES | M25 | [NULL] | 6.50 | INFLORESCENCE-Other |
| 12335720 | 35S | ME03531-01 | YES | I07 | [NULL] | 6.30 | ROSETTE LEAVES-Curled-Curled 5 |
| 12335720 | 35S | ME03531-01 | YES | J13 | [NULL] | 6.30 | WHOLE PLANT-Size-Small |
| 12335720 | 35S | ME03531-01 | YES | P04 | [NULL] | 6.30 | FERTILITY-Fertility-Reduced |
| 12335720 | 35S | ME03531-02 | YES | I07 | [NULL] | 6.50 | ROSETTE LEAVES-Curled-Curled 5 |
| 12335720 | 35S | ME03531-02 | YES | J13 | [NULL] | 6.50 | WHOLE PLANT-Size-Small |
| 12335720 | 35S | ME03531-03 | YES | I06 | [NULL] | 6.00 | ROSETTE LEAVES-Curled-Curled 4 |
| 12335720 | 35S | ME03531-03 | YES | I31 | [NULL] | 6.00 | ROSETTE LEAVES-Other |
| 12335720 | 35S | ME03531-03 | YES | J13 | [NULL] | 6.00 | WHOLE PLANT-Size-Small |
| 12335720 | 35S | ME03531-04 | YES | I31 | [NULL] | 6.10 | ROSETTE LEAVES-Other |
| 12335720 | 35S | ME03531-04 | YES | J13 | [NULL] | 6.10 | WHOLE PLANT-Size-Small |
| 12335720 | 35S | ME03531-05 | YES | I03 | [NULL] | 6.00 | ROSETTE LEAVES-Curled-Curled 1 |
| 12335720 | 35S | ME03531-05 | YES | I22 | [NULL] | 6.00 | ROSETTE LEAVES-Shape-Serrate |
| 12335720 | 35S | ME03531-05 | YES | J01 | [NULL] | 6.00 | WHOLE PLANT-Color-Dark Green |
| 12335720 | 35S | ME03531-05 | YES | J13 | [NULL] | 6.00 | WHOLE PLANT-Size-Small |
| 12335720 | 35S | ME03531-05 | YES | L11 | [NULL] | 6.00 | FLOWERS-Other |
| 12335720 | 35S | ME03531-06 | YES | I03 | [NULL] | 6.30 | ROSETTE LEAVES-Curled-Curled 1 |
| 12335720 | 35S | ME03531-06 | YES | J13 | [NULL] | 6.30 | WHOLE PLANT-Size-Small |
| 12335720 | 35S | ME03531-06 | YES | P04 | [NULL] | 6.30 | FERTILITY-Fertility-Reduced |
| 12335720 | 35S | ME03531-07 | YES | I05 | [NULL] | 6.50 | ROSETTE LEAVES-Curled-Curled 3 |
| 12335720 | 35S | ME03531-07 | YES | J13 | [NULL] | 6.50 | WHOLE PLANT-Size-Small |
| 12335720 | 35S | ME03531-08 | YES | I07 | [NULL] | 6.50 | ROSETTE LEAVES-Curled-Curled 5 |
| 12335720 | 35S | ME03531-08 | YES | J13 | [NULL] | 6.50 | WHOLE PLANT-Size-Small |
| 12335720 | 35S | ME03531-09 | YES | I31 | [NULL] | 6.50 | ROSETTE LEAVES-Other |
| 12335720 | 35S | ME03531-09 | YES | J01 | [NULL] | 6.50 | WHOLE PLANT-Color-Dark Green |
| 12335720 | 35S | ME03531-09 | YES | J13 | [NULL] | 6.50 | WHOLE PLANT-Size-Small |
| 12335720 | 35S | ME03531-09 | YES | L11 | [NULL] | 6.50 | FLOWERS-Other |
| 12335720 | 35S | ME03531-10 | YES | I06 | [NULL] | 6.50 | ROSETTE LEAVES-Curled-Curled 4 |
| 12335720 | 35S | ME03531-10 | YES | J13 | [NULL] | 6.50 | WHOLE PLANT-Size-Small |
| 12336049 | 35S | ME02121-01 | NO | [NULL] | [NULL] | [NULL] | [NULL] |
| 12336049 | 35S | ME02121-02 | NO | [NULL] | [NULL] | [NULL] | [NULL] |
| 12336049 | 35S | ME02121-03 | YES | J13 | [NULL] | 6.10 | WHOLE PLANT-Size-Small |
| 12336049 | 35S | ME02121-04 | YES | J13 | [NULL] | 6.10 | WHOLE PLANT-Size-Small |
| 12336445 | 35S | ME02761-01 | YES | J03 | [NULL] | 1.14 | WHOLE PLANT-Color-Yellow-Green Viable 1 |
| 12336445 | 35S | ME02761-01 | YES | J03 | [NULL] | 6.30 | WHOLE PLANT-Color-Yellow-Green Viable 1 |
| 12336445 | 35S | ME02761-01 | YES | J13 | [NULL] | 6.30 | WHOLE PLANT-Size-Small |
| 12336445 | 35S | ME02761-02 | NO | [NULL] | [NULL] | [NULL] | [NULL] |
| 12336445 | 35S | ME02761-03 | NO | [NULL] | [NULL] | [NULL] | [NULL] |
| 12336445 | 35S | ME02761-04 | YES | J03 | [NULL] | 1.14 | WHOLE PLANT-Color-Yellow-Green Viable 1 |
| 12336445 | 35S | ME02761-04 | YES | J03 | [NULL] | 6.30 | WHOLE PLANT-Color-Yellow-Green Viable 1 |
| 12336445 | 35S | ME02761-04 | YES | J13 | [NULL] | 6.30 | WHOLE PLANT-Size-Small |
| 12336445 | 35S | ME02761-05 | YES | J03 | [NULL] | 1.14 | WHOLE PLANT-Color-Yellow-Green Viable 1 |
| 12336445 | 35S | ME02761-05 | YES | J03 | [NULL] | 6.30 | WHOLE PLANT-Color-Yellow-Green Viable 1 |
| 12336445 | 35S | ME02761-05 | YES | J13 | [NULL] | 6.30 | WHOLE PLANT-Size-Small |
| 12336445 | 35S | ME02761-06 | YES | J03 | [NULL] | 1.14 | WHOLE PLANT-Color-Yellow-Green Viable 1 |
| 12336445 | 35S | ME02761-06 | YES | J03 | [NULL] | 6.30 | WHOLE PLANT-Color-Yellow-Green Viable 1 |
| 12336445 | 35S | ME02761-06 | YES | J13 | [NULL] | 6.30 | WHOLE PLANT-Size-Small |
| 12336445 | 35S | ME02761-07 | YES | J03 | [NULL] | 1.14 | WHOLE PLANT-Color-Yellow-Green Viable 1 |
| 12336445 | 35S | ME02761-07 | YES | J03 | [NULL] | 6.30 | WHOLE PLANT-Color-Yellow-Green Viable 1 |
| 12336445 | 35S | ME02761-07 | YES | J13 | [NULL] | 6.30 | WHOLE PLANT-Size-Small |
| 12336445 | 35S | ME02761-08 | YES | J03 | [NULL] | 1.14 | WHOLE PLANT-Color-Yellow-Green Viable 1 |
| 12336445 | 35S | ME02761-08 | YES | J03 | [NULL] | 6.30 | WHOLE PLANT-Color-Yellow-Green Viable 1 |
| 12336445 | 35S | ME02761-08 | YES | J13 | [NULL] | 6.30 | WHOLE PLANT-Size-Small |
| 12336445 | 35S | ME02761-09 | YES | J03 | [NULL] | 1.14 | WHOLE PLANT-Color-Yellow-Green Viable 1 |
| 12336445 | 35S | ME02761-09 | YES | J03 | [NULL] | 6.30 | WHOLE PLANT-Color-Yellow-Green Viable 1 |
| 12336445 | 35S | ME02761-09 | YES | J13 | [NULL] | 6.30 | WHOLE PLANT-Size-Small |
| 12336445 | 35S | ME02816-01 | NO | [NULL] | [NULL] | [NULL] | [NULL] |
| 12336445 | 35S | ME02816-02 | YES | J03 | [NULL] | 6.30 | WHOLE PLANT-Color-Yellow-Green Viable 1 |
| 12336445 | 35S | ME02816-03 | YES | J03 | [NULL] | 6.30 | WHOLE PLANT-Color-Yellow-Green Viable 1 |
| 12336445 | 35S | ME02816-04 | YES | J03 | [NULL] | 6.30 | WHOLE PLANT-Color-Yellow-Green Viable 1 |
| 12336445 | 35S | ME02816-05 | YES | J03 | [NULL] | 6.30 | WHOLE PLANT-Color-Yellow-Green Viable 1 |
| 12336445 | 35S | ME02816-06 | YES | J03 | [NULL] | 6.30 | WHOLE PLANT-Color-Yellow-Green Viable 1 |
| 12337936 | 35S | ME02483-01 | NO | [NULL] | [NULL] | [NULL] | [NULL] |
| 12337936 | 35S | ME02483-02 | NO | [NULL] | [NULL] | [NULL] | [NULL] |
| 12337936 | 35S | ME02483-03 | YES | J13 | [NULL] | 6.10 | WHOLE PLANT-Size-Small |
| 12337936 | 35S | ME02483-04 | NO | [NULL] | [NULL] | [NULL] | [NULL] |
| 12337936 | 35S | ME02483-05 | NO | [NULL] | [NULL] | [NULL] | [NULL] |
| 12337936 | 35S | ME02483-06 | YES | J13 | [NULL] | 5.10 | WHOLE PLANT-Size-Small |
| 12337936 | 35S | ME02483-06 | YES | M13 | [NULL] | 5.10 | INFLORESCENCE-Flowering Time-Late Flowering |
| 12337936 | 35S | ME02483-07 | NO | [NULL] | [NULL] | [NULL] | [NULL] |
| 12337936 | 35S | ME02483-08 | YES | J13 | [NULL] | 5.10 | WHOLE PLANT-Size-Small |
| 12337936 | 35S | ME02483-08 | YES | M13 | [NULL] | 5.10 | INFLORESCENCE-Flowering Time-Late Flowering |
| 12337936 | 35S | ME02483-09 | NO | [NULL] | [NULL] | [NULL] | [NULL] |
| 12337978 | 35S | ME04059-01 | NO | [NULL] | [NULL] | [NULL] | [NULL] |
| 12337978 | 35S | ME04059-02 | YES | M15 | [NULL] | 6.90 | INFLORESCENCE-Height-Tall |
| 12337978 | 35S | ME04059-02 | YES | R02 | [NULL] | 6.90 | SENESCENCE TIME-Senescence Time-Late Senescence |
| 12337978 | 35S | ME04059-03 | YES | M13 | [NULL] | 1.10 | INFLORESCENCE-Flowering Time-Late Flowering |
| 12337978 | 35S | ME04059-04 | YES | R02 | [NULL] | 6.90 | SENESCENCE TIME-Senescence Time-Late Senescence |
| 12337978 | 35S | ME04059-05 | YES | M13 | [NULL] | 1.10 | INFLORESCENCE-Flowering Time-Late Flowering |
| 12337978 | 35S | ME04059-05 | YES | R02 | [NULL] | 6.90 | SENESCENCE TIME-Senescence Time-Late Senescence |
| 12337978 | 35S | ME04059-06 | NO | [NULL] | [NULL] | [NULL] | [NULL] |
| 12338308 | 35S | ME05401-01 | YES | J14 | [NULL] | 6.50 | WHOLE PLANT-Other |
| 12338308 | 35S | ME05401-01 | YES | M14 | [NULL] | 6.50 | INFLORESCENCE-Height-Short |
| 12338308 | 35S | ME05401-01 | YES | P04 | [NULL] | 6.50 | FERTILITY-Fertility-Reduced |
| 12338308 | 35S | ME05401-02 | NO | [NULL] | [NULL] | [NULL] | [NULL] |
| 12338308 | 35S | ME05401-03 | NO | [NULL] | [NULL] | [NULL] | [NULL] |
| 12338308 | 35S | ME05401-04 | YES | P04 | [NULL] | 6.50 | FERTILITY-Fertility-Reduced |
| 12338308 | 35S | ME05401-05 | NO | [NULL] | [NULL] | [NULL] | [NULL] |
| 12338308 | 35S | ME05401-06 | NO | [NULL] | [NULL] | [NULL] | [NULL] |
| 12338308 | 35S | ME05401-07 | YES | P04 | [NULL] | 6.50 | FERTILITY-Fertility-Reduced |
| 12338308 | 35S | ME05401-08 | NO | [NULL] | [NULL] | [NULL] | [NULL] |
| 12338308 | 35S | ME05401-09 | NO | [NULL] | [NULL] | [NULL] | [NULL] |
| 12338308 | 35S | ME05401-10 | NO | [NULL] | [NULL] | [NULL] | [NULL] |
| 12338463 | 35S | ME06291-01 | YES | J03 | [NULL] | 1.05 | WHOLE PLANT-Color-Yellow-Green Viable 1 |
| 12338463 | 35S | ME06291-02 | YES | J03 | [NULL] | 1.05 | WHOLE PLANT-Color-Yellow-Green Viable 1 |
| 12338463 | 35S | ME06291-03 | YES | J03 | [NULL] | 1.05 | WHOLE PLANT-Color-Yellow-Green Viable 1 |
| 12338463 | 35S | ME06291-04 | YES | J03 | [NULL] | 1.05 | WHOLE PLANT-Color-Yellow-Green Viable 1 |
| 12338463 | 35S | ME06291-05 | YES | J03 | [NULL] | 1.05 | WHOLE PLANT-Color-Yellow-Green Viable 1 |
| 12338463 | 35S | ME06291-06 | YES | J03 | [NULL] | 1.04 | WHOLE PLANT-Color-Yellow-Green Viable 1 |
| 12338463 | 35S | ME06291-07 | YES | J03 | [NULL] | 1.06 | WHOLE PLANT-Color-Yellow-Green Viable 1 |
| 12338463 | 35S | ME06291-08 | YES | J03 | [NULL] | 1.04 | WHOLE PLANT-Color-Yellow-Green Viable 1 |
| 12338463 | 35S | ME06291-09 | YES | J03 | [NULL] | 1.04 | WHOLE PLANT-Color-Yellow-Green Viable 1 |
| 12338463 | 35S | ME06291-10 | YES | J03 | [NULL] | 1.04 | WHOLE PLANT-Color-Yellow-Green Viable 1 |
| 12338681 | 35S | ME06712-01 | NO | [NULL] | [NULL] | [NULL] | [NULL] |
| 12338681 | 35S | ME06712-02 | YES | J01 | [NULL] | 1.05 | WHOLE PLANT-Color-Dark Green |
| 12338681 | 35S | ME06712-02 | YES | J13 | [NULL] | 1.05 | WHOLE PLANT-Size-Small |
| 12338681 | 35S | ME06712-03 | NO | [NULL] | [NULL] | [NULL] | [NULL] |
| 12338681 | 35S | ME06712-04 | NO | [NULL] | [NULL] | [NULL] | [NULL] |
| 12338681 | 35S | ME06712-05 | NO | [NULL] | [NULL] | [NULL] | [NULL] |
| 12338681 | 35S | ME06712-06 | YES | J01 | [NULL] | 1.05 | WHOLE PLANT-Color-Dark Green |
| 12338681 | 35S | ME06712-06 | YES | J13 | [NULL] | 1.05 | WHOLE PLANT-Size-Small |
| 12338681 | 35S | ME06712-07 | NO | [NULL] | [NULL] | [NULL] | [NULL] |
| 12338681 | 35S | ME06712-08 | NO | [NULL] | [NULL] | [NULL] | [NULL] |
| 12338681 | 35S | ME06712-09 | NO | [NULL] | [NULL] | [NULL] | [NULL] |
| 12338681 | 35S | ME06712-10 | YES | J01 | [NULL] | 1.05 | WHOLE PLANT-Color-Dark Green |
| 12338681 | 35S | ME06712-10 | YES | J13 | [NULL] | 1.05 | WHOLE PLANT-Size-Small |
| 12339505 | 32449 | ME00068-01 | NO | [NULL] | [NULL] | [NULL] | [NULL] |
| 12339505 | 32449 | ME00068-02 | NO | [NULL] | [NULL] | [NULL] | [NULL] |
| 12339505 | 32449 | ME00068-03 | NO | [NULL] | [NULL] | [NULL] | [NULL] |
| 12339505 | 32449 | ME00068-04 | NO | [NULL] | [NULL] | [NULL] | [NULL] |
| 12339505 | 32449 | ME00068-05 | NO | [NULL] | [NULL] | [NULL] | [NULL] |
| 12339505 | 32449 | ME00068-06 | NO | [NULL] | [NULL] | [NULL] | [NULL] |
| 12339505 | 32449 | ME00068-07 | NO | [NULL] | [NULL] | [NULL] | [NULL] |
| 12339505 | 32449 | ME00068-08 | NO | [NULL] | [NULL] | [NULL] | [NULL] |
| 12339505 | 32449 | ME00068-09 | NO | [NULL] | [NULL] | [NULL] | [NULL] |
| 12339505 | 35S | ME05593-01 | NO | [NULL] | [NULL] | [NULL] | [NULL] |
| 12339505 | 35S | ME05593-02 | NO | [NULL] | [NULL] | [NULL] | [NULL] |
| 12339505 | 35S | ME05593-03 | NO | [NULL] | [NULL] | [NULL] | [NULL] |
| 12339505 | 35S | ME05593-04 | YES | I08 | [NULL] | 5.10 | ROSETTE LEAVES-Disorganized Rosette- |
| | | | | | | | Disorganized Rosette |
| 12339505 | 35S | ME05593-04 | YES | I31 | [NULL] | 5.10 | ROSETTE LEAVES-Other |
| 12339505 | 35S | ME05593-04 | YES | J01 | [NULL] | 5.10 | WHOLE PLANT-Color-Dark Green |
| 12339505 | 35S | ME05593-04 | YES | L11 | [NULL] | 6.30 | FLOWERS-Other |
| 12339505 | 35S | ME05593-04 | YES | M10 | [NULL] | 5.10 | INFLORESCENCE-Branching-Reduced Apical |
| | | | | | | | Dominance |
| 12339505 | 35S | ME05593-04 | YES | M14 | [NULL] | 6.30 | INFLORESCENCE-Height-Short |
| 12339505 | 35S | ME05593-05 | YES | I08 | [NULL] | 6.30 | ROSETTE LEAVES-Disorganized Rosette- |
| | | | | | | | Disorganized Rosette |
| 12339505 | 35S | ME05593-05 | YES | M25 | [NULL] | 6.30 | INFLORESCENCE-Other |
| 12339505 | 35S | ME05593-06 | YES | I31 | [NULL] | 1.02 | ROSETTE LEAVES-Other |
| 12339505 | 35S | ME05593-06 | YES | J01 | [NULL] | 1.02 | WHOLE PLANT-Color-Dark Green |
| 12339505 | 35S | ME05593-06 | YES | J13 | [NULL] | 1.02 | WHOLE PLANT-Size-Small |
| 12339505 | 35S | ME05593-06 | YES | M13 | [NULL] | 1.02 | INFLORESCENCE-Flowering Time-Late Flowering |
| 12339505 | 35S | ME05593-07 | YES | I08 | [NULL] | 5.10 | ROSETTE LEAVES-Disorganized Rosette- |
| | | | | | | | Disorganized Rosette |
| 12339505 | 35S | ME05593-07 | YES | I31 | [NULL] | 5.10 | ROSETTE LEAVES-Other |
| 12339505 | 35S | ME05593-07 | YES | J01 | [NULL] | 5.10 | WHOLE PLANT-Color-Dark Green |
| 12339505 | 35S | ME05593-07 | YES | J14 | [NULL] | 6.30 | WHOLE PLANT-Other |
| 12339505 | 35S | ME05593-07 | YES | M10 | [NULL] | 5.10 | INFLORESCENCE-Branching-Reduced Apical |
| | | | | | | | Dominance |
| 12339505 | 35S | ME05593-08 | NO | [NULL] | [NULL] | [NULL] | [NULL] |
| 12339505 | 35S | ME05593-09 | NO | [NULL] | [NULL] | [NULL] | [NULL] |
| 12339505 | 35S | ME05593-10 | YES | I08 | [NULL] | 6.30 | ROSETTE LEAVES-Disorganized Rosette- |
| | | | | | | | Disorganized Rosette |
| 12339505 | 35S | ME05593-10 | YES | M25 | [NULL] | 6.30 | INFLORESCENCE-Other |
| 12340180 | 35S | ME02209-01 | NO | [NULL] | [NULL] | [NULL] | [NULL] |
| 12340180 | 35S | ME02209-02 | YES | I04 | [NULL] | 1.07 | ROSETTE LEAVES-Curled-Curled 2 |
| 12340180 | 35S | ME02209-02 | YES | J13 | [NULL] | 5.10 | WHOLE PLANT-Size-Small |
| 12340180 | 35S | ME02209-02 | YES | M13 | [NULL] | 5.10 | INFLORESCENCE-Flowering Time-Late Flowering |
| 12340180 | 35S | ME02209-03 | NO | [NULL] | [NULL] | [NULL] | [NULL] |
| 12340180 | 35S | ME02209-04 | NO | [NULL] | [NULL] | [NULL] | [NULL] |
| 12340180 | 35S | ME02209-05 | NO | [NULL] | [NULL] | [NULL] | [NULL] |
| 12340180 | 35S | ME02209-06 | YES | I03 | [NULL] | 1.07 | ROSETTE LEAVES-Curled-Curled 1 |
| 12340180 | 35S | ME02209-07 | NO | [NULL] | [NULL] | [NULL] | [NULL] |
| 12340180 | 35S | ME02209-08 | NO | [NULL] | [NULL] | [NULL] | [NULL] |
| 12340180 | 35S | ME02209-09 | NO | [NULL] | [NULL] | [NULL] | [NULL] |
| 12340180 | 35S | ME02209-10 | YES | I04 | [NULL] | 1.07 | ROSETTE LEAVES-Curled-Curled 2 |
| 12340180 | 35S | ME02209-10 | YES | J13 | [NULL] | 5.10 | WHOLE PLANT-Size-Small |
| 12340180 | 35S | ME02209-10 | YES | J14 | [NULL] | 5.10 | WHOLE PLANT-Other |
| 12340299 | 35S | ME07041-01 | YES | I05 | [NULL] | 1.05 | ROSETTE LEAVES-Curled-Curled 3 |
| 12340299 | 35S | ME07041-01 | YES | I05 | [NULL] | 6.50 | ROSETTE LEAVES-Curled-Curled 3 |
| 12340299 | 35S | ME07041-01 | YES | K05 | [NULL] | 6.50 | CAULINE LEAVES-Curled-Curled 3 |
| 12340299 | 35S | ME07041-02 | NO | [NULL] | [NULL] | [NULL] | [NULL] |
| 12340299 | 35S | ME07041-03 | NO | [NULL] | [NULL] | [NULL] | [NULL] |
| 12340299 | 35S | ME07041-04 | YES | I05 | [NULL] | 1.05 | ROSETTE LEAVES-Curled-Curled 3 |
| 12340299 | 35S | ME07041-04 | YES | I05 | [NULL] | 6.50 | ROSETTE LEAVES-Curled-Curled 3 |
| 12340299 | 35S | ME07041-04 | YES | K05 | [NULL] | 6.50 | CAULINE LEAVES-Curled-Curled 3 |
| 12340299 | 35S | ME07041-05 | NO | [NULL] | [NULL] | [NULL] | [NULL] |
| 12340299 | 35S | ME07041-06 | NO | [NULL] | [NULL] | [NULL] | [NULL] |
| 12340299 | 35S | ME07041-07 | NO | [NULL] | [NULL] | [NULL] | [NULL] |
| 12340299 | 35S | ME07041-08 | NO | [NULL] | [NULL] | [NULL] | [NULL] |
| 12340299 | 35S | ME07041-09 | NO | [NULL] | [NULL] | [NULL] | [NULL] |
| 12340299 | 35S | ME07041-10 | YES | I05 | [NULL] | 1.06 | ROSETTE LEAVES-Curled-Curled 3 |
| 12340299 | 35S | ME07041-10 | YES | I05 | [NULL] | 6.50 | ROSETTE LEAVES-Curled-Curled 3 |
| 12340299 | 35S | ME07041-10 | YES | K05 | [NULL] | 6.50 | CAULINE LEAVES-Curled-Curled 3 |
| 12340630 | 35S | ME08449-01 | YES | I18 | [NULL] | 1.07 | ROSETTE LEAVES-Shape-Lanceolate |
| 12340630 | 35S | ME08449-01 | YES | I31 | [NULL] | 1.06 | ROSETTE LEAVES-Other |
| 12340630 | 35S | ME08449-02 | YES | I18 | [NULL] | 1.08 | ROSETTE LEAVES-Shape-Lanceolate |
| 12340630 | 35S | ME08449-02 | YES | N04 | [NULL] | 6.50 | SILIQUES-Shape-Bulging |
| 12340630 | 35S | ME08449-02 | YES | N05 | [NULL] | 6.50 | SILIQUES-Shape-Clubbed |
| 12340630 | 35S | ME08449-02 | YES | P04 | [NULL] | 6.50 | FERTILITY-Fertility-Reduced |
| 12340630 | 35S | ME08449-03 | YES | I18 | [NULL] | 1.07 | ROSETTE LEAVES-Shape-Lanceolate |
| 12340630 | 35S | ME08449-03 | YES | N04 | [NULL] | 6.50 | SILIQUES-Shape-Bulging |
| 12340630 | 35S | ME08449-03 | YES | N05 | [NULL] | 6.50 | SILIQUES-Shape-Clubbed |
| 12340630 | 35S | ME08449-03 | YES | P04 | [NULL] | 6.50 | FERTILITY-Fertility-Reduced |
| 12340630 | 35S | ME08449-04 | YES | I18 | [NULL] | 1.07 | ROSETTE LEAVES-Shape-Lanceolate |
| 12340630 | 35S | ME08449-04 | YES | I31 | [NULL] | 1.06 | ROSETTE LEAVES-Other |
| 12340630 | 35S | ME08449-04 | YES | N04 | [NULL] | 6.50 | SILIQUES-Shape-Bulging |
| 12340630 | 35S | ME08449-04 | YES | N05 | [NULL] | 6.50 | SILIQUES-Shape-Clubbed |
| 12340630 | 35S | ME08449-04 | YES | P04 | [NULL] | 6.50 | FERTILITY-Fertility-Reduced |
| 12340630 | 35S | ME08449-05 | YES | I18 | [NULL] | 1.07 | ROSETTE LEAVES-Shape-Lanceolate |
| 12340630 | 35S | ME08449-05 | YES | I31 | [NULL] | 1.06 | ROSETTE LEAVES-Other |
| 12340630 | 35S | ME08449-05 | YES | N04 | [NULL] | 6.50 | SILIQUES-Shape-Bulging |
| 12340630 | 35S | ME08449-05 | YES | N05 | [NULL] | 6.50 | SILIQUES-Shape-Clubbed |
| 12340630 | 35S | ME08449-05 | YES | P04 | [NULL] | 6.50 | FERTILITY-Fertility-Reduced |
| 12340630 | 35S | ME08449-06 | NO | [NULL] | [NULL] | [NULL] | [NULL] |
| 12340630 | 35S | ME08449-07 | YES | I18 | [NULL] | 1.06 | ROSETTE LEAVES-Shape-Lanceolate |
| 12340630 | 35S | ME08449-07 | YES | I31 | [NULL] | 1.06 | ROSETTE LEAVES-Other |
| 12340630 | 35S | ME08449-07 | YES | N04 | [NULL] | 6.50 | SILIQUES-Shape-Bulging |
| 12340630 | 35S | ME08449-07 | YES | N05 | [NULL] | 6.50 | SILIQUES-Shape-Clubbed |
| 12340630 | 35S | ME08449-07 | YES | P04 | [NULL] | 6.50 | FERTILITY-Fertility-Reduced |
| 12340630 | 35S | ME08449-08 | YES | I18 | [NULL] | 1.06 | ROSETTE LEAVES-Shape-Lanceolate |
| 12340630 | 35S | ME08449-08 | YES | I31 | [NULL] | 1.06 | ROSETTE LEAVES-Other |
| 12340630 | 35S | ME08449-08 | YES | N04 | [NULL] | 6.50 | SILIQUES-Shape-Bulging |
| 12340630 | 35S | ME08449-08 | YES | N05 | [NULL] | 6.50 | SILIQUES-Shape-Clubbed |
| 12340630 | 35S | ME08449-08 | YES | P04 | [NULL] | 6.50 | FERTILITY-Fertility-Reduced |
| 12340630 | 35S | ME08449-09 | YES | I18 | [NULL] | 1.06 | ROSETTE LEAVES-Shape-Lanceolate |
| 12340630 | 35S | ME08449-09 | YES | I31 | [NULL] | 1.05 | ROSETTE LEAVES-Other |
| 12340630 | 35S | ME08449-09 | YES | N04 | [NULL] | 6.50 | SILIQUES-Shape-Bulging |
| 12340630 | 35S | ME08449-09 | YES | N05 | [NULL] | 6.50 | SILIQUES-Shape-Clubbed |
| 12340630 | 35S | ME08449-09 | YES | P04 | [NULL] | 6.50 | FERTILITY-Fertility-Reduced |
| 12340630 | 35S | ME08449-10 | NO | [NULL] | [NULL] | [NULL] | [NULL] |
| 12341440 | 326D | ME09213-01 | [NULL] | [NULL] | [NULL] | [NULL] | [NULL] |
| 12341440 | 326D | ME09213-02 | [NULL] | [NULL] | [NULL] | [NULL] | [NULL] |
| 12341440 | 326D | ME09213-03 | [NULL] | [NULL] | [NULL] | [NULL] | [NULL] |
| 12341440 | 326D | ME09213-04 | [NULL] | [NULL] | [NULL] | [NULL] | [NULL] |
| 12341440 | 35S | ME03149-01 | YES | I18 | [NULL] | 6.00 | ROSETTE LEAVES-Shape-Lanceolate |
| 12341440 | 35S | ME03149-01 | YES | J13 | [NULL] | 6.00 | WHOLE PLANT-Size-Small |
| 12341440 | 35S | ME03149-01 | YES | M07 | [NULL] | 6.00 | INFLORESCENCE-Branching-Asecondary |
| 12341440 | 35S | ME03149-01 | YES | M09 | [NULL] | 6.00 | INFLORESCENCE-Branching-No Branching |
| 12341440 | 35S | ME03149-02 | NO | [NULL] | [NULL] | [NULL] | [NULL] |
| 12341440 | 35S | ME03149-03 | YES | I18 | [NULL] | 5.10 | ROSETTE LEAVES-Shape-Lanceolate |
| 12341440 | 35S | ME03149-03 | YES | I31 | [NULL] | 5.10 | ROSETTE LEAVES-Other |
| 12341440 | 35S | ME03149-03 | YES | J13 | [NULL] | 5.10 | WHOLE PLANT-Size-Small |
| 12341440 | 35S | ME03149-03 | YES | M07 | [NULL] | 5.10 | INFLORESCENCE-Branching-Asecondary |
| 12341440 | 35S | ME03149-03 | YES | M09 | [NULL] | 5.10 | INFLORESCENCE-Branching-No Branching |
| 12341440 | 35S | ME03149-04 | NO | [NULL] | [NULL] | [NULL] | [NULL] |
| 12341440 | 35S | ME03149-05 | NO | [NULL] | [NULL] | [NULL] | [NULL] |
| 12341440 | 35S | ME03149-06 | NO | [NULL] | [NULL] | [NULL] | [NULL] |
| 12341440 | 35S | ME03149-07 | NO | [NULL] | [NULL] | [NULL] | [NULL] |
| 12341440 | 35S | ME03149-08 | NO | [NULL] | [NULL] | [NULL] | [NULL] |
| 12341440 | 35S | ME03149-09 | NO | [NULL] | [NULL] | [NULL] | [NULL] |
| 12341440 | 35S | ME03149-10 | YES | I04 | [NULL] | 5.10 | ROSETTE LEAVES-Curled-Curled 2 |
| 12341440 | 35S | ME03149-10 | YES | I08 | [NULL] | 5.10 | ROSETTE LEAVES-Disorganized Rosette- |
| | | | | | | | Disorganized Rosette |
| 12341440 | 35S | ME03149-10 | YES | I18 | [NULL] | 5.10 | ROSETTE LEAVES-Shape-Lanceolate |
| 12341440 | 35S | ME03149-10 | YES | J03 | [NULL] | 5.10 | WHOLE PLANT-Color-Yellow-Green Viable 1 |
| 12341440 | 35S | ME03149-10 | YES | K03 | [NULL] | 5.10 | CAULINE LEAVES-Curled-Curled 1 |
| 12341440 | 35S | ME03149-10 | YES | M07 | [NULL] | 5.10 | INFLORESCENCE-Branching-Asecondary |
| 12341440 | 35S | ME03149-10 | YES | M09 | [NULL] | 5.10 | INFLORESCENCE-Branching-No Branching |
| 12341440 | 35S | ME03149-10 | YES | M14 | [NULL] | 5.10 | INFLORESCENCE-Height-Short |
| 12341440 | 35S | ME03149-10 | YES | M25 | [NULL] | 5.10 | INFLORESCENCE-Other |
| 12343570 | 35S | ME04223-01 | NO | [NULL] | [NULL] | [NULL] | [NULL] |
| 12343570 | 35S | ME04223-02 | QUESTIONABLE | R01 | [NULL] | 6.90 | SENESCENCE TIME-Senescence Time- |
| | | | | | | | Early Senescence |
| 12343570 | 35S | ME04223-03 | YES | I18 | [NULL] | 6.50 | ROSETTE LEAVES-Shape-Lanceolate |
| 12343570 | 35S | ME04223-03 | YES | J01 | [NULL] | 6.00 | WHOLE PLANT-Color-Dark Green |
| 12343570 | 35S | ME04223-03 | YES | M14 | [NULL] | 6.00 | INFLORESCENCE-Height-Short |
| 12343570 | 35S | ME04223-03 | YES | M25 | [NULL] | 6.50 | INFLORESCENCE-Other |
| 12343570 | 35S | ME04223-03 | YES | P05 | [NULL] | 6.50 | FERTILITY-Fertility-Sterile |
| 12343570 | 35S | ME04223-04 | YES | I18 | [NULL] | 6.50 | ROSETTE LEAVES-Shape-Lanceolate |
| 12343570 | 35S | ME04223-04 | YES | J01 | [NULL] | 6.00 | WHOLE PLANT-Color-Dark Green |
| 12343570 | 35S | ME04223-04 | YES | M14 | [NULL] | 6.00 | INFLORESCENCE-Height-Short |
| 12343570 | 35S | ME04223-04 | YES | M25 | [NULL] | 6.50 | INFLORESCENCE-Other |
| 12343570 | 35S | ME04223-04 | YES | P05 | [NULL] | 6.50 | FERTILITY-Fertility-Sterile |
| 12343570 | 35S | ME04223-05 | NO | [NULL] | [NULL] | [NULL] | [NULL] |
| 12348436 | 35S | ME05276-01 | NO | [NULL] | [NULL] | [NULL] | [NULL] |
| 12348436 | 35S | ME05276-02 | NO | [NULL] | [NULL] | [NULL] | [NULL] |
| 12348436 | 35S | ME05276-03 | YES | I08 | [NULL] | 5.10 | ROSETTE LEAVES-Disorganized Rosette- |
| | | | | | | | Disorganized Rosette |
| 12348436 | 35S | ME05276-03 | YES | I18 | [NULL] | 5.10 | ROSETTE LEAVES-Shape-Lanceolate |
| 12348436 | 35S | ME05276-03 | YES | J13 | [NULL] | 5.10 | WHOLE PLANT-Size-Small |
| 12348436 | 35S | ME05276-03 | YES | M13 | [NULL] | 5.10 | INFLORESCENCE-Flowering Time-Late Flowering |
| 12348436 | 35S | ME05276-04 | NO | [NULL] | [NULL] | [NULL] | [NULL] |
| 12348436 | 35S | ME05276-05 | NO | [NULL] | [NULL] | [NULL] | [NULL] |
| 12348436 | 35S | ME05276-06 | NO | [NULL] | [NULL] | [NULL] | [NULL] |
| 12348436 | 35S | ME05276-07 | YES | I22 | [NULL] | 6.10 | ROSETTE LEAVES-Shape-Serrate |
| 12348436 | 35S | ME05276-07 | YES | J13 | [NULL] | 6.10 | WHOLE PLANT-Size-Small |
| 12348436 | 35S | ME05276-08 | YES | J13 | [NULL] | 6.10 | WHOLE PLANT-Size-Small |
| 12348436 | 35S | ME05276-09 | YES | J13 | [NULL] | 6.10 | WHOLE PLANT-Size-Small |
| 12348436 | 35S | ME05276-10 | NO | [NULL] | [NULL] | [NULL] | [NULL] |
| 12348448 | 326D | ME09204-01 | [NULL] | [NULL] | [NULL] | [NULL] | [NULL] |
| 12348448 | 326D | ME09204-02 | [NULL] | [NULL] | [NULL] | [NULL] | [NULL] |
| 12348448 | 326D | ME09204-03 | [NULL] | [NULL] | [NULL] | [NULL] | [NULL] |
| 12348448 | 326D | ME09204-04 | [NULL] | [NULL] | [NULL] | [NULL] | [NULL] |
| 12348448 | 326D | ME09204-05 | [NULL] | [NULL] | [NULL] | [NULL] | [NULL] |
| 12348448 | 326D | ME09204-06 | [NULL] | [NULL] | [NULL] | [NULL] | [NULL] |
| 12348448 | 326D | ME09204-07 | [NULL] | [NULL] | [NULL] | [NULL] | [NULL] |
| 12348448 | 326D | ME09204-08 | [NULL] | [NULL] | [NULL] | [NULL] | [NULL] |
| 12348448 | 326D | ME09204-09 | [NULL] | [NULL] | [NULL] | [NULL] | [NULL] |
| 12348448 | 326D | ME09204-10 | [NULL] | [NULL] | [NULL] | [NULL] | [NULL] |
| 12348448 | 34414F | ME09362-01 | [NULL] | [NULL] | [NULL] | [NULL] | [NULL] |
| 12348448 | 34414F | ME09362-02 | [NULL] | [NULL] | [NULL] | [NULL] | [NULL] |
| 12348448 | 34414F | ME09362-03 | [NULL] | [NULL] | [NULL] | [NULL] | [NULL] |
| 12348448 | 34414F | ME09362-04 | [NULL] | [NULL] | [NULL] | [NULL] | [NULL] |
| 12348448 | 34414F | ME09362-05 | [NULL] | [NULL] | [NULL] | [NULL] | [NULL] |
| 12348448 | 35S | ME02517-01 | NO | [NULL] | [NULL] | [NULL] | [NULL] |
| 12348448 | 35S | ME02517-02 | NO | [NULL] | [NULL] | [NULL] | [NULL] |
| 12348448 | 35S | ME02517-03 | NO | [NULL] | [NULL] | [NULL] | [NULL] |
| 12348448 | 35S | ME02517-04 | YES | M19 | [NULL] | 6.50 | INFLORESCENCE-Strength-Strong |
| 12348448 | 35S | ME02517-05 | YES | M19 | [NULL] | 6.50 | INFLORESCENCE-Strength-Strong |
| 12348448 | 35S | ME02517-06 | NO | [NULL] | [NULL] | [NULL] | [NULL] |
| 12348448 | 35S | ME02517-07 | YES | M19 | [NULL] | 6.50 | INFLORESCENCE-Strength-Strong |
| 12348448 | 35S | ME02517-08 | YES | I20 | [NULL] | 1.12 | ROSETTE LEAVES-Shape-Oval |
| 12348448 | 35S | ME02517-08 | YES | J01 | [NULL] | 1.12 | WHOLE PLANT-Color-Dark Green |
| 12348448 | 35S | ME02517-08 | YES | M13 | [NULL] | 1.12 | INFLORESCENCE-Flowering Time-Late Flowering |
| 12348448 | 35S | ME02517-08 | YES | M19 | [NULL] | 6.50 | INFLORESCENCE-Strength-Strong |
| 12348448 | 35S | ME02517-08 | YES | P04 | [NULL] | 6.50 | FERTILITY-Fertility-Reduced |
| 12348448 | 35S | ME02517-09 | NO | [NULL] | [NULL] | [NULL] | [NULL] |
| 12348720 | 32449 | ME00917-01 | NO | [NULL] | [NULL] | [NULL] | [NULL] |
| 12348720 | 32449 | ME00917-02 | NO | [NULL] | [NULL] | [NULL] | [NULL] |
| 12348720 | 32449 | ME00917-03 | NO | [NULL] | [NULL] | [NULL] | [NULL] |
| 12348720 | 32449 | ME00917-04 | NO | [NULL] | [NULL] | [NULL] | [NULL] |
| 12348720 | 32449 | ME00917-05 | NO | [NULL] | [NULL] | [NULL] | [NULL] |
| 12348720 | 32449 | ME01137-01 | NO | [NULL] | [NULL] | [NULL] | [NULL] |
| 12348720 | 32449 | ME01137-02 | NO | [NULL] | [NULL] | [NULL] | [NULL] |
| 12348720 | 32449 | ME01137-03 | NO | [NULL] | [NULL] | [NULL] | [NULL] |
| 12348720 | 32449 | ME01137-04 | NO | [NULL] | [NULL] | [NULL] | [NULL] |
| 12348720 | 32449 | ME01137-05 | NO | [NULL] | [NULL] | [NULL] | [NULL] |
| 12348720 | 35S | ME06302-01 | YES | I14 | [NULL] | 1.06 | ROSETTE LEAVES-Petiole Length-Short Petioles |
| 12348720 | 35S | ME06302-01 | YES | I20 | [NULL] | 1.06 | ROSETTE LEAVES-Shape-Oval |
| 12348720 | 35S | ME06302-02 | YES | I14 | [NULL] | 1.06 | ROSETTE LEAVES-Petiole Length-Short Petioles |
| 12348720 | 35S | ME06302-02 | YES | I20 | [NULL] | 1.06 | ROSETTE LEAVES-Shape-Oval |
| 12348720 | 35S | ME06302-03 | YES | I14 | [NULL] | 1.07 | ROSETTE LEAVES-Petiole Length-Short Petioles |
| 12348720 | 35S | ME06302-03 | YES | I20 | [NULL] | 1.07 | ROSETTE LEAVES-Shape-Oval |
| 12348720 | 35S | ME06302-04 | YES | I14 | [NULL] | 1.06 | ROSETTE LEAVES-Petiole Length-Short Petioles |
| 12348720 | 35S | ME06302-04 | YES | I20 | [NULL] | 1.06 | ROSETTE LEAVES-Shape-Oval |
| 12348720 | 35S | ME06302-05 | YES | I14 | [NULL] | 1.06 | ROSETTE LEAVES-Petiole Length-Short Petioles |
| 12348720 | 35S | ME06302-05 | YES | I20 | [NULL] | 1.06 | ROSETTE LEAVES-Shape-Oval |
| 12348720 | 35S | ME06302-06 | YES | I14 | [NULL] | 1.05 | ROSETTE LEAVES-Petiole Length-Short Petioles |
| 12348720 | 35S | ME06302-06 | YES | I20 | [NULL] | 1.05 | ROSETTE LEAVES-Shape-Oval |
| 12348720 | 35S | ME06302-07 | YES | I14 | [NULL] | 1.04 | ROSETTE LEAVES-Petiole Length-Short Petioles |
| 12348720 | 35S | ME06302-07 | YES | I20 | [NULL] | 1.04 | ROSETTE LEAVES-Shape-Oval |
| 12348720 | 35S | ME06302-08 | YES | I14 | [NULL] | 1.05 | ROSETTE LEAVES-Petiole Length-Short Petioles |
| 12348720 | 35S | ME06302-08 | YES | I20 | [NULL] | 1.05 | ROSETTE LEAVES-Shape-Oval |
| 12348720 | 35S | ME06302-09 | YES | I14 | [NULL] | 1.05 | ROSETTE LEAVES-Petiole Length-Short Petioles |
| 12348720 | 35S | ME06302-09 | YES | I20 | [NULL] | 1.05 | ROSETTE LEAVES-Shape-Oval |
| 12348720 | 35S | ME06302-10 | YES | I14 | [NULL] | 1.06 | ROSETTE LEAVES-Petiole Length-Short Petioles |
| 12348720 | 35S | ME06302-10 | YES | I20 | [NULL] | 1.06 | ROSETTE LEAVES-Shape-Oval |
| 12357583 | 35S | ME04905-01 | YES | I20 | [NULL] | 1.06 | ROSETTE LEAVES-Shape-Oval |
| 12357583 | 35S | ME04905-01 | YES | J13 | [NULL] | 1.06 | WHOLE PLANT-Size-Small |
| 12357583 | 35S | ME04905-01 | YES | M13 | [NULL] | 1.06 | INFLORESCENCE-Flowering Time-Late Flowering |
| 12357583 | 35S | ME04905-02 | YES | I20 | [NULL] | 1.06 | ROSETTE LEAVES-Shape-Oval |
| 12357583 | 35S | ME04905-02 | YES | J13 | [NULL] | 1.06 | WHOLE PLANT-Size-Small |
| 12357583 | 35S | ME04905-02 | YES | M13 | [NULL] | 1.06 | INFLORESCENCE-Flowering Time-Late Flowering |
| 12357583 | 35S | ME04905-03 | YES | I20 | [NULL] | 5.10 | ROSETTE LEAVES-Shape-Oval |
| 12357583 | 35S | ME04905-03 | YES | J01 | [NULL] | 5.10 | WHOLE PLANT-Color-Dark Green |
| 12357583 | 35S | ME04905-04 | NO | [NULL] | [NULL] | [NULL] | [NULL] |
| 12357583 | 35S | ME04905-05 | YES | I20 | [NULL] | 5.10 | ROSETTE LEAVES-Shape-Oval |
| 12357583 | 35S | ME04905-05 | YES | J01 | [NULL] | 5.10 | WHOLE PLANT-Color-Dark Green |
| 12357583 | 35S | ME04905-06 | NO | [NULL] | [NULL] | [NULL] | [NULL] |
| 12357583 | 35S | ME04905-07 | NO | [NULL] | [NULL] | [NULL] | [NULL] |
| 12357583 | 35S | ME04905-08 | NO | [NULL] | [NULL] | [NULL] | [NULL] |
| 12357583 | 35S | ME04905-09 | NO | [NULL] | [NULL] | [NULL] | [NULL] |
| 12357583 | 35S | ME04905-10 | NO | [NULL] | [NULL] | [NULL] | [NULL] |
| 12365221 | 35S | ME08460-01 | YES | I02 | [NULL] | 6.00 | ROSETTE LEAVES-Curled-Cup-shaped |
| 12365221 | 35S | ME08460-01 | YES | M13 | [NULL] | 6.00 | INFLORESCENCE-Flowering Time-Late Flowering |
| 12365221 | 35S | ME08460-02 | YES | I02 | [NULL] | 6.00 | ROSETTE LEAVES-Curled-Cup-shaped |
| 12365221 | 35S | ME08460-02 | YES | M13 | [NULL] | 6.00 | INFLORESCENCE-Flowering Time-Late Flowering |
| 12365221 | 35S | ME08460-03 | NO | [NULL] | [NULL] | [NULL] | [NULL] |
| 12365221 | 35S | ME08460-04 | YES | I02 | [NULL] | 6.00 | ROSETTE LEAVES-Curled-Cup-shaped |
| 12365221 | 35S | ME08460-04 | YES | M13 | [NULL] | 6.00 | INFLORESCENCE-Flowering Time-Late Flowering |
| 12365221 | 35S | ME08460-05 | YES | I02 | [NULL] | 6.00 | ROSETTE LEAVES-Curled-Cup-shaped |
| 12365221 | 35S | ME08460-05 | YES | M13 | [NULL] | 6.00 | INFLORESCENCE-Flowering Time-Late Flowering |
| 12365221 | 35S | ME08460-06 | NO | [NULL] | [NULL] | [NULL] | [NULL] |
| 12365221 | 35S | ME08460-07 | YES | I02 | [NULL] | 6.00 | ROSETTE LEAVES-Curled-Cup-shaped |
| 12365221 | 35S | ME08460-07 | YES | M13 | [NULL] | 6.00 | INFLORESCENCE-Flowering Time-Late Flowering |
| 12365221 | 35S | ME08460-08 | NO | [NULL] | [NULL] | [NULL] | [NULL] |
| 12365221 | 35S | ME08460-09 | YES | I02 | [NULL] | 6.00 | ROSETTE LEAVES-Curled-Cup-shaped |
| 12365221 | 35S | ME08460-09 | YES | I14 | [NULL] | 1.11 | ROSETTE LEAVES-Petiole Length-Short Petioles |
| 12365221 | 35S | ME08460-09 | YES | J13 | [NULL] | 1.11 | WHOLE PLANT-Size-Small |
| 12365221 | 35S | ME08460-09 | YES | M13 | [NULL] | 6.00 | INFLORESCENCE-Flowering Time-Late Flowering |
| 12365221 | 35S | ME08460-10 | NO | [NULL] | [NULL] | [NULL] | [NULL] |
| 12367017 | 35S | ME02523-01 | NO | [NULL] | [NULL] | [NULL] | [NULL] |
| 12367017 | 35S | ME02523-02 | YES | J01 | [NULL] | 5.10 | WHOLE PLANT-Color-Dark Green |
| 12367017 | 35S | ME02523-02 | YES | J13 | [NULL] | 5.10 | WHOLE PLANT-Size-Small |
| 12367017 | 35S | ME02523-02 | YES | M13 | [NULL] | 5.10 | INFLORESCENCE-Flowering Time-Late Flowering |
| 12367017 | 35S | ME02523-03 | YES | I22 | [NULL] | 6.30 | ROSETTE LEAVES-Shape-Serrate |
| 12367017 | 35S | ME02523-03 | YES | P04 | [NULL] | 6.50 | FERTILITY-Fertility-Reduced |
| 12367017 | 35S | ME02523-04 | YES | P04 | [NULL] | 6.50 | FERTILITY-Fertility-Reduced |
| 12367017 | 35S | ME02523-05 | NO | [NULL] | [NULL] | [NULL] | [NULL] |
| 12367017 | 35S | ME02523-06 | YES | P04 | [NULL] | 6.50 | FERTILITY-Fertility-Reduced |
| 12367017 | 35S | ME02523-07 | NO | [NULL] | [NULL] | [NULL] | [NULL] |
| 12367017 | 35S | ME02523-08 | NO | [NULL] | [NULL] | [NULL] | [NULL] |
| 12367017 | 35S | ME02523-09 | YES | P04 | [NULL] | 6.50 | FERTILITY-Fertility-Reduced |
| 12367017 | 35S | ME02523-10 | NO | [NULL] | [NULL] | [NULL] | [NULL] |
| 12370138 | 13879D | ME09410-01 | NO | [NULL] | [NULL] | [NULL] | [NULL] |
| 12370138 | 13879D | ME09410-02 | NO | [NULL] | [NULL] | [NULL] | [NULL] |
| 12370138 | 13879D | ME09410-03 | NO | [NULL] | [NULL] | [NULL] | [NULL] |
| 12370138 | 13879D | ME09410-04 | YES | M13 | [NULL] | 6.30 | INFLORESCENCE-Flowering Time-Late |
| | | | | | | | Flowering |
| 12370138 | 13879D | ME09410-05 | NO | [NULL] | [NULL] | [NULL] | [NULL] |
| 12370138 | 13879D | ME09410-06 | NO | [NULL] | [NULL] | [NULL] | [NULL] |
| 12370138 | 13879D | ME09410-07 | NO | [NULL] | [NULL] | [NULL] | [NULL] |
| 12370138 | 13879D | ME09410-08 | NO | [NULL] | [NULL] | [NULL] | [NULL] |
| 12370138 | 13879D | ME09410-09 | YES | M13 | [NULL] | 6.30 | INFLORESCENCE-Flowering Time-Late |
| | | | | | | | Flowering |
| 12370138 | 13879D | ME09410-10 | YES | M13 | [NULL] | 6.30 | INFLORESCENCE-Flowering Time-Late |
| | | | | | | | Flowering |
| 12370138 | 13879F | ME04686-01 | NO | [NULL] | [NULL] | [NULL] | [NULL] |
| 12370138 | 13879F | ME04686-02 | NO | [NULL] | [NULL] | [NULL] | [NULL] |
| 12370138 | 13879F | ME04686-03 | NO | [NULL] | [NULL] | [NULL] | [NULL] |
| 12370138 | 13879F | ME04686-04 | NO | [NULL] | [NULL] | [NULL] | [NULL] |
| 12370138 | 13879F | ME04686-05 | NO | [NULL] | [NULL] | [NULL] | [NULL] |
| 12370138 | 13879F | ME04686-06 | NO | [NULL] | [NULL] | [NULL] | [NULL] |
| 12370138 | 13879F | ME04686-07 | NO | [NULL] | [NULL] | [NULL] | [NULL] |
| 12370138 | 13879F | ME04686-08 | NO | [NULL] | [NULL] | [NULL] | [NULL] |
| 12370138 | 13879F | ME04686-09 | NO | [NULL] | [NULL] | [NULL] | [NULL] |
| 12370138 | 13879F | ME04686-10 | NO | [NULL] | [NULL] | [NULL] | [NULL] |
| 12370138 | 13879F | ME09403-01 | NO | [NULL] | [NULL] | [NULL] | [NULL] |
| 12370138 | 13879F | ME09403-02 | NO | [NULL] | [NULL] | [NULL] | [NULL] |
| 12370138 | 13879F | ME09403-03 | NO | [NULL] | [NULL] | [NULL] | [NULL] |
| 12370138 | 13879F | ME09403-04 | NO | [NULL] | [NULL] | [NULL] | [NULL] |
| 12370138 | 13879F | ME09403-05 | NO | [NULL] | [NULL] | [NULL] | [NULL] |
| 12370138 | 13879F | ME09403-06 | NO | [NULL] | [NULL] | [NULL] | [NULL] |
| 12370138 | 13879F | ME09403-07 | NO | [NULL] | [NULL] | [NULL] | [NULL] |
| 12370138 | 15529D | ME07567-01 | NO | [NULL] | [NULL] | [NULL] | [NULL] |
| 12370138 | 15529D | ME07567-02 | YES | M14 | [NULL] | 6.30 | INFLORESCENCE-Height-Short |
| 12370138 | 15529D | ME07567-02 | YES | M19 | [NULL] | 6.30 | INFLORESCENCE-Strength-Strong |
| 12370138 | 15529D | ME07567-02 | YES | P04 | [NULL] | 6.30 | FERTILITY-Fertility-Reduced |
| 12370138 | 15529D | ME07567-03 | NO | [NULL] | [NULL] | [NULL] | [NULL] |
| 12370138 | 15529F | ME09417-01 | NO | [NULL] | [NULL] | [NULL] | [NULL] |
| 12370138 | 15529F | ME09417-02 | NO | [NULL] | [NULL] | [NULL] | [NULL] |
| 12370138 | 15529F | ME09417-03 | NO | [NULL] | [NULL] | [NULL] | [NULL] |
| 12370138 | 15529F | ME09417-04 | NO | [NULL] | [NULL] | [NULL] | [NULL] |
| 12370138 | 15529F | ME09417-05 | NO | [NULL] | [NULL] | [NULL] | [NULL] |
| 12370138 | 15529F | ME09417-06 | NO | [NULL] | [NULL] | [NULL] | [NULL] |
| 12370138 | 15529F | ME09417-07 | NO | [NULL] | [NULL] | [NULL] | [NULL] |
| 12370138 | 15529F | ME09417-08 | NO | [NULL] | [NULL] | [NULL] | [NULL] |
| 12370138 | 28716F | ME04732-01 | NO | [NULL] | [NULL] | [NULL] | [NULL] |
| 12370138 | 28716F | ME04732-02 | NO | [NULL] | [NULL] | [NULL] | [NULL] |
| 12370138 | 28716F | ME04732-03 | NO | [NULL] | [NULL] | [NULL] | [NULL] |
| 12370138 | 28716F | ME04732-04 | NO | [NULL] | [NULL] | [NULL] | [NULL] |
| 12370138 | 28716F | ME04732-05 | NO | [NULL] | [NULL] | [NULL] | [NULL] |
| 12370138 | 28716F | ME04732-06 | YES | I22 | [NULL] | 6.00 | ROSETTE LEAVES-Shape-Serrate |
| 12370138 | 28716F | ME04732-06 | YES | J13 | [NULL] | 6.00 | WHOLE PLANT-Size-Small |
| 12370138 | 28716F | ME04732-06 | YES | J14 | [NULL] | 6.00 | WHOLE PLANT-Other |
| 12370138 | 28716F | ME04732-06 | YES | M13 | [NULL] | 6.00 | INFLORESCENCE-Flowering Time-Late |
| | | | | | | | Flowering |
| 12370138 | 28716F | ME04732-06 | YES | M14 | [NULL] | 6.00 | INFLORESCENCE-Height-Short |
| 12370138 | 28716F | ME04732-07 | NO | [NULL] | [NULL] | [NULL] | [NULL] |
| 12370138 | 28716F | ME04732-08 | NO | [NULL] | [NULL] | [NULL] | [NULL] |
| 12370138 | 28716F | ME04732-09 | NO | [NULL] | [NULL] | [NULL] | [NULL] |
| 12370138 | 28716F | ME04732-10 | NO | [NULL] | [NULL] | [NULL] | [NULL] |
| 12370138 | 32449D | ME04724-01 | NO | [NULL] | [NULL] | [NULL] | [NULL] |
| 12370138 | 32449D | ME04724-02 | NO | [NULL] | [NULL] | [NULL] | [NULL] |
| 12370138 | 32449D | ME04724-03 | NO | [NULL] | [NULL] | [NULL] | [NULL] |
| 12370138 | 32449D | ME04724-04 | NO | [NULL] | [NULL] | [NULL] | [NULL] |
| 12370138 | 32449D | ME04724-05 | NO | [NULL] | [NULL] | [NULL] | [NULL] |
| 12370138 | 32449D | ME04724-06 | NO | [NULL] | [NULL] | [NULL] | [NULL] |
| 12370138 | 32449D | ME04724-07 | NO | [NULL] | [NULL] | [NULL] | [NULL] |
| 12370138 | 32449D | ME04724-08 | NO | [NULL] | [NULL] | [NULL] | [NULL] |
| 12370138 | 32449D | ME04724-09 | NO | [NULL] | [NULL] | [NULL] | [NULL] |
| 12370138 | 32449D | ME04724-10 | NO | [NULL] | [NULL] | [NULL] | [NULL] |
| 12370138 | 326D | ME04714-01 | NO | [NULL] | [NULL] | [NULL] | [NULL] |
| 12370138 | 326D | ME04714-02 | NO | [NULL] | [NULL] | [NULL] | [NULL] |
| 12370138 | 326D | ME04714-03 | NO | [NULL] | [NULL] | [NULL] | [NULL] |
| 12370138 | 326D | ME04714-04 | NO | [NULL] | [NULL] | [NULL] | [NULL] |
| 12370138 | 326D | ME04714-05 | NO | [NULL] | [NULL] | [NULL] | [NULL] |
| 12370138 | 326D | ME04714-06 | NO | [NULL] | [NULL] | [NULL] | [NULL] |
| 12370138 | 326D | ME04714-07 | NO | [NULL] | [NULL] | [NULL] | [NULL] |
| 12370138 | 326D | ME04714-08 | NO | [NULL] | [NULL] | [NULL] | [NULL] |
| 12370138 | 326D | ME04714-09 | NO | [NULL] | [NULL] | [NULL] | [NULL] |
| 12370138 | 326D | ME04714-10 | NO | [NULL] | [NULL] | [NULL] | [NULL] |
| 12370138 | 326D | ME09208-01 | NO | [NULL] | [NULL] | [NULL] | [NULL] |
| 12370138 | 326D | ME09208-02 | NO | [NULL] | [NULL] | [NULL] | [NULL] |
| 12370138 | 326D | ME09208-03 | NO | [NULL] | [NULL] | [NULL] | [NULL] |
| 12370138 | 326D | ME09208-04 | NO | [NULL] | [NULL] | [NULL] | [NULL] |
| 12370138 | 326D | ME09208-05 | NO | [NULL] | [NULL] | [NULL] | [NULL] |
| 12370138 | 326D | ME09208-06 | NO | [NULL] | [NULL] | [NULL] | [NULL] |
| 12370138 | 326D | ME09208-07 | NO | [NULL] | [NULL] | [NULL] | [NULL] |
| 12370138 | 326D | ME09208-08 | NO | [NULL] | [NULL] | [NULL] | [NULL] |
| 12370138 | 326D | ME09208-09 | NO | [NULL] | [NULL] | [NULL] | [NULL] |
| 12370138 | 326D | ME09208-10 | NO | [NULL] | [NULL] | [NULL] | [NULL] |
| 12370138 | 326F | ME04706-01 | NO | [NULL] | [NULL] | [NULL] | [NULL] |
| 12370138 | 326F | ME04706-02 | NO | [NULL] | [NULL] | [NULL] | [NULL] |
| 12370138 | 326F | ME04706-03 | NO | [NULL] | [NULL] | [NULL] | [NULL] |
| 12370138 | 326F | ME04706-04 | NO | [NULL] | [NULL] | [NULL] | [NULL] |
| 12370138 | 326F | ME04706-05 | NO | [NULL] | [NULL] | [NULL] | [NULL] |
| 12370138 | 326F | ME04706-06 | NO | [NULL] | [NULL] | [NULL] | [NULL] |
| 12370138 | 326F | ME04706-07 | NO | [NULL] | [NULL] | [NULL] | [NULL] |
| 12370138 | 326F | ME04706-08 | NO | [NULL] | [NULL] | [NULL] | [NULL] |
| 12370138 | 326F | ME04706-09 | NO | [NULL] | [NULL] | [NULL] | [NULL] |
| 12370138 | 326F | ME09435-01 | NO | [NULL] | [NULL] | [NULL] | [NULL] |
| 12370138 | 326F | ME09435-02 | NO | [NULL] | [NULL] | [NULL] | [NULL] |
| 12370138 | 326F | ME09435-03 | NO | [NULL] | [NULL] | [NULL] | [NULL] |
| 12370138 | 34414F | ME04696-01 | NO | [NULL] | [NULL] | [NULL] | [NULL] |
| 12370138 | 34414F | ME04696-02 | NO | [NULL] | [NULL] | [NULL] | [NULL] |
| 12370138 | 34414F | ME04696-03 | NO | [NULL] | [NULL] | [NULL] | [NULL] |
| 12370138 | 34414F | ME04696-04 | NO | [NULL] | [NULL] | [NULL] | [NULL] |
| 12370138 | 34414F | ME04696-05 | NO | [NULL] | [NULL] | [NULL] | [NULL] |
| 12370138 | 34414F | ME04696-06 | NO | [NULL] | [NULL] | [NULL] | [NULL] |
| 12370138 | 34414F | ME04696-07 | NO | [NULL] | [NULL] | [NULL] | [NULL] |
| 12370138 | 34414F | ME04696-08 | NO | [NULL] | [NULL] | [NULL] | [NULL] |
| 12370138 | 34414F | ME04696-09 | NO | [NULL] | [NULL] | [NULL] | [NULL] |
| 12370138 | 34414F | ME04696-10 | NO | [NULL] | [NULL] | [NULL] | [NULL] |
| 12370138 | 34414F | ME09366-01 | NO | [NULL] | [NULL] | [NULL] | [NULL] |
| 12370138 | 34414F | ME09366-02 | NO | [NULL] | [NULL] | [NULL] | [NULL] |
| 12370138 | 34414F | ME09366-03 | QUESTIONABLE | M13 | [NULL] | 6.30 | INFLORESCENCE-Flowering Time- |
| | | | | | | | Late Flowering |
| 12370138 | 34414F | ME09366-04 | NO | [NULL] | [NULL] | [NULL] | [NULL] |
| 12370138 | 34414F | ME09366-05 | NO | [NULL] | [NULL] | [NULL] | [NULL] |
| 12370138 | 34414F | ME09366-06 | NO | [NULL] | [NULL] | [NULL] | [NULL] |
| 12370138 | 34414F | ME09366-07 | NO | [NULL] | [NULL] | [NULL] | [NULL] |
| 12370138 | 34414F | ME09366-08 | NO | [NULL] | [NULL] | [NULL] | [NULL] |
| 12370138 | 34414F | ME09366-09 | NO | [NULL] | [NULL] | [NULL] | [NULL] |
| 12370138 | 34414F | ME09366-10 | QUESTIONABLE | J14 | [NULL] | 1.04 | WHOLE PLANT-Other |
| 12370138 | 35S | ME02837-01 | NO | [NULL] | [NULL] | [NULL] | [NULL] |
| 12370138 | 35S | ME02837-02 | NO | [NULL] | [NULL] | [NULL] | [NULL] |
| 12370138 | 35S | ME02837-03 | NO | [NULL] | [NULL] | [NULL] | [NULL] |
| 12370138 | 35S | ME02837-04 | NO | [NULL] | [NULL] | [NULL] | [NULL] |
| 12370138 | 35S | ME02837-05 | NO | [NULL] | [NULL] | [NULL] | [NULL] |
| 12370138 | 35S | ME02837-06 | NO | [NULL] | [NULL] | [NULL] | [NULL] |
| 12370138 | 35S | ME02837-07 | YES | I18 | [NULL] | 6.00 | ROSETTE LEAVES-Shape-Lanceolate |
| 12370138 | 35S | ME02837-07 | YES | I22 | [NULL] | 6.00 | ROSETTE LEAVES-Shape-Serrate |
| 12370138 | 35S | ME02837-07 | YES | J01 | [NULL] | 6.00 | WHOLE PLANT-Color-Dark Green |
| 12370138 | 35S | ME02837-07 | YES | J08 | [NULL] | 6.30 | WHOLE PLANT-Dwarf-Misc. Dwarf |
| 12370138 | 35S | ME02837-07 | YES | K16 | [NULL] | 6.00 | CAULINE LEAVES-Shape-Lanceolate |
| 12370138 | 35S | ME02837-07 | YES | M13 | [NULL] | 1.10 | INFLORESCENCE-Flowering Time-Late Flowering |
| 12370138 | 35S | ME02837-07 | YES | M25 | [NULL] | 6.00 | INFLORESCENCE-Other |
| 12370138 | 35S | ME02837-08 | YES | I18 | [NULL] | 6.00 | ROSETTE LEAVES-Shape-Lanceolate |
| 12370138 | 35S | ME02837-08 | YES | I22 | [NULL] | 6.00 | ROSETTE LEAVES-Shape-Serrate |
| 12370138 | 35S | ME02837-08 | YES | J01 | [NULL] | 6.00 | WHOLE PLANT-Color-Dark Green |
| 12370138 | 35S | ME02837-08 | YES | J08 | [NULL] | 6.30 | WHOLE PLANT-Dwarf-Misc. Dwarf |
| 12370138 | 35S | ME02837-08 | YES | K16 | [NULL] | 6.00 | CAULINE LEAVES-Shape-Lanceolate |
| 12370138 | 35S | ME02837-08 | YES | M13 | [NULL] | 1.10 | INFLORESCENCE-Flowering Time-Late Flowering |
| 12370138 | 35S | ME02837-08 | YES | M20 | [NULL] | 6.30 | INFLORESCENCE-Strength-Weak |
| 12370138 | 35S | ME02837-08 | YES | P05 | [NULL] | 6.30 | FERTILITY-Fertility-Sterile |
| 12370138 | 35S | ME02837-09 | YES | P04 | [NULL] | 6.30 | FERTILITY-Fertility-Reduced |
| 12370138 | 35S | ME02837-10 | NO | [NULL] | [NULL] | [NULL] | [NULL] |
| 12370296 | 35S | ME07592-01 | YES | J14 | [NULL] | 1.05 | WHOLE PLANT-Other |
| 12370296 | 35S | ME07592-02 | NO | [NULL] | [NULL] | [NULL] | [NULL] |
| 12370296 | 35S | ME07592-03 | YES | J14 | [NULL] | 1.06 | WHOLE PLANT-Other |
| 12370296 | 35S | ME07592-04 | YES | J14 | [NULL] | 1.05 | WHOLE PLANT-Other |
| 12370296 | 35S | ME07592-05 | YES | J14 | [NULL] | 1.08 | WHOLE PLANT-Other |
| 12370296 | 35S | ME07592-06 | NO | [NULL] | [NULL] | [NULL] | [NULL] |
| 12370296 | 35S | ME07592-07 | NO | [NULL] | [NULL] | [NULL] | [NULL] |
| 12371338 | 35S | ME06586-01 | YES | J14 | [NULL] | 1.05 | WHOLE PLANT-Other |
| 12371338 | 35S | ME06586-02 | YES | J14 | [NULL] | 1.05 | WHOLE PLANT-Other |
| 12371338 | 35S | ME06586-03 | YES | J14 | [NULL] | 1.05 | WHOLE PLANT-Other |
| 12371338 | 35S | ME06586-04 | YES | J14 | [NULL] | 1.05 | WHOLE PLANT-Other |
| 12371338 | 35S | ME06586-05 | NO | [NULL] | [NULL] | [NULL] | [NULL] |
| 12371708 | 35S | ME06548-01 | YES | I05 | [NULL] | 5.10 | ROSETTE LEAVES-Curled-Curled 3 |
| 12371708 | 35S | ME06548-02 | YES | I05 | [NULL] | 5.10 | ROSETTE LEAVES-Curled-Curled 3 |
| 12371708 | 35S | ME06548-03 | YES | I05 | [NULL] | 6.00 | ROSETTE LEAVES-Curled-Curled 3 |
| 12371708 | 35S | ME06548-04 | YES | I05 | [NULL] | 6.00 | ROSETTE LEAVES-Curled-Curled 3 |
| 12371708 | 35S | ME06548-05 | YES | I05 | [NULL] | 6.00 | ROSETTE LEAVES-Curled-Curled 3 |
| 12371708 | 35S | ME06548-06 | YES | I05 | [NULL] | 1.09 | ROSETTE LEAVES-Curled-Curled 3 |
| 12371708 | 35S | ME06548-07 | YES | I05 | [NULL] | 5.10 | ROSETTE LEAVES-Curled-Curled 3 |
| 12371708 | 35S | ME06548-08 | YES | I05 | [NULL] | 5.10 | ROSETTE LEAVES-Curled-Curled 3 |
| 12371708 | 35S | ME06548-09 | NO | [NULL] | [NULL] | [NULL] | [NULL] |
| 12371708 | 35S | ME06548-10 | NO | [NULL] | [NULL] | [NULL] | [NULL] |
| 12371852 | 35S | ME01576-01 | QUESTIONABLE | P04 | [NULL] | 6.50 | FERTILITY-Fertility-Reduced |
| 12371852 | 35S | ME01576-02 | YES | Q02 | [NULL] | 9.70 | SEED-Color-Light |
| 12371852 | 35S | ME01576-03 | YES | Q02 | [NULL] | 9.70 | SEED-Color-Light |
| 12371852 | 35S | ME01576-04 | NO | [NULL] | [NULL] | [NULL] | [NULL] |
| 12371852 | 35S | ME01576-05 | YES | Q02 | [NULL] | 9.70 | SEED-Color-Light |
| 12371852 | 35S | ME01576-06 | YES | D01 | [NULL] | 1.04 | WHOLE SEEDLING-Dark Green |
| 12371852 | 35S | ME01576-06 | YES | J13 | [NULL] | 5.10 | WHOLE PLANT-Size-Small |
| 12371852 | 35S | ME01576-06 | YES | L11 | [NULL] | 6.30 | FLOWERS-Other |
| 12371852 | 35S | ME01576-06 | YES | L11 | [NULL] | 6.50 | FLOWERS-Other |
| 12371852 | 35S | ME01576-06 | YES | M20 | [NULL] | 6.30 | INFLORESCENCE-Strength-Weak |
| 12371852 | 35S | ME01576-06 | YES | P04 | [NULL] | 6.50 | FERTILITY-Fertility-Reduced |
| 12371852 | 35S | ME01576-06 | YES | Q02 | [NULL] | 9.70 | SEED-Color-Light |
| 12371852 | 35S | ME01576-07 | NO | [NULL] | [NULL] | [NULL] | [NULL] |
| 12371852 | 35S | ME01576-08 | NO | [NULL] | [NULL] | [NULL] | [NULL] |
| 12371852 | 35S | ME01576-09 | NO | [NULL] | [NULL] | [NULL] | [NULL] |
| 12371981 | 35S | ME02039-01 | YES | J13 | [NULL] | 6.50 | WHOLE PLANT-Size-Small |
| 12371981 | 35S | ME02039-02 | NO | [NULL] | [NULL] | [NULL] | [NULL] |
| 12371981 | 35S | ME02039-03 | NO | [NULL] | [NULL] | [NULL] | [NULL] |
| 12371981 | 35S | ME02039-04 | NO | [NULL] | [NULL] | [NULL] | [NULL] |
| 12371981 | 35S | ME02039-05 | NO | [NULL] | [NULL] | [NULL] | [NULL] |
| 12371981 | 35S | ME02039-06 | YES | J13 | [NULL] | 6.50 | WHOLE PLANT-Size-Small |
| 12371981 | 35S | ME02039-07 | YES | J13 | [NULL] | 6.50 | WHOLE PLANT-Size-Small |
| 12371981 | 35S | ME02039-08 | YES | J13 | [NULL] | 6.50 | WHOLE PLANT-Size-Small |
| 12371981 | 35S | ME02039-09 | YES | J13 | [NULL] | 6.50 | WHOLE PLANT-Size-Small |
| 12385784 | 35S | ME06090-01 | NO | [NULL] | [NULL] | [NULL] | [NULL] |
| 12385784 | 35S | ME06090-02 | YES | J13 | [NULL] | 1.06 | WHOLE PLANT-Size-Small |
| 12385784 | 35S | ME06090-03 | NO | [NULL] | [NULL] | [NULL] | [NULL] |
| 12385784 | 35S | ME06090-04 | YES | J13 | [NULL] | 1.06 | WHOLE PLANT-Size-Small |
| 12385784 | 35S | ME06090-05 | NO | [NULL] | [NULL] | [NULL] | [NULL] |
| 12385784 | 35S | ME06090-06 | YES | J13 | [NULL] | 1.06 | WHOLE PLANT-Size-Small |
| 12385784 | 35S | ME06090-07 | YES | J13 | [NULL] | 1.06 | WHOLE PLANT-Size-Small |
| 12385784 | 35S | ME06090-08 | YES | J13 | [NULL] | 1.06 | WHOLE PLANT-Size-Small |
| 12385784 | 35S | ME06090-09 | YES | J13 | [NULL] | 1.06 | WHOLE PLANT-Size-Small |
| 12389450 | 35S | ME05783-01 | NO | [NULL] | [NULL] | [NULL] | [NULL] |
| 12389450 | 35S | ME05783-02 | YES | I14 | [NULL] | 1.07 | ROSETTE LEAVES-Petiole Length-Short Petioles |
| 12389450 | 35S | ME05783-02 | YES | J01 | [NULL] | 1.07 | WHOLE PLANT-Color-Dark Green |
| 12389450 | 35S | ME05783-02 | YES | M13 | [NULL] | 1.07 | INFLORESCENCE-Flowering Time-Late Flowering |
| 12389450 | 35S | ME05783-03 | YES | I14 | [NULL] | 1.08 | ROSETTE LEAVES-Petiole Length-Short Petioles |
| 12389450 | 35S | ME05783-03 | YES | J01 | [NULL] | 1.08 | WHOLE PLANT-Color-Dark Green |
| 12389450 | 35S | ME05783-03 | YES | M13 | [NULL] | 1.08 | INFLORESCENCE-Flowering Time-Late Flowering |
| 12389450 | 35S | ME05783-03 | YES | M17 | [NULL] | 6.90 | INFLORESCENCE-Internode Length-Short Internode |
| 12389450 | 35S | ME05783-03 | YES | P04 | [NULL] | 6.90 | FERTILITY-Fertility-Reduced |
| 12389450 | 35S | ME05783-04 | YES | I14 | [NULL] | 1.07 | ROSETTE LEAVES-Petiole Length-Short Petioles |
| 12389450 | 35S | ME05783-04 | YES | J01 | [NULL] | 1.07 | WHOLE PLANT-Color-Dark Green |
| 12389450 | 35S | ME05783-04 | YES | M13 | [NULL] | 1.07 | INFLORESCENCE-Flowering Time-Late Flowering |
| 12389450 | 35S | ME05783-05 | YES | I14 | [NULL] | 1.08 | ROSETTE LEAVES-Petiole Length-Short Petioles |
| 12389450 | 35S | ME05783-05 | YES | J01 | [NULL] | 1.08 | WHOLE PLANT-Color-Dark Green |
| 12389450 | 35S | ME05783-05 | YES | M13 | [NULL] | 1.08 | INFLORESCENCE-Flowering Time-Late Flowering |
| 12389450 | 35S | ME05783-06 | NO | [NULL] | [NULL] | [NULL] | [NULL] |
| 12389450 | 35S | ME05783-07 | NO | [NULL] | [NULL] | [NULL] | [NULL] |
| 12389450 | 35S | ME05783-08 | NO | [NULL] | [NULL] | [NULL] | [NULL] |
| 12389450 | 35S | ME05783-09 | YES | I14 | [NULL] | 1.08 | ROSETTE LEAVES-Petiole Length-Short Petioles |
| 12389450 | 35S | ME05783-09 | YES | J01 | [NULL] | 1.08 | WHOLE PLANT-Color-Dark Green |
| 12389450 | 35S | ME05783-09 | YES | M13 | [NULL] | 1.08 | INFLORESCENCE-Flowering Time-Late Flowering |
| 12389450 | 35S | ME05783-10 | NO | [NULL] | [NULL] | [NULL] | [NULL] |
| 12392187 | 35S | ME05778-01 | YES | I14 | [NULL] | 1.09 | ROSETTE LEAVES-Petiole Length-Short Petioles |
| 12392187 | 35S | ME05778-01 | YES | I20 | [NULL] | 1.09 | ROSETTE LEAVES-Shape-Oval |
| 12392187 | 35S | ME05778-01 | YES | J01 | [NULL] | 1.09 | WHOLE PLANT-Color-Dark Green |
| 12392187 | 35S | ME05778-01 | YES | M13 | [NULL] | 1.09 | INFLORESCENCE-Flowering Time-Late Flowering |
| 12392187 | 35S | ME05778-02 | YES | I14 | [NULL] | 1.07 | ROSETTE LEAVES-Petiole Length-Short Petioles |
| 12392187 | 35S | ME05778-02 | YES | I20 | [NULL] | 1.07 | ROSETTE LEAVES-Shape-Oval |
| 12392187 | 35S | ME05778-02 | YES | J01 | [NULL] | 1.07 | WHOLE PLANT-Color-Dark Green |
| 12392187 | 35S | ME05778-02 | YES | M13 | [NULL] | 1.07 | INFLORESCENCE-Flowering Time-Late Flowering |
| 12392187 | 35S | ME05778-03 | YES | I14 | [NULL] | 1.08 | ROSETTE LEAVES-Petiole Length-Short Petioles |
| 12392187 | 35S | ME05778-03 | YES | I20 | [NULL] | 1.08 | ROSETTE LEAVES-Shape-Oval |
| 12392187 | 35S | ME05778-03 | YES | J01 | [NULL] | 1.08 | WHOLE PLANT-Color-Dark Green |
| 12392187 | 35S | ME05778-03 | YES | M13 | [NULL] | 1.08 | INFLORESCENCE-Flowering Time-Late Flowering |
| 12392187 | 35S | ME05778-04 | YES | I14 | [NULL] | 1.08 | ROSETTE LEAVES-Petiole Length-Short Petioles |
| 12392187 | 35S | ME05778-04 | YES | I20 | [NULL] | 1.08 | ROSETTE LEAVES-Shape-Oval |
| 12392187 | 35S | ME05778-04 | YES | J01 | [NULL] | 1.08 | WHOLE PLANT-Color-Dark Green |
| 12392187 | 35S | ME05778-04 | YES | M13 | [NULL] | 1.08 | INFLORESCENCE-Flowering Time-Late Flowering |
| 12392187 | 35S | ME05778-05 | YES | I14 | [NULL] | 1.07 | ROSETTE LEAVES-Petiole Length-Short Petioles |
| 12392187 | 35S | ME05778-05 | YES | I20 | [NULL] | 1.07 | ROSETTE LEAVES-Shape-Oval |
| 12392187 | 35S | ME05778-05 | YES | J01 | [NULL] | 1.07 | WHOLE PLANT-Color-Dark Green |
| 12392187 | 35S | ME05778-05 | YES | M13 | [NULL] | 1.07 | INFLORESCENCE-Flowering Time-Late Flowering |
| 12392187 | 35S | ME05778-06 | YES | I14 | [NULL] | 1.07 | ROSETTE LEAVES-Petiole Length-Short Petioles |
| 12392187 | 35S | ME05778-06 | YES | I20 | [NULL] | 1.07 | ROSETTE LEAVES-Shape-Oval |
| 12392187 | 35S | ME05778-06 | YES | J01 | [NULL] | 1.07 | WHOLE PLANT-Color-Dark Green |
| 12392187 | 35S | ME05778-06 | YES | M13 | [NULL] | 1.07 | INFLORESCENCE-Flowering Time-Late Flowering |
| 12392187 | 35S | ME05778-07 | YES | I14 | [NULL] | 1.07 | ROSETTE LEAVES-Petiole Length-Short Petioles |
| 12392187 | 35S | ME05778-07 | YES | I20 | [NULL] | 1.07 | ROSETTE LEAVES-Shape-Oval |
| 12392187 | 35S | ME05778-07 | YES | J01 | [NULL] | 1.07 | WHOLE PLANT-Color-Dark Green |
| 12392187 | 35S | ME05778-07 | YES | M13 | [NULL] | 1.07 | INFLORESCENCE-Flowering Time-Late Flowering |
| 12392187 | 35S | ME05778-08 | YES | I14 | [NULL] | 1.07 | ROSETTE LEAVES-Petiole Length-Short Petioles |
| 12392187 | 35S | ME05778-08 | YES | I20 | [NULL] | 1.07 | ROSETTE LEAVES-Shape-Oval |
| 12392187 | 35S | ME05778-08 | YES | J01 | [NULL] | 1.07 | WHOLE PLANT-Color-Dark Green |
| 12392187 | 35S | ME05778-08 | YES | M13 | [NULL] | 1.07 | INFLORESCENCE-Flowering Time-Late Flowering |
| 12392187 | 35S | ME05778-09 | YES | I14 | [NULL] | 1.06 | ROSETTE LEAVES-Petiole Length-Short Petioles |
| 12392187 | 35S | ME05778-09 | YES | I20 | [NULL] | 1.06 | ROSETTE LEAVES-Shape-Oval |
| 12392187 | 35S | ME05778-09 | YES | J01 | [NULL] | 1.06 | WHOLE PLANT-Color-Dark Green |
| 12392187 | 35S | ME05778-09 | YES | M13 | [NULL] | 1.06 | INFLORESCENCE-Flowering Time-Late Flowering |
| 12392187 | 35S | ME05778-10 | YES | I14 | [NULL] | 1.08 | ROSETTE LEAVES-Petiole Length-Short Petioles |
| 12392187 | 35S | ME05778-10 | YES | I20 | [NULL] | 1.08 | ROSETTE LEAVES-Shape-Oval |
| 12392187 | 35S | ME05778-10 | YES | J01 | [NULL] | 1.08 | WHOLE PLANT-Color-Dark Green |
| 12392187 | 35S | ME05778-10 | YES | M13 | [NULL] | 1.08 | INFLORESCENCE-Flowering Time-Late Flowering |
| 12393055 | 35S | ME03084-01 | YES | I08 | [NULL] | 6.50 | ROSETTE LEAVES-Disorganized Rosette- |
| | | | | | | | Disorganized Rosette |
| 12393055 | 35S | ME03084-01 | YES | I18 | [NULL] | 6.50 | ROSETTE LEAVES-Shape-Lanceolate |
| 12393055 | 35S | ME03084-01 | YES | I22 | [NULL] | 6.50 | ROSETTE LEAVES-Shape-Serrate |
| 12393055 | 35S | ME03084-01 | YES | J13 | [NULL] | 6.50 | WHOLE PLANT-Size-Small |
| 12393055 | 35S | ME03084-01 | YES | P04 | [NULL] | 6.50 | FERTILITY-Fertility-Reduced |
| 12393055 | 35S | ME03084-02 | NO | [NULL] | [NULL] | [NULL] | [NULL] |
| 12393055 | 35S | ME03084-03 | NO | [NULL] | [NULL] | [NULL] | [NULL] |
| 12393055 | 35S | ME03084-04 | YES | I08 | [NULL] | 6.10 | ROSETTE LEAVES-Disorganized Rosette- |
| | | | | | | | Disorganized Rosette |
| 12393055 | 35S | ME03084-04 | YES | J13 | [NULL] | 6.10 | WHOLE PLANT-Size-Small |
| 12393250 | 35S | ME04269-01 | YES | I20 | [NULL] | 1.12 | ROSETTE LEAVES-Shape-Oval |
| 12393250 | 35S | ME04269-01 | YES | J01 | [NULL] | 1.12 | WHOLE PLANT-Color-Dark Green |
| 12393250 | 35S | ME04269-01 | YES | J13 | [NULL] | 1.12 | WHOLE PLANT-Size-Small |
| 12393250 | 35S | ME04269-01 | YES | J13 | [NULL] | 6.00 | WHOLE PLANT-Size-Small |
| 12393250 | 35S | ME04269-01 | YES | M13 | [NULL] | 1.12 | INFLORESCENCE-Flowering Time-Late Flowering |
| 12393250 | 35S | ME04269-01 | YES | P04 | [NULL] | 6.00 | FERTILITY-Fertility-Reduced |
| 12393250 | 35S | ME04269-02 | NO | [NULL] | [NULL] | [NULL] | [NULL] |
| 12393250 | 35S | ME04269-03 | YES | I22 | [NULL] | 6.00 | ROSETTE LEAVES-Shape-Serrate |
| 12393250 | 35S | ME04269-03 | YES | I31 | [NULL] | 6.00 | ROSETTE LEAVES-Other |
| 12393250 | 35S | ME04269-03 | YES | J12 | [NULL] | 6.00 | WHOLE PLANT-Size-Large |
| 12393250 | 35S | ME04269-03 | YES | M14 | [NULL] | 6.00 | INFLORESCENCE-Height-Short |
| 12393250 | 35S | ME04269-03 | YES | M19 | [NULL] | 6.00 | INFLORESCENCE-Strength-Strong |
| 12393250 | 35S | ME04269-04 | YES | P04 | [NULL] | 6.50 | FERTILITY-Fertility-Reduced |
| 12393250 | 35S | ME04269-05 | NO | [NULL] | [NULL] | [NULL] | [NULL] |
| 12393250 | 35S | ME04269-06 | YES | I22 | [NULL] | 5.10 | ROSETTE LEAVES-Shape-Serrate |
| 12393250 | 35S | ME04269-06 | YES | J01 | [NULL] | 5.10 | WHOLE PLANT-Color-Dark Green |
| 12393250 | 35S | ME04269-06 | YES | J13 | [NULL] | 5.10 | WHOLE PLANT-Size-Small |
| 12393250 | 35S | ME04269-06 | YES | M13 | [NULL] | 5.10 | INFLORESCENCE-Flowering Time-Late Flowering |
| 12393250 | 35S | ME04269-06 | YES | M14 | [NULL] | 5.10 | INFLORESCENCE-Height-Short |
| 12393250 | 35S | ME04269-06 | YES | M19 | [NULL] | 6.50 | INFLORESCENCE-Strength-Strong |
| 12393250 | 35S | ME04269-06 | YES | M25 | [NULL] | 6.50 | INFLORESCENCE-Other |
| 12393250 | 35S | ME04269-06 | YES | P04 | [NULL] | 6.50 | FERTILITY-Fertility-Reduced |
| 12393250 | 35S | ME04269-07 | YES | J01 | [NULL] | 5.10 | WHOLE PLANT-Color-Dark Green |
| 12393250 | 35S | ME04269-07 | YES | J13 | [NULL] | 5.10 | WHOLE PLANT-Size-Small |
| 12393250 | 35S | ME04269-08 | YES | J01 | [NULL] | 5.10 | WHOLE PLANT-Color-Dark Green |
| 12393250 | 35S | ME04269-08 | YES | J13 | [NULL] | 5.10 | WHOLE PLANT-Size-Small |
| 12393250 | 35S | ME04269-08 | YES | M25 | [NULL] | 6.50 | INFLORESCENCE-Other |
| 12393250 | 35S | ME04269-09 | YES | I20 | [NULL] | 1.14 | ROSETTE LEAVES-Shape-Oval |
| 12393250 | 35S | ME04269-09 | YES | J01 | [NULL] | 1.14 | WHOLE PLANT-Color-Dark Green |
| 12393250 | 35S | ME04269-09 | YES | J13 | [NULL] | 1.14 | WHOLE PLANT-Size-Small |
| 12393250 | 35S | ME04269-09 | YES | J13 | [NULL] | 6.00 | WHOLE PLANT-Size-Small |
| 12393250 | 35S | ME04269-09 | YES | P04 | [NULL] | 6.00 | FERTILITY-Fertility-Reduced |
| 12393250 | 35S | ME04269-10 | NO | [NULL] | [NULL] | [NULL] | [NULL] |
| 12393362 | 35S | ME07101-01 | NO | [NULL] | [NULL] | [NULL] | [NULL] |
| 12393362 | 35S | ME07101-02 | YES | J13 | [NULL] | 6.50 | WHOLE PLANT-Size-Small |
| 12393362 | 35S | ME07101-03 | YES | J13 | [NULL] | 6.50 | WHOLE PLANT-Size-Small |
| 12393362 | 35S | ME07101-04 | YES | J13 | [NULL] | 6.50 | WHOLE PLANT-Size-Small |
| 12393362 | 35S | ME07101-05 | YES | J13 | [NULL] | 6.50 | WHOLE PLANT-Size-Small |
| 12393362 | 35S | ME07101-06 | NO | [NULL] | [NULL] | [NULL] | [NULL] |
| 12393362 | 35S | ME07101-07 | NO | [NULL] | [NULL] | [NULL] | [NULL] |
| 12393362 | 35S | ME07101-08 | NO | [NULL] | [NULL] | [NULL] | [NULL] |
| 12393868 | 35S | ME06913-01 | NO | [NULL] | [NULL] | [NULL] | [NULL] |
| 12393868 | 35S | ME06913-02 | YES | K24 | [NULL] | 6.50 | CAULINE LEAVES-Size-Small |
| 12393868 | 35S | ME06913-02 | YES | M14 | [NULL] | 6.50 | INFLORESCENCE-Height-Short |
| 12393868 | 35S | ME06913-02 | YES | M20 | [NULL] | 6.50 | INFLORESCENCE-Strength-Weak |
| 12393868 | 35S | ME06913-02 | YES | P04 | [NULL] | 6.50 | FERTILITY-Fertility-Reduced |
| 12393868 | 35S | ME06913-03 | YES | K24 | [NULL] | 6.50 | CAULINE LEAVES-Size-Small |
| 12393868 | 35S | ME06913-03 | YES | M14 | [NULL] | 6.50 | INFLORESCENCE-Height-Short |
| 12393868 | 35S | ME06913-03 | YES | M20 | [NULL] | 6.50 | INFLORESCENCE-Strength-Weak |
| 12393868 | 35S | ME06913-03 | YES | P04 | [NULL] | 6.50 | FERTILITY-Fertility-Reduced |
| 12393868 | 35S | ME06913-04 | YES | K24 | [NULL] | 6.50 | CAULINE LEAVES-Size-Small |
| 12393868 | 35S | ME06913-04 | YES | M14 | [NULL] | 6.50 | INFLORESCENCE-Height-Short |
| 12393868 | 35S | ME06913-04 | YES | M20 | [NULL] | 6.50 | INFLORESCENCE-Strength-Weak |
| 12393868 | 35S | ME06913-04 | YES | P04 | [NULL] | 6.50 | FERTILITY-Fertility-Reduced |
| 12393868 | 35S | ME06913-05 | YES | K24 | [NULL] | 6.50 | CAULINE LEAVES-Size-Small |
| 12393868 | 35S | ME06913-05 | YES | M14 | [NULL] | 6.50 | INFLORESCENCE-Height-Short |
| 12393868 | 35S | ME06913-05 | YES | M20 | [NULL] | 6.50 | INFLORESCENCE-Strength-Weak |
| 12393868 | 35S | ME06913-05 | YES | P04 | [NULL] | 6.50 | FERTILITY-Fertility-Reduced |
| 12393868 | 35S | ME06913-06 | NO | [NULL] | [NULL] | [NULL] | [NULL] |
| 12393868 | 35S | ME06913-07 | NO | [NULL] | [NULL] | [NULL] | [NULL] |
| 12393868 | 35S | ME06913-08 | NO | [NULL] | [NULL] | [NULL] | [NULL] |
| 12393868 | 35S | ME06913-09 | NO | [NULL] | [NULL] | [NULL] | [NULL] |
| 12393868 | 35S | ME06913-10 | NO | [NULL] | [NULL] | [NULL] | [NULL] |
| 12394295 | 35S | ME05428-01 | NO | [NULL] | [NULL] | [NULL] | [NULL] |
| 12394295 | 35S | ME05428-02 | NO | [NULL] | [NULL] | [NULL] | [NULL] |
| 12394295 | 35S | ME05428-03 | NO | [NULL] | [NULL] | [NULL] | [NULL] |
| 12394295 | 35S | ME05428-04 | YES | J01 | [NULL] | 6.10 | WHOLE PLANT-Color-Dark Green |
| 12394295 | 35S | ME05428-04 | YES | J12 | [NULL] | 6.30 | WHOLE PLANT-Size-Large |
| 12394295 | 35S | ME05428-04 | YES | M13 | [NULL] | 6.10 | INFLORESCENCE-Flowering Time-Late Flowering |
| 12394295 | 35S | ME05428-04 | YES | M13 | [NULL] | 6.30 | INFLORESCENCE-Flowering Time-Late Flowering |
| 12394295 | 35S | ME05428-04 | YES | M15 | [NULL] | 6.30 | INFLORESCENCE-Height-Tall |
| 12394295 | 35S | ME05428-04 | YES | M19 | [NULL] | 6.10 | INFLORESCENCE-Strength-Strong |
| 12394295 | 35S | ME05428-04 | YES | P05 | [NULL] | 6.30 | FERTILITY-Fertility-Sterile |
| 12394295 | 35S | ME05428-05 | NO | [NULL] | [NULL] | [NULL] | [NULL] |
| 12394295 | 35S | ME05428-06 | YES | M15 | [NULL] | 6.90 | INFLORESCENCE-Height-Tall |
| 12394295 | 35S | ME05428-06 | YES | P04 | [NULL] | 6.90 | FERTILITY-Fertility-Reduced |
| 12394295 | 35S | ME05428-07 | NO | [NULL] | [NULL] | [NULL] | [NULL] |
| 12394295 | 35S | ME05428-08 | NO | [NULL] | [NULL] | [NULL] | [NULL] |
| 12394295 | 35S | ME05428-09 | YES | M13 | [NULL] | 6.30 | INFLORESCENCE-Flowering Time-Late Flowering |
| 12394295 | 35S | ME05428-09 | YES | M15 | [NULL] | 6.90 | INFLORESCENCE-Height-Tall |
| 12394295 | 35S | ME05428-09 | YES | P04 | [NULL] | 6.30 | FERTILITY-Fertility-Reduced |
| 12394295 | 35S | ME05428-09 | YES | P04 | [NULL] | 6.90 | FERTILITY-Fertility-Reduced |
| 12394295 | 35S | ME05428-10 | NO | [NULL] | [NULL] | [NULL] | [NULL] |
| 12394681 | 35S | ME03646-01 | NO | [NULL] | [NULL] | [NULL] | [NULL] |
| 12394681 | 35S | ME03646-02 | NO | [NULL] | [NULL] | [NULL] | [NULL] |
| 12394681 | 35S | ME03646-03 | NO | [NULL] | [NULL] | [NULL] | [NULL] |
| 12394681 | 35S | ME03646-04 | NO | [NULL] | [NULL] | [NULL] | [NULL] |
| 12394681 | 35S | ME03646-05 | NO | [NULL] | [NULL] | [NULL] | [NULL] |
| 12394681 | 35S | ME03646-06 | YES | I20 | [NULL] | 5.10 | ROSETTE LEAVES-Shape-Oval |
| 12394681 | 35S | ME03646-06 | YES | J01 | [NULL] | 5.10 | WHOLE PLANT-Color-Dark Green |
| 12394681 | 35S | ME03646-06 | YES | J13 | [NULL] | 5.10 | WHOLE PLANT-Size-Small |
| 12394681 | 35S | ME03646-06 | YES | M09 | [NULL] | 5.10 | INFLORESCENCE-Branching-No Branching |
| 12394681 | 35S | ME03646-06 | YES | M13 | [NULL] | 5.10 | INFLORESCENCE-Flowering Time-Late Flowering |
| 12394681 | 35S | ME04159-01 | YES | I31 | [NULL] | 5.10 | ROSETTE LEAVES-Other |
| 12394681 | 35S | ME04159-01 | YES | J13 | [NULL] | 5.10 | WHOLE PLANT-Size-Small |
| 12394681 | 35S | ME04159-01 | YES | J13 | [NULL] | 6.50 | WHOLE PLANT-Size-Small |
| 12394681 | 35S | ME04159-01 | YES | M14 | [NULL] | 5.10 | INFLORESCENCE-Height-Short |
| 12394681 | 35S | ME04159-01 | YES | P05 | [NULL] | 6.50 | FERTILITY-Fertility-Sterile |
| 12394681 | 35S | ME04159-02 | NO | [NULL] | [NULL] | [NULL] | [NULL] |
| 12394681 | 35S | ME04159-03 | YES | I22 | [NULL] | 6.10 | ROSETTE LEAVES-Shape-Serrate |
| 12394681 | 35S | ME04159-03 | YES | I31 | [NULL] | 6.10 | ROSETTE LEAVES-Other |
| 12394681 | 35S | ME04159-04 | NO | [NULL] | [NULL] | [NULL] | [NULL] |
| 12394681 | 35S | ME04159-05 | NO | [NULL] | [NULL] | [NULL] | [NULL] |
| 12394681 | 35S | ME04159-06 | NO | [NULL] | [NULL] | [NULL] | [NULL] |
| 12394681 | 35S | ME04159-07 | YES | I22 | [NULL] | 6.10 | ROSETTE LEAVES-Shape-Serrate |
| 12394681 | 35S | ME04159-07 | YES | I31 | [NULL] | 6.10 | ROSETTE LEAVES-Other |
| 12394681 | 35S | ME04159-08 | NO | [NULL] | [NULL] | [NULL] | [NULL] |
| 12394681 | 35S | ME04159-09 | YES | I08 | [NULL] | 6.00 | ROSETTE LEAVES-Disorganized Rosette- |
| | | | | | | | Disorganized Rosette |
| 12394681 | 35S | ME04159-09 | YES | I31 | [NULL] | 6.00 | ROSETTE LEAVES-Other |
| 12394681 | 35S | ME04159-09 | YES | M13 | [NULL] | 6.00 | INFLORESCENCE-Flowering Time-Late Flowering |
| 12394681 | 35S | ME04159-09 | YES | M14 | [NULL] | 6.00 | INFLORESCENCE-Height-Short |
| 12394681 | 35S | ME04159-09 | YES | P05 | [NULL] | 6.50 | FERTILITY-Fertility-Sterile |
| 12394681 | 35S | ME04159-10 | YES | M25 | [NULL] | 6.50 | INFLORESCENCE-Other |
| 12394681 | 35S | ME04159-10 | YES | P05 | [NULL] | 6.50 | FERTILITY-Fertility-Sterile |
| 12394829 | 35S | ME05977-01 | NO | [NULL] | [NULL] | [NULL] | [NULL] |
| 12394829 | 35S | ME05977-02 | YES | J05 | [NULL] | 1.04 | WHOLE PLANT-Color-Yellow-Green Viable 3 |
| 12394829 | 35S | ME05977-03 | YES | J05 | [NULL] | 1.05 | WHOLE PLANT-Color-Yellow-Green Viable 3 |
| 12394829 | 35S | ME05977-04 | NO | [NULL] | [NULL] | [NULL] | [NULL] |
| 12394829 | 35S | ME05977-05 | NO | [NULL] | [NULL] | [NULL] | [NULL] |
| 12394829 | 35S | ME05977-06 | NO | [NULL] | [NULL] | [NULL] | [NULL] |
| 12394829 | 35S | ME05977-07 | YES | J05 | [NULL] | 1.06 | WHOLE PLANT-Color-Yellow-Green Viable 3 |
| 12394829 | 35S | ME05977-08 | YES | J05 | [NULL] | 1.06 | WHOLE PLANT-Color-Yellow-Green Viable 3 |
| 12394829 | 35S | ME05977-09 | NO | [NULL] | [NULL] | [NULL] | [NULL] |
| 12394829 | 35S | ME05977-10 | YES | J05 | [NULL] | 1.06 | WHOLE PLANT-Color-Yellow-Green Viable 3 |
| 12394923 | 35S | ME06579-01 | NO | [NULL] | [NULL] | [NULL] | [NULL] |
| 12394923 | 35S | ME06579-02 | YES | I31 | [NULL] | 1.07 | ROSETTE LEAVES-Other |
| 12394923 | 35S | ME06579-02 | YES | J13 | [NULL] | 1.07 | WHOLE PLANT-Size-Small |
| 12394923 | 35S | ME06579-03 | NO | [NULL] | [NULL] | [NULL] | [NULL] |
| 12394923 | 35S | ME06579-04 | YES | I31 | [NULL] | 1.07 | ROSETTE LEAVES-Other |
| 12394923 | 35S | ME06579-04 | YES | J13 | [NULL] | 1.07 | WHOLE PLANT-Size-Small |
| 12394923 | 35S | ME06579-05 | NO | [NULL] | [NULL] | [NULL] | [NULL] |
| 12394923 | 35S | ME06579-06 | NO | [NULL] | [NULL] | [NULL] | [NULL] |
| 12394923 | 35S | ME06579-07 | YES | M14 | [NULL] | 6.30 | INFLORESCENCE-Height-Short |
| 12394923 | 35S | ME06579-07 | YES | P04 | [NULL] | 6.30 | FERTILITY-Fertility-Reduced |
| 12394923 | 35S | ME06579-08 | NO | [NULL] | [NULL] | [NULL] | [NULL] |
| 12394923 | 35S | ME06579-09 | NO | [NULL] | [NULL] | [NULL] | [NULL] |
| 12394923 | 35S | ME06579-10 | YES | I31 | [NULL] | 1.10 | ROSETTE LEAVES-Other |
| 12394923 | 35S | ME06579-10 | YES | J01 | [NULL] | 1.10 | WHOLE PLANT-Color-Dark Green |
| 12394923 | 35S | ME06579-10 | YES | J13 | [NULL] | 1.10 | WHOLE PLANT-Size-Small |
| 12395524 | 35S | ME03577-01 | YES | P01 | [NULL] | 6.50 | FERTILITY-Fertility-Aborted |
| 12395524 | 35S | ME03577-02 | NO | [NULL] | [NULL] | [NULL] | [NULL] |
| 12395524 | 35S | ME03577-03 | NO | [NULL] | [NULL] | [NULL] | [NULL] |
| 12395524 | 35S | ME03577-04 | YES | P01 | [NULL] | 6.50 | FERTILITY-Fertility-Aborted |
| 12395524 | 35S | ME03577-05 | NO | [NULL] | [NULL] | [NULL] | [NULL] |
| 12395524 | 35S | ME03577-06 | NO | [NULL] | [NULL] | [NULL] | [NULL] |
| 12395524 | 35S | ME03577-07 | NO | [NULL] | [NULL] | [NULL] | [NULL] |
| 12395524 | 35S | ME03577-08 | YES | N07 | [NULL] | 6.50 | SILIQUES-Other |
| 12395524 | 35S | ME03577-09 | NO | [NULL] | [NULL] | [NULL] | [NULL] |
| 12395524 | 35S | ME03577-10 | NO | [NULL] | [NULL] | [NULL] | [NULL] |
| 12396129 | 32449 | ME01174-01 | NO | [NULL] | [NULL] | [NULL] | [NULL] |
| 12396129 | 32449 | ME01174-02 | NO | [NULL] | [NULL] | [NULL] | [NULL] |
| 12396129 | 35S | ME04328-01 | NO | [NULL] | [NULL] | [NULL] | [NULL] |
| 12396129 | 35S | ME04328-02 | YES | I13 | [NULL] | 6.30 | ROSETTE LEAVES-Petiole Length-Long Petioles |
| 12396129 | 35S | ME04328-02 | YES | J01 | [NULL] | 6.10 | WHOLE PLANT-Color-Dark Green |
| 12396129 | 35S | ME04328-02 | YES | M25 | [NULL] | 6.30 | INFLORESCENCE-Other |
| 12396129 | 35S | ME04328-03 | NO | [NULL] | [NULL] | [NULL] | [NULL] |
| 12396129 | 35S | ME04328-04 | YES | J01 | [NULL] | 5.10 | WHOLE PLANT-Color-Dark Green |
| 12396129 | 35S | ME04328-04 | YES | J13 | [NULL] | 1.12 | WHOLE PLANT-Size-Small |
| 12396129 | 35S | ME04328-04 | YES | M13 | [NULL] | 5.10 | INFLORESCENCE-Flowering Time-Late Flowering |
| 12396300 | 35S | ME06893-01 | YES | J01 | [NULL] | 5.10 | WHOLE PLANT-Color-Dark Green |
| 12396300 | 35S | ME06893-02 | YES | I20 | [NULL] | 1.07 | ROSETTE LEAVES-Shape-Oval |
| 12396300 | 35S | ME06893-03 | NO | [NULL] | [NULL] | [NULL] | [NULL] |
| 12396300 | 35S | ME06893-04 | NO | [NULL] | [NULL] | [NULL] | [NULL] |
| 12396300 | 35S | ME06893-05 | NO | [NULL] | [NULL] | [NULL] | [NULL] |
| 12396300 | 35S | ME06893-06 | NO | [NULL] | [NULL] | [NULL] | [NULL] |
| 12396300 | 35S | ME06893-07 | NO | [NULL] | [NULL] | [NULL] | [NULL] |
| 12396300 | 35S | ME06893-08 | NO | [NULL] | [NULL] | [NULL] | [NULL] |
| 12396300 | 35S | ME06893-09 | YES | J01 | [NULL] | 5.10 | WHOLE PLANT-Color-Dark Green |
| 12396300 | 35S | ME06893-10 | YES | I20 | [NULL] | 1.05 | ROSETTE LEAVES-Shape-Oval |
| 12396300 | 35S | ME06893-10 | YES | J01 | [NULL] | 6.90 | WHOLE PLANT-Color-Dark Green |
| 12396300 | 35S | ME06893-10 | YES | M14 | [NULL] | 6.90 | INFLORESCENCE-Height-Short |
| 12396300 | 35S | ME06893-10 | YES | M17 | [NULL] | 6.90 | INFLORESCENCE-Internode Length-Short Internode |
| 12396606 | 32449 | ME00767-01 | NO | [NULL] | [NULL] | [NULL] | [NULL] |
| 12396606 | 32449 | ME00767-02 | NO | [NULL] | [NULL] | [NULL] | [NULL] |
| 12396606 | 32449 | ME00767-03 | NO | [NULL] | [NULL] | [NULL] | [NULL] |
| 12396606 | 32449 | ME00767-04 | NO | [NULL] | [NULL] | [NULL] | [NULL] |
| 12396606 | 32449 | ME00767-05 | NO | [NULL] | [NULL] | [NULL] | [NULL] |
| 12396606 | 35S | ME02560-01 | NO | [NULL] | [NULL] | [NULL] | [NULL] |
| 12396606 | 35S | ME02560-02 | NO | [NULL] | [NULL] | [NULL] | [NULL] |
| 12396606 | 35S | ME02560-03 | YES | I31 | [NULL] | 5.10 | ROSETTE LEAVES-Other |
| 12396606 | 35S | ME02560-04 | YES | I04 | [NULL] | 5.10 | ROSETTE LEAVES-Curled-Curled 2 |
| 12396606 | 35S | ME02560-05 | YES | I04 | [NULL] | 5.10 | ROSETTE LEAVES-Curled-Curled 2 |
| 12396606 | 35S | ME02560-06 | NO | [NULL] | [NULL] | [NULL] | [NULL] |
| 12396606 | 35S | ME02560-07 | NO | [NULL] | [NULL] | [NULL] | [NULL] |
| 12396606 | 35S | ME02560-08 | NO | [NULL] | [NULL] | [NULL] | [NULL] |
| 12396606 | 35S | ME02560-09 | NO | [NULL] | [NULL] | [NULL] | [NULL] |
| 12396606 | 35S | ME02560-10 | NO | [NULL] | [NULL] | [NULL] | [NULL] |
| 12396747 | 35S | ME02564-01 | NO | [NULL] | [NULL] | [NULL] | [NULL] |
| 12396747 | 35S | ME02564-02 | NO | [NULL] | [NULL] | [NULL] | [NULL] |
| 12396747 | 35S | ME02564-03 | YES | I20 | [NULL] | 1.13 | ROSETTE LEAVES-Shape-Oval |
| 12396747 | 35S | ME02564-03 | YES | M13 | [NULL] | 1.13 | INFLORESCENCE-Flowering Time-Late Flowering |
| 12396747 | 35S | ME02564-04 | YES | I08 | [NULL] | 1.05 | ROSETTE LEAVES-Disorganized Rosette- |
| | | | | | | | Disorganized Rosette |
| 12396747 | 35S | ME02564-04 | YES | I31 | [NULL] | 1.05 | ROSETTE LEAVES-Other |
| 12396747 | 35S | ME02564-04 | YES | J01 | [NULL] | 1.05 | WHOLE PLANT-Color-Dark Green |
| 12396747 | 35S | ME02564-04 | YES | J13 | [NULL] | 1.05 | WHOLE PLANT-Size-Small |
| 12396747 | 35S | ME02564-04 | YES | J14 | [NULL] | 1.05 | WHOLE PLANT-Other |
| 12396747 | 35S | ME02564-04 | YES | M13 | [NULL] | 1.05 | INFLORESCENCE-Flowering Time-Late Flowering |
| 12396747 | 35S | ME02564-05 | NO | [NULL] | [NULL] | [NULL] | [NULL] |
| 12396747 | 35S | ME02564-06 | NO | [NULL] | [NULL] | [NULL] | [NULL] |
| 12396747 | 35S | ME02564-07 | NO | [NULL] | [NULL] | [NULL] | [NULL] |
| 12396747 | 35S | ME02564-08 | YES | I31 | [NULL] | 1.10 | ROSETTE LEAVES-Other |
| 12396747 | 35S | ME02564-08 | YES | J13 | [NULL] | 1.10 | WHOLE PLANT-Size-Small |
| 12396747 | 35S | ME02564-08 | YES | M13 | [NULL] | 1.10 | INFLORESCENCE-Flowering Time-Late Flowering |
| 12396747 | 35S | ME02564-09 | NO | [NULL] | [NULL] | [NULL] | [NULL] |
| 12396747 | 35S | ME02564-10 | NO | [NULL] | [NULL] | [NULL] | [NULL] |
| 12396779 | 35S | ME05448-01 | NO | [NULL] | [NULL] | [NULL] | [NULL] |
| 12396779 | 35S | ME05448-02 | NO | [NULL] | [NULL] | [NULL] | [NULL] |
| 12396779 | 35S | ME05448-03 | NO | [NULL] | [NULL] | [NULL] | [NULL] |
| 12396779 | 35S | ME05448-04 | NO | [NULL] | [NULL] | [NULL] | [NULL] |
| 12396779 | 35S | ME05448-05 | NO | [NULL] | [NULL] | [NULL] | [NULL] |
| 12396779 | 35S | ME05448-06 | YES | M14 | [NULL] | 6.90 | INFLORESCENCE-Height-Short |
| 12396779 | 35S | ME05448-06 | YES | P04 | [NULL] | 6.90 | FERTILITY-Fertility-Reduced |
| 12396779 | 35S | ME05448-07 | YES | M14 | [NULL] | 6.50 | INFLORESCENCE-Height-Short |
| 12396779 | 35S | ME05448-07 | YES | P04 | [NULL] | 6.50 | FERTILITY-Fertility-Reduced |
| 12396779 | 35S | ME05448-08 | YES | M14 | [NULL] | 6.90 | INFLORESCENCE-Height-Short |
| 12396779 | 35S | ME05448-08 | YES | P04 | [NULL] | 6.90 | FERTILITY-Fertility-Reduced |
| 12398609 | 35S | ME08827-01 | NO | [NULL] | [NULL] | [NULL] | [NULL] |
| 12398609 | 35S | ME08827-02 | NO | [NULL] | [NULL] | [NULL] | [NULL] |
| 12398609 | 35S | ME08827-03 | NO | [NULL] | [NULL] | [NULL] | [NULL] |
| 12398609 | 35S | ME08827-04 | NO | [NULL] | [NULL] | [NULL] | [NULL] |
| 12398609 | 35S | ME08827-05 | YES | J13 | [NULL] | 1.07 | WHOLE PLANT-Size-Small |
| 12398609 | 35S | ME08827-05 | YES | M13 | [NULL] | 1.07 | INFLORESCENCE-Flowering Time-Late Flowering |
| 12398609 | 35S | ME08827-06 | YES | J12 | [NULL] | 6.10 | WHOLE PLANT-Size-Large |
| 12398609 | 35S | ME08827-06 | YES | M13 | [NULL] | 1.09 | INFLORESCENCE-Flowering Time-Late Flowering |
| 12398609 | 35S | ME08827-06 | YES | M13 | [NULL] | 6.10 | INFLORESCENCE-Flowering Time-Late Flowering |
| 12398609 | 35S | ME08827-07 | NO | [NULL] | [NULL] | [NULL] | [NULL] |
| 12398609 | 35S | ME08827-08 | YES | J12 | [NULL] | 6.10 | WHOLE PLANT-Size-Large |
| 12398609 | 35S | ME08827-09 | NO | [NULL] | [NULL] | [NULL] | [NULL] |
| 12398609 | 35S | ME08827-10 | NO | [NULL] | [NULL] | [NULL] | [NULL] |
| 12420535 | 32449 | ME00762-01 | NO | [NULL] | [NULL] | [NULL] | [NULL] |
| 12420535 | 32449 | ME00762-02 | NO | [NULL] | [NULL] | [NULL] | [NULL] |
| 12420535 | 32449 | ME00762-03 | NO | [NULL] | [NULL] | [NULL] | [NULL] |
| 12420535 | 32449 | ME00762-04 | NO | [NULL] | [NULL] | [NULL] | [NULL] |
| 12420535 | 32449 | ME00762-05 | NO | [NULL] | [NULL] | [NULL] | [NULL] |
| 12420535 | 35S | ME07495-01 | YES | J12 | [NULL] | 6.10 | WHOLE PLANT-Size-Large |
| 12420535 | 35S | ME07495-01 | YES | M13 | [NULL] | 6.10 | INFLORESCENCE-Flowering Time-Late Flowering |
| 12420535 | 35S | ME07495-02 | YES | J12 | [NULL] | 6.10 | WHOLE PLANT-Size-Large |
| 12420535 | 35S | ME07495-02 | YES | M13 | [NULL] | 6.10 | INFLORESCENCE-Flowering Time-Late Flowering |
| 12420535 | 35S | ME07495-03 | YES | J12 | [NULL] | 6.10 | WHOLE PLANT-Size-Large |
| 12420535 | 35S | ME07495-03 | YES | M13 | [NULL] | 6.10 | INFLORESCENCE-Flowering Time-Late Flowering |
| 12420535 | 35S | ME07495-04 | YES | J12 | [NULL] | 6.10 | WHOLE PLANT-Size-Large |
| 12420535 | 35S | ME07495-04 | YES | M13 | [NULL] | 6.10 | INFLORESCENCE-Flowering Time-Late Flowering |
| 12420535 | 35S | ME07495-05 | YES | J12 | [NULL] | 6.10 | WHOLE PLANT-Size-Large |
| 12420535 | 35S | ME07495-05 | YES | M13 | [NULL] | 6.10 | INFLORESCENCE-Flowering Time-Late Flowering |
| 12420535 | 35S | ME07495-06 | YES | J12 | [NULL] | 6.10 | WHOLE PLANT-Size-Large |
| 12420535 | 35S | ME07495-06 | YES | M13 | [NULL] | 6.10 | INFLORESCENCE-Flowering Time-Late Flowering |
| 12420535 | 35S | ME07495-07 | NO | [NULL] | [NULL] | [NULL] | [NULL] |
| 12420535 | 35S | ME07495-08 | NO | [NULL] | [NULL] | [NULL] | [NULL] |
| 12420559 | 326D | ME09200-01 | NO | [NULL] | [NULL] | [NULL] | [NULL] |
| 12420559 | 326D | ME09200-02 | NO | [NULL] | [NULL] | [NULL] | [NULL] |
| 12420559 | 326D | ME09200-03 | NO | [NULL] | [NULL] | [NULL] | [NULL] |
| 12420559 | 326D | ME09200-04 | NO | [NULL] | [NULL] | [NULL] | [NULL] |
| 12420559 | 326D | ME09200-05 | NO | [NULL] | [NULL] | [NULL] | [NULL] |
| 12420559 | 34414F | ME09358-01 | NO | [NULL] | [NULL] | [NULL] | [NULL] |
| 12420559 | 34414F | ME09358-02 | NO | [NULL] | [NULL] | [NULL] | [NULL] |
| 12420559 | 34414F | ME09358-03 | NO | [NULL] | [NULL] | [NULL] | [NULL] |
| 12420559 | 34414F | ME09358-04 | NO | [NULL] | [NULL] | [NULL] | [NULL] |
| 12420559 | 34414F | ME09358-05 | NO | [NULL] | [NULL] | [NULL] | [NULL] |
| 12420559 | 34414F | ME09358-06 | NO | [NULL] | [NULL] | [NULL] | [NULL] |
| 12420559 | 34414F | ME09358-07 | NO | [NULL] | [NULL] | [NULL] | [NULL] |
| 12420559 | 34414F | ME09358-08 | NO | [NULL] | [NULL] | [NULL] | [NULL] |
| 12420559 | 34414F | ME09358-09 | NO | [NULL] | [NULL] | [NULL] | [NULL] |
| 12420559 | 34414F | ME09358-10 | NO | [NULL] | [NULL] | [NULL] | [NULL] |
| 12420559 | 35S | ME01942-01 | NO | [NULL] | [NULL] | [NULL] | [NULL] |
| 12420559 | 35S | ME01942-02 | NO | [NULL] | [NULL] | [NULL] | [NULL] |
| 12420559 | 35S | ME01942-03 | YES | I23 | [NULL] | 6.00 | ROSETTE LEAVES-Shape-Trident |
| 12420559 | 35S | ME01942-03 | YES | J08 | [NULL] | 5.10 | WHOLE PLANT-Dwarf-Misc. Dwarf |
| 12420559 | 35S | ME01942-03 | YES | J13 | [NULL] | 5.10 | WHOLE PLANT-Size-Small |
| 12420559 | 35S | ME01942-03 | YES | P05 | [NULL] | 9.70 | FERTILITY-Fertility-Sterile |
| 12420559 | 35S | ME01942-04 | YES | J13 | [NULL] | 5.10 | WHOLE PLANT-Size-Small |
| 12420559 | 35S | ME01942-05 | NO | [NULL] | [NULL] | [NULL] | [NULL] |
| 12420559 | 35S | ME01942-06 | NO | [NULL] | [NULL] | [NULL] | [NULL] |
| 12420559 | 35S | ME01942-07 | YES | I22 | [NULL] | 1.08 | ROSETTE LEAVES-Shape-Serrate |
| 12420559 | 35S | ME01942-07 | YES | J13 | [NULL] | 5.10 | WHOLE PLANT-Size-Small |
| 12420559 | 35S | ME01942-07 | YES | P05 | [NULL] | 9.70 | FERTILITY-Fertility-Sterile |
| 12420559 | 35S | ME01942-08 | NO | [NULL] | [NULL] | [NULL] | [NULL] |
| 12420559 | 35S | ME01942-09 | YES | J01 | [NULL] | 1.14 | WHOLE PLANT-Color-Dark Green |
| 12420559 | 35S | ME01942-09 | YES | J12 | [NULL] | 1.14 | WHOLE PLANT-Size-Large |
| 12420559 | 35S | ME01942-09 | YES | M13 | [NULL] | 1.14 | INFLORESCENCE-Flowering Time-Late Flowering |
| 12420559 | 35S | ME01942-09 | YES | died | [NULL] | 9.70 | DIED PREMATURELY, but unlikely to be related to |
| | | | | | | | gene |
| 12420559 | 35S | ME01942-10 | NO | [NULL] | [NULL] | [NULL] | [NULL] |
| 12420559 | 35S | ME01942-11 | NO | [NULL] | [NULL] | [NULL] | [NULL] |
| 12420559 | 35S | ME01942-12 | NO | [NULL] | [NULL] | [NULL] | [NULL] |
| 12420559 | 35S | ME01942-13 | NO | [NULL] | [NULL] | [NULL] | [NULL] |
| 12420559 | 35S | ME01942-14 | NO | [NULL] | [NULL] | [NULL] | [NULL] |
| 12420559 | 35S | ME01942-15 | NO | [NULL] | [NULL] | [NULL] | [NULL] |
| 12420559 | 35S | ME01942-16 | NO | [NULL] | [NULL] | [NULL] | [NULL] |
| 12420559 | 35S | ME01942-17 | YES | I20 | [NULL] | 6.00 | ROSETTE LEAVES-Shape-Oval |
| 12420559 | 35S | ME01942-17 | YES | J01 | [NULL] | 6.00 | WHOLE PLANT-Color-Dark Green |
| 12420559 | 35S | ME01942-17 | YES | J13 | [NULL] | 6.00 | WHOLE PLANT-Size-Small |
| 12420559 | 35S | ME01942-18 | NO | [NULL] | [NULL] | [NULL] | [NULL] |
| 12420559 | 35S | ME01942-19 | NO | [NULL] | [NULL] | [NULL] | [NULL] |
| 12420894 | 34414F | ME09388-01 | NO | [NULL] | [NULL] | [NULL] | [NULL] |
| 12420894 | 34414F | ME09388-02 | NO | [NULL] | [NULL] | [NULL] | [NULL] |
| 12420894 | 34414F | ME09388-03 | QUESTIONABLE | I20 | [NULL] | 1.09 | ROSETTE LEAVES-Shape-Oval |
| 12420894 | 34414F | ME09388-03 | QUESTIONABLE | I22 | [NULL] | 1.09 | ROSETTE LEAVES-Shape-Serrate |
| 12420894 | 34414F | ME09388-04 | NO | [NULL] | [NULL] | [NULL] | [NULL] |
| 12420894 | 34414F | ME09388-05 | NO | [NULL] | [NULL] | [NULL] | [NULL] |
| 12420894 | 34414F | ME09388-06 | NO | [NULL] | [NULL] | [NULL] | [NULL] |
| 12420894 | 34414F | ME09388-07 | NO | [NULL] | [NULL] | [NULL] | [NULL] |
| 12420894 | 34414F | ME09388-08 | NO | [NULL] | [NULL] | [NULL] | [NULL] |
| 12420894 | 34414F | ME09388-09 | NO | [NULL] | [NULL] | [NULL] | [NULL] |
| 12420894 | 34414F | ME09388-10 | NO | [NULL] | [NULL] | [NULL] | [NULL] |
| 12420894 | 35S | ME04847-01 | YES | I20 | [NULL] | 6.30 | ROSETTE LEAVES-Shape-Oval |
| 12420894 | 35S | ME04847-01 | YES | J01 | [NULL] | 5.10 | WHOLE PLANT-Color-Dark Green |
| 12420894 | 35S | ME04847-01 | YES | J02 | [NULL] | 6.30 | WHOLE PLANT-Color-High Anthocyanin |
| 12420894 | 35S | ME04847-01 | YES | J13 | [NULL] | 6.30 | WHOLE PLANT-Size-Small |
| 12420894 | 35S | ME04847-01 | YES | M14 | [NULL] | 6.30 | INFLORESCENCE-Height-Short |
| 12420894 | 35S | ME04847-02 | NO | [NULL] | [NULL] | [NULL] | [NULL] |
| 12420894 | 35S | ME04847-03 | YES | J03 | [NULL] | 5.10 | WHOLE PLANT-Color-Yellow-Green Viable 1 |
| 12420894 | 35S | ME04847-03 | YES | J13 | [NULL] | 5.10 | WHOLE PLANT-Size-Small |
| 12420894 | 35S | ME04847-04 | NO | [NULL] | [NULL] | [NULL] | [NULL] |
| 12420894 | 35S | ME04847-05 | NO | [NULL] | [NULL] | [NULL] | [NULL] |
| 12420894 | 35S | ME04847-06 | YES | I20 | [NULL] | 6.10 | ROSETTE LEAVES-Shape-Oval |
| 12420894 | 35S | ME04847-06 | YES | J01 | [NULL] | 5.10 | WHOLE PLANT-Color-Dark Green |
| 12420894 | 35S | ME04847-06 | YES | J02 | [NULL] | 6.10 | WHOLE PLANT-Color-High Anthocyanin |
| 12420894 | 35S | ME04847-06 | YES | J13 | [NULL] | 6.10 | WHOLE PLANT-Size-Small |
| 12420894 | 35S | ME04847-06 | YES | M14 | [NULL] | 6.10 | INFLORESCENCE-Height-Short |
| 12420894 | 35S | ME04847-07 | YES | J01 | [NULL] | 1.06 | WHOLE PLANT-Color-Dark Green |
| 12420894 | 35S | ME04847-07 | YES | J13 | [NULL] | 1.06 | WHOLE PLANT-Size-Small |
| 12420894 | 35S | ME04847-07 | YES | J13 | [NULL] | 5.10 | WHOLE PLANT-Size-Small |
| 12420894 | 35S | ME04847-07 | YES | M13 | [NULL] | 1.06 | INFLORESCENCE-Flowering Time-Late Flowering |
| 12420894 | 35S | ME04847-08 | YES | I20 | [NULL] | 6.10 | ROSETTE LEAVES-Shape-Oval |
| 12420894 | 35S | ME04847-08 | YES | J02 | [NULL] | 6.10 | WHOLE PLANT-Color-High Anthocyanin |
| 12420894 | 35S | ME04847-08 | YES | J13 | [NULL] | 6.10 | WHOLE PLANT-Size-Small |
| 12420894 | 35S | ME04847-08 | YES | M14 | [NULL] | 6.10 | INFLORESCENCE-Height-Short |
| 12420894 | 35S | ME04847-09 | YES | J01 | [NULL] | 1.06 | WHOLE PLANT-Color-Dark Green |
| 12420894 | 35S | ME04847-09 | YES | J02 | [NULL] | 5.10 | WHOLE PLANT-Color-High Anthocyanin |
| 12420894 | 35S | ME04847-09 | YES | J13 | [NULL] | 1.06 | WHOLE PLANT-Size-Small |
| 12420894 | 35S | ME04847-09 | YES | J13 | [NULL] | 5.10 | WHOLE PLANT-Size-Small |
| 12420894 | 35S | ME04847-09 | YES | M13 | [NULL] | 1.06 | INFLORESCENCE-Flowering Time-Late Flowering |
| 12420894 | 35S | ME04847-10 | YES | J01 | [NULL] | 1.06 | WHOLE PLANT-Color-Dark Green |
| 12420894 | 35S | ME04847-10 | YES | J02 | [NULL] | 5.10 | WHOLE PLANT-Color-High Anthocyanin |
| 12420894 | 35S | ME04847-10 | YES | J13 | [NULL] | 1.06 | WHOLE PLANT-Size-Small |
| 12420894 | 35S | ME04847-10 | YES | J13 | [NULL] | 5.10 | WHOLE PLANT-Size-Small |
| 12420894 | 35S | ME04847-10 | YES | M13 | [NULL] | 1.06 | INFLORESCENCE-Flowering Time-Late Flowering |
| 12421224 | 35S | ME06282-01 | NO | [NULL] | [NULL] | [NULL] | [NULL] |
| 12421224 | 35S | ME06282-02 | YES | J01 | [NULL] | 6.90 | WHOLE PLANT-Color-Dark Green |
| 12421224 | 35S | ME06282-02 | YES | L11 | [NULL] | 6.90 | FLOWERS-Other |
| 12421224 | 35S | ME06282-02 | YES | M12 | [NULL] | 6.90 | INFLORESCENCE-Flowering Time-Early Flowering |
| 12421224 | 35S | ME06282-03 | NO | [NULL] | [NULL] | [NULL] | [NULL] |
| 12421224 | 35S | ME06282-04 | YES | M14 | [NULL] | 6.30 | INFLORESCENCE-Height-Short |
| 12421224 | 35S | ME06282-05 | NO | [NULL] | [NULL] | [NULL] | [NULL] |
| 12421224 | 35S | ME06282-06 | YES | M25 | [NULL] | 6.50 | INFLORESCENCE-Other |
| 12421224 | 35S | ME06282-07 | NO | [NULL] | [NULL] | [NULL] | [NULL] |
| 12421224 | 35S | ME06282-08 | YES | J01 | [NULL] | 6.10 | WHOLE PLANT-Color-Dark Green |
| 12421224 | 35S | ME06282-08 | YES | L11 | [NULL] | 6.10 | FLOWERS-Other |
| 12421224 | 35S | ME06282-08 | YES | M12 | [NULL] | 6.10 | INFLORESCENCE-Flowering Time-Early Flowering |
| 12421224 | 35S | ME06282-08 | YES | M14 | [NULL] | 6.10 | INFLORESCENCE-Height-Short |
| 12421224 | 35S | ME06282-08 | YES | M14 | [NULL] | 6.30 | INFLORESCENCE-Height-Short |
| 12421224 | 35S | ME06282-08 | YES | M25 | [NULL] | 6.30 | INFLORESCENCE-Other |
| 12421224 | 35S | ME06282-09 | NO | [NULL] | [NULL] | [NULL] | [NULL] |
| 12421224 | 35S | ME06282-10 | NO | [NULL] | [NULL] | [NULL] | [NULL] |
| 12421660 | 35S | ME06587-01 | NO | [NULL] | [NULL] | [NULL] | [NULL] |
| 12421660 | 35S | ME06587-02 | NO | [NULL] | [NULL] | [NULL] | [NULL] |
| 12421660 | 35S | ME06587-03 | YES | I06 | [NULL] | 1.04 | ROSETTE LEAVES-Curled-Curled 4 |
| 12421660 | 35S | ME06587-03 | YES | J13 | [NULL] | 1.04 | WHOLE PLANT-Size-Small |
| 12421660 | 35S | ME06587-03 | YES | M14 | [NULL] | 6.50 | INFLORESCENCE-Height-Short |
| 12421660 | 35S | ME06587-03 | YES | P04 | [NULL] | 6.50 | FERTILITY-Fertility-Reduced |
| 12421660 | 35S | ME06587-04 | YES | I06 | [NULL] | 1.05 | ROSETTE LEAVES-Curled-Curled 4 |
| 12421660 | 35S | ME06587-04 | YES | J13 | [NULL] | 1.05 | WHOLE PLANT-Size-Small |
| 12421660 | 35S | ME06587-04 | YES | M10 | [NULL] | 6.50 | INFLORESCENCE-Branching-Reduced Apical |
| | | | | | | | Dominance |
| 12421660 | 35S | ME06587-04 | YES | M14 | [NULL] | 6.50 | INFLORESCENCE-Height-Short |
| 12421660 | 35S | ME06587-05 | NO | [NULL] | [NULL] | [NULL] | [NULL] |
| 12421660 | 35S | ME06587-06 | NO | [NULL] | [NULL] | [NULL] | [NULL] |
| 12421660 | 35S | ME06587-07 | NO | [NULL] | [NULL] | [NULL] | [NULL] |
| 12421660 | 35S | ME06587-08 | YES | I06 | [NULL] | 1.05 | ROSETTE LEAVES-Curled-Curled 4 |
| 12421660 | 35S | ME06587-08 | YES | J13 | [NULL] | 1.05 | WHOLE PLANT-Size-Small |
| 12421660 | 35S | ME06587-09 | NO | [NULL] | [NULL] | [NULL] | [NULL] |
| 12421660 | 35S | ME06587-10 | NO | [NULL] | [NULL] | [NULL] | [NULL] |
| 12421943 | 32449 | ME00062-01 | NO | [NULL] | [NULL] | [NULL] | [NULL] |
| 12421943 | 32449 | ME00062-03 | NO | [NULL] | [NULL] | [NULL] | [NULL] |
| 12421943 | 32449 | ME00062-04 | NO | [NULL] | [NULL] | [NULL] | [NULL] |
| 12421943 | 32449 | ME00062-05 | NO | [NULL] | [NULL] | [NULL] | [NULL] |
| 12421943 | 32449 | ME00062-07 | NO | [NULL] | [NULL] | [NULL] | [NULL] |
| 12421943 | 35S | ME05590-01 | YES | J01 | [NULL] | 6.00 | WHOLE PLANT-Color-Dark Green |
| 12421943 | 35S | ME05590-01 | YES | J13 | [NULL] | 6.00 | WHOLE PLANT-Size-Small |
| 12421943 | 35S | ME05590-01 | YES | J13 | [NULL] | 6.90 | WHOLE PLANT-Size-Small |
| 12421943 | 35S | ME05590-02 | YES | J01 | [NULL] | 6.00 | WHOLE PLANT-Color-Dark Green |
| 12421943 | 35S | ME05590-02 | YES | J13 | [NULL] | 6.00 | WHOLE PLANT-Size-Small |
| 12421943 | 35S | ME05590-02 | YES | J13 | [NULL] | 6.90 | WHOLE PLANT-Size-Small |
| 12421943 | 35S | ME05590-03 | YES | J01 | [NULL] | 6.00 | WHOLE PLANT-Color-Dark Green |
| 12421943 | 35S | ME05590-03 | YES | J13 | [NULL] | 6.00 | WHOLE PLANT-Size-Small |
| 12421943 | 35S | ME05590-03 | YES | J13 | [NULL] | 6.90 | WHOLE PLANT-Size-Small |
| 12421943 | 35S | ME05590-04 | YES | J01 | [NULL] | 6.00 | WHOLE PLANT-Color-Dark Green |
| 12421943 | 35S | ME05590-04 | YES | J13 | [NULL] | 6.00 | WHOLE PLANT-Size-Small |
| 12421943 | 35S | ME05590-04 | YES | J13 | [NULL] | 6.90 | WHOLE PLANT-Size-Small |
| 12421943 | 35S | ME05590-05 | NO | [NULL] | [NULL] | [NULL] | [NULL] |
| 12421943 | 35S | ME05590-06 | YES | J01 | [NULL] | 6.00 | WHOLE PLANT-Color-Dark Green |
| 12421943 | 35S | ME05590-06 | YES | J13 | [NULL] | 6.00 | WHOLE PLANT-Size-Small |
| 12421943 | 35S | ME05590-06 | YES | J13 | [NULL] | 6.90 | WHOLE PLANT-Size-Small |
| 12421943 | 35S | ME05590-07 | YES | J01 | [NULL] | 6.00 | WHOLE PLANT-Color-Dark Green |
| 12421943 | 35S | ME05590-07 | YES | J13 | [NULL] | 6.00 | WHOLE PLANT-Size-Small |
| 12421943 | 35S | ME05590-07 | YES | J13 | [NULL] | 6.90 | WHOLE PLANT-Size-Small |
| 12421943 | 35S | ME05590-08 | YES | J01 | [NULL] | 6.00 | WHOLE PLANT-Color-Dark Green |
| 12421943 | 35S | ME05590-08 | YES | J13 | [NULL] | 6.00 | WHOLE PLANT-Size-Small |
| 12421943 | 35S | ME05590-08 | YES | J13 | [NULL] | 6.90 | WHOLE PLANT-Size-Small |
| 12421943 | 35S | ME05590-09 | NO | [NULL] | [NULL] | [NULL] | [NULL] |
| 12421943 | 35S | ME05590-10 | YES | J13 | [NULL] | 6.90 | WHOLE PLANT-Size-Small |
| 12421991 | 35S | ME02715-01 | YES | P04 | [NULL] | 6.30 | FERTILITY-Fertility-Reduced |
| 12421991 | 35S | ME02715-01 | YES | P04 | [NULL] | 6.50 | FERTILITY-Fertility-Reduced |
| 12421991 | 35S | ME02715-02 | NO | [NULL] | [NULL] | [NULL] | [NULL] |
| 12421991 | 35S | ME02715-03 | NO | [NULL] | [NULL] | [NULL] | [NULL] |
| 12421991 | 35S | ME02715-04 | YES | P04 | [NULL] | 6.30 | FERTILITY-Fertility-Reduced |
| 12421991 | 35S | ME02715-04 | YES | P04 | [NULL] | 6.50 | FERTILITY-Fertility-Reduced |
| 12421991 | 35S | ME02715-05 | NO | [NULL] | [NULL] | [NULL] | [NULL] |
| 12421991 | 35S | ME02715-06 | YES | P04 | [NULL] | 6.30 | FERTILITY-Fertility-Reduced |
| 12421991 | 35S | ME02715-06 | YES | P04 | [NULL] | 6.50 | FERTILITY-Fertility-Reduced |
| 12421991 | 35S | ME02715-07 | YES | P04 | [NULL] | 6.30 | FERTILITY-Fertility-Reduced |
| 12421991 | 35S | ME02715-07 | YES | P04 | [NULL] | 6.50 | FERTILITY-Fertility-Reduced |
| 12421991 | 35S | ME02715-08 | NO | [NULL] | [NULL] | [NULL] | [NULL] |
| 12421991 | 35S | ME02715-09 | NO | [NULL] | [NULL] | [NULL] | [NULL] |
| 12421991 | 35S | ME02715-10 | YES | P04 | [NULL] | 6.30 | FERTILITY-Fertility-Reduced |
| 12421991 | 35S | ME02715-10 | YES | P04 | [NULL] | 6.50 | FERTILITY-Fertility-Reduced |
| 12422009 | 13879F | ME09405-01 | [NULL] | [NULL] | [NULL] | [NULL] | [NULL] |
| 12422009 | 13879F | ME09405-02 | [NULL] | [NULL] | [NULL] | [NULL] | [NULL] |
| 12422009 | 13879F | ME09405-03 | [NULL] | [NULL] | [NULL] | [NULL] | [NULL] |
| 12422009 | 32449F | ME09430-01 | [NULL] | [NULL] | [NULL] | [NULL] | [NULL] |
| 12422009 | 32449F | ME09430-02 | [NULL] | [NULL] | [NULL] | [NULL] | [NULL] |
| 12422009 | 32449F | ME09430-03 | [NULL] | [NULL] | [NULL] | [NULL] | [NULL] |
| 12422009 | 32449F | ME09430-04 | [NULL] | [NULL] | [NULL] | [NULL] | [NULL] |
| 12422009 | 32449F | ME09430-05 | [NULL] | [NULL] | [NULL] | [NULL] | [NULL] |
| 12422009 | 32449F | ME09430-06 | [NULL] | [NULL] | [NULL] | [NULL] | [NULL] |
| 12422009 | 32449F | ME09430-07 | [NULL] | [NULL] | [NULL] | [NULL] | [NULL] |
| 12422009 | 32449F | ME09430-08 | [NULL] | [NULL] | [NULL] | [NULL] | [NULL] |
| 12422009 | 32449F | ME09430-09 | [NULL] | [NULL] | [NULL] | [NULL] | [NULL] |
| 12422009 | 32449F | ME09430-10 | [NULL] | [NULL] | [NULL] | [NULL] | [NULL] |
| 12422009 | 326F | ME09437-01 | [NULL] | [NULL] | [NULL] | [NULL] | [NULL] |
| 12422009 | 326F | ME09437-02 | [NULL] | [NULL] | [NULL] | [NULL] | [NULL] |
| 12422009 | 326F | ME09437-03 | [NULL] | [NULL] | [NULL] | [NULL] | [NULL] |
| 12422009 | 34414F | ME09378-01 | [NULL] | [NULL] | [NULL] | [NULL] | [NULL] |
| 12422009 | 34414F | ME09378-02 | [NULL] | [NULL] | [NULL] | [NULL] | [NULL] |
| 12422009 | 34414F | ME09378-03 | [NULL] | [NULL] | [NULL] | [NULL] | [NULL] |
| 12422009 | 34414F | ME09378-04 | [NULL] | [NULL] | [NULL] | [NULL] | [NULL] |
| 12422009 | 34414F | ME09378-05 | [NULL] | [NULL] | [NULL] | [NULL] | [NULL] |
| 12422009 | 34414F | ME09378-06 | [NULL] | [NULL] | [NULL] | [NULL] | [NULL] |
| 12422009 | 34414F | ME09378-07 | [NULL] | [NULL] | [NULL] | [NULL] | [NULL] |
| 12422009 | 34414F | ME09378-08 | [NULL] | [NULL] | [NULL] | [NULL] | [NULL] |
| 12422009 | 34414F | ME09378-09 | [NULL] | [NULL] | [NULL] | [NULL] | [NULL] |
| 12422009 | 34414F | ME09378-10 | [NULL] | [NULL] | [NULL] | [NULL] | [NULL] |
| 12422009 | 35S | ME04078-01 | NO | [NULL] | [NULL] | [NULL] | [NULL] |
| 12422009 | 35S | ME04078-02 | YES | I18 | [NULL] | 6.50 | ROSETTE LEAVES-Shape-Lanceolate |
| 12422009 | 35S | ME04078-02 | YES | M14 | [NULL] | 6.50 | INFLORESCENCE-Height-Short |
| 12422009 | 35S | ME04078-02 | YES | M25 | [NULL] | 6.50 | INFLORESCENCE-Other |
| 12422009 | 35S | ME04078-02 | YES | P04 | [NULL] | 6.50 | FERTILITY-Fertility-Reduced |
| 12422009 | 35S | ME04078-02 | YES | P05 | [NULL] | 6.50 | FERTILITY-Fertility-Sterile |
| 12422009 | 35S | ME04078-03 | YES | J13 | [NULL] | 6.50 | WHOLE PLANT-Size-Small |
| 12422009 | 35S | ME04078-03 | YES | M15 | [NULL] | 6.50 | INFLORESCENCE-Height-Tall |
| 12422009 | 35S | ME04078-03 | YES | P04 | [NULL] | 6.50 | FERTILITY-Fertility-Reduced |
| 12422009 | 35S | ME04078-04 | NO | [NULL] | [NULL] | [NULL] | [NULL] |
| 12422009 | 35S | ME04078-05 | NO | [NULL] | [NULL] | [NULL] | [NULL] |
| 12422009 | 35S | ME04078-06 | YES | I18 | [NULL] | 6.50 | ROSETTE LEAVES-Shape-Lanceolate |
| 12422009 | 35S | ME04078-06 | YES | M25 | [NULL] | 6.50 | INFLORESCENCE-Other |
| 12422009 | 35S | ME04078-06 | YES | N02 | [NULL] | 6.50 | SILIQUES-Length-Short |
| 12422009 | 35S | ME04078-06 | YES | P04 | [NULL] | 6.50 | FERTILITY-Fertility-Reduced |
| 12422009 | 35S | ME04078-07 | YES | I18 | [NULL] | 6.50 | ROSETTE LEAVES-Shape-Lanceolate |
| 12422009 | 35S | ME04078-07 | YES | L11 | [NULL] | 6.50 | FLOWERS-Other |
| 12422009 | 35S | ME04078-07 | YES | P04 | [NULL] | 6.50 | FERTILITY-Fertility-Reduced |
| 12422009 | 35S | ME04078-07 | YES | P05 | [NULL] | 6.50 | FERTILITY-Fertility-Sterile |
| 12422009 | 35S | ME04078-08 | NO | [NULL] | [NULL] | [NULL] | [NULL] |
| 12422009 | 35S | ME04078-09 | NO | [NULL] | [NULL] | [NULL] | [NULL] |
| 12422009 | 35S | ME04078-10 | NO | [NULL] | [NULL] | [NULL] | [NULL] |
| 12422819 | 32449 | ME00291-01 | NO | [NULL] | [NULL] | [NULL] | [NULL] |
| 12422819 | 32449 | ME00291-02 | NO | [NULL] | [NULL] | [NULL] | [NULL] |
| 12422819 | 32449 | ME00291-03 | NO | [NULL] | [NULL] | [NULL] | [NULL] |
| 12422819 | 32449 | ME00291-04 | NO | [NULL] | [NULL] | [NULL] | [NULL] |
| 12422819 | 32449 | ME00291-05 | NO | [NULL] | [NULL] | [NULL] | [NULL] |
| 12422819 | 32449 | ME00291-06 | NO | [NULL] | [NULL] | [NULL] | [NULL] |
| 12422819 | 35S | ME04825-01 | NO | [NULL] | [NULL] | [NULL] | [NULL] |
| 12422819 | 35S | ME04825-02 | YES | I02 | [NULL] | 5.10 | ROSETTE LEAVES-Curled-Cup-shaped |
| 12422819 | 35S | ME04825-02 | YES | I02 | [NULL] | 6.10 | ROSETTE LEAVES-Curled-Cup-shaped |
| 12422819 | 35S | ME04825-02 | YES | I05 | [NULL] | 5.10 | ROSETTE LEAVES-Curled-Curled 3 |
| 12422819 | 35S | ME04825-02 | YES | I31 | [NULL] | 6.10 | ROSETTE LEAVES-Other |
| 12422819 | 35S | ME04825-02 | YES | M14 | [NULL] | 6.10 | INFLORESCENCE-Height-Short |
| 12422819 | 35S | ME04825-03 | NO | [NULL] | [NULL] | [NULL] | [NULL] |
| 12422819 | 35S | ME04825-04 | NO | [NULL] | [NULL] | [NULL] | [NULL] |
| 12422819 | 35S | ME04825-05 | YES | I22 | [NULL] | 5.10 | ROSETTE LEAVES-Shape-Serrate |
| 12422819 | 35S | ME04825-06 | NO | [NULL] | [NULL] | [NULL] | [NULL] |
| 12422819 | 35S | ME04825-07 | NO | [NULL] | [NULL] | [NULL] | [NULL] |
| 12422819 | 35S | ME04825-08 | NO | [NULL] | [NULL] | [NULL] | [NULL] |
| 12422819 | 35S | ME04825-09 | YES | I22 | [NULL] | 5.10 | ROSETTE LEAVES-Shape-Serrate |
| 12422819 | 35S | ME04825-09 | YES | J01 | [NULL] | 5.10 | WHOLE PLANT-Color-Dark Green |
| 12422819 | 35S | ME04825-09 | YES | J01 | [NULL] | 6.00 | WHOLE PLANT-Color-Dark Green |
| 12422819 | 35S | ME04825-09 | YES | M14 | [NULL] | 6.00 | INFLORESCENCE-Height-Short |
| 12422819 | 35S | ME04825-10 | NO | [NULL] | [NULL] | [NULL] | [NULL] |
| 12422873 | 326D | ME09241-01 | NO | [NULL] | [NULL] | [NULL] | [NULL] |
| 12422873 | 326D | ME09241-02 | NO | [NULL] | [NULL] | [NULL] | [NULL] |
| 12422873 | 326D | ME09241-03 | NO | [NULL] | [NULL] | [NULL] | [NULL] |
| 12422873 | 34414F | ME09401-01 | NO | [NULL] | [NULL] | [NULL] | [NULL] |
| 12422873 | 34414F | ME09401-02 | NO | [NULL] | [NULL] | [NULL] | [NULL] |
| 12422873 | 34414F | ME09401-03 | NO | [NULL] | [NULL] | [NULL] | [NULL] |
| 12422873 | 34414F | ME09401-04 | NO | [NULL] | [NULL] | [NULL] | [NULL] |
| 12422873 | 34414F | ME09401-05 | NO | [NULL] | [NULL] | [NULL] | [NULL] |
| 12422873 | 34414F | ME09401-06 | NO | [NULL] | [NULL] | [NULL] | [NULL] |
| 12422873 | 34414F | ME09401-07 | NO | [NULL] | [NULL] | [NULL] | [NULL] |
| 12422873 | 34414F | ME09401-08 | NO | [NULL] | [NULL] | [NULL] | [NULL] |
| 12422873 | 34414F | ME09401-09 | NO | [NULL] | [NULL] | [NULL] | [NULL] |
| 12422873 | 34414F | ME09401-10 | NO | [NULL] | [NULL] | [NULL] | [NULL] |
| 12422873 | 35S | ME05480-01 | YES | J01 | [NULL] | 6.50 | WHOLE PLANT-Color-Dark Green |
| 12422873 | 35S | ME05480-01 | YES | J08 | [NULL] | 6.50 | WHOLE PLANT-Dwarf-Misc. Dwarf |
| 12422873 | 35S | ME05480-01 | YES | P04 | [NULL] | 6.50 | FERTILITY-Fertility-Reduced |
| 12422873 | 35S | ME05480-02 | YES | J08 | [NULL] | 6.50 | WHOLE PLANT-Dwarf-Misc. Dwarf |
| 12422873 | 35S | ME05480-02 | YES | P04 | [NULL] | 6.50 | FERTILITY-Fertility-Reduced |
| 12422873 | 35S | ME05480-03 | YES | J01 | [NULL] | 6.50 | WHOLE PLANT-Color-Dark Green |
| 12422873 | 35S | ME05480-03 | YES | J08 | [NULL] | 6.50 | WHOLE PLANT-Dwarf-Misc. Dwarf |
| 12422873 | 35S | ME05480-04 | NO | [NULL] | [NULL] | [NULL] | [NULL] |
| 12422873 | 35S | ME05480-05 | NO | [NULL] | [NULL] | [NULL] | [NULL] |
| 12422873 | 35S | ME05480-06 | NO | [NULL] | [NULL] | [NULL] | [NULL] |
| 12422873 | 35S | ME05480-07 | YES | J08 | [NULL] | 6.50 | WHOLE PLANT-Dwarf-Misc. Dwarf |
| 12422873 | 35S | ME05480-07 | YES | P04 | [NULL] | 6.50 | FERTILITY-Fertility-Reduced |
| 12422873 | 35S | ME05480-08 | NO | [NULL] | [NULL] | [NULL] | [NULL] |
| 12422873 | 35S | ME05480-09 | YES | J08 | [NULL] | 6.50 | WHOLE PLANT-Dwarf-Misc. Dwarf |
| 12422873 | 35S | ME05480-09 | YES | P04 | [NULL] | 6.50 | FERTILITY-Fertility-Reduced |
| 12422873 | 35S | ME05480-10 | YES | J08 | [NULL] | 6.50 | WHOLE PLANT-Dwarf-Misc. Dwarf |
| 12422873 | 35S | ME05480-10 | YES | P04 | [NULL] | 6.50 | FERTILITY-Fertility-Reduced |
| 12430842 | 35S | ME08588-01 | YES | J13 | [NULL] | 6.30 | WHOLE PLANT-Size-Small |
| 12430842 | 35S | ME08588-01 | YES | M14 | [NULL] | 6.30 | INFLORESCENCE-Height-Short |
| 12430842 | 35S | ME08588-02 | YES | J13 | [NULL] | 6.30 | WHOLE PLANT-Size-Small |
| 12430842 | 35S | ME08588-02 | YES | M14 | [NULL] | 6.30 | INFLORESCENCE-Height-Short |
| 12430842 | 35S | ME08588-03 | YES | J13 | [NULL] | 6.30 | WHOLE PLANT-Size-Small |
| 12430842 | 35S | ME08588-03 | YES | M14 | [NULL] | 6.30 | INFLORESCENCE-Height-Short |
| 12430842 | 35S | ME08588-04 | YES | J13 | [NULL] | 6.30 | WHOLE PLANT-Size-Small |
| 12430842 | 35S | ME08588-04 | YES | M14 | [NULL] | 6.30 | INFLORESCENCE-Height-Short |
| 12430842 | 35S | ME08588-05 | YES | J13 | [NULL] | 6.30 | WHOLE PLANT-Size-Small |
| 12430842 | 35S | ME08588-05 | YES | M14 | [NULL] | 6.30 | INFLORESCENCE-Height-Short |
| 12430842 | 35S | ME08588-06 | YES | J13 | [NULL] | 6.30 | WHOLE PLANT-Size-Small |
| 12430842 | 35S | ME08588-06 | YES | M14 | [NULL] | 6.30 | INFLORESCENCE-Height-Short |
| 12430842 | 35S | ME08588-07 | NO | [NULL] | [NULL] | [NULL] | [NULL] |
| 12430842 | 35S | ME08588-08 | NO | [NULL] | [NULL] | [NULL] | [NULL] |
| 12430842 | 35S | ME08588-09 | NO | [NULL] | [NULL] | [NULL] | [NULL] |
| 12430842 | 35S | ME08588-10 | YES | J13 | [NULL] | 6.30 | WHOLE PLANT-Size-Small |
| 12430842 | 35S | ME08588-10 | YES | M14 | [NULL] | 6.30 | INFLORESCENCE-Height-Short |
| 12431307 | 35S | ME08632-01 | NO | [NULL] | [NULL] | [NULL] | [NULL] |
| 12431307 | 35S | ME08632-02 | NO | [NULL] | [NULL] | [NULL] | [NULL] |
| 12431307 | 35S | ME08632-03 | NO | [NULL] | [NULL] | [NULL] | [NULL] |
| 12431307 | 35S | ME08632-04 | NO | [NULL] | [NULL] | [NULL] | [NULL] |
| 12431307 | 35S | ME08632-05 | YES | M14 | [NULL] | 6.30 | INFLORESCENCE-Height-Short |
| 12431307 | 35S | ME08632-05 | YES | M19 | [NULL] | 6.30 | INFLORESCENCE-Strength-Strong |
| 12431307 | 35S | ME08632-05 | YES | P04 | [NULL] | 6.30 | FERTILITY-Fertility-Reduced |
| 12431307 | 35S | ME08632-06 | NO | [NULL] | [NULL] | [NULL] | [NULL] |
| 12431307 | 35S | ME08632-07 | NO | [NULL] | [NULL] | [NULL] | [NULL] |
| 12431307 | 35S | ME08632-08 | YES | M14 | [NULL] | 6.30 | INFLORESCENCE-Height-Short |
| 12431307 | 35S | ME08632-08 | YES | M19 | [NULL] | 6.30 | INFLORESCENCE-Strength-Strong |
| 12431307 | 35S | ME08632-08 | YES | P04 | [NULL] | 6.30 | FERTILITY-Fertility-Reduced |
| 12431307 | 35S | ME08632-09 | YES | M14 | [NULL] | 6.30 | INFLORESCENCE-Height-Short |
| 12431307 | 35S | ME08632-09 | YES | M19 | [NULL] | 6.30 | INFLORESCENCE-Strength-Strong |
| 12431307 | 35S | ME08632-09 | YES | P04 | [NULL] | 6.30 | FERTILITY-Fertility-Reduced |
| 12431307 | 35S | ME08632-10 | YES | M14 | [NULL] | 6.30 | INFLORESCENCE-Height-Short |
| 12431307 | 35S | ME08632-10 | YES | M19 | [NULL] | 6.30 | INFLORESCENCE-Strength-Strong |
| 12431307 | 35S | ME08632-10 | YES | P04 | [NULL] | 6.30 | FERTILITY-Fertility-Reduced |
| 12438838 | 326D | ME09212-01 | YES | M10 | [NULL] | 6.30 | INFLORESCENCE-Branching-Reduced Apical |
| | | | | | | | Dominance |
| 12438838 | 326D | ME09212-01 | YES | M13 | [NULL] | 6.30 | INFLORESCENCE-Flowering Time-Late Flowering |
| 12438838 | 326D | ME09212-02 | YES | M10 | [NULL] | 6.30 | INFLORESCENCE-Branching-Reduced Apical |
| | | | | | | | Dominance |
| 12438838 | 326D | ME09212-02 | YES | M13 | [NULL] | 6.30 | INFLORESCENCE-Flowering Time-Late Flowering |
| 12438838 | 326D | ME09212-03 | YES | M10 | [NULL] | 6.30 | INFLORESCENCE-Branching-Reduced Apical |
| | | | | | | | Dominance |
| 12438838 | 326D | ME09212-03 | YES | M13 | [NULL] | 6.30 | INFLORESCENCE-Flowering Time-Late Flowering |
| 12438838 | 326D | ME09212-04 | NO | [NULL] | [NULL] | [NULL] | [NULL] |
| 12438838 | 326D | ME09212-05 | NO | [NULL] | [NULL] | [NULL] | [NULL] |
| 12438838 | 34414F | ME09370-01 | NO | [NULL] | [NULL] | [NULL] | [NULL] |
| 12438838 | 34414F | ME09370-02 | NO | [NULL] | [NULL] | [NULL] | [NULL] |
| 12438838 | 34414F | ME09370-03 | YES | M10 | [NULL] | 6.30 | INFLORESCENCE-Branching-Reduced Apical |
| | | | | | | | Dominance |
| 12438838 | 34414F | ME09370-03 | YES | M13 | [NULL] | 6.30 | INFLORESCENCE-Flowering Time-Late |
| | | | | | | | Flowering |
| 12438838 | 34414F | ME09370-04 | NO | [NULL] | [NULL] | [NULL] | [NULL] |
| 12438838 | 34414F | ME09370-05 | NO | [NULL] | [NULL] | [NULL] | [NULL] |
| 12438838 | 34414F | ME09370-06 | NO | [NULL] | [NULL] | [NULL] | [NULL] |
| 12438838 | 34414F | ME09370-07 | NO | [NULL] | [NULL] | [NULL] | [NULL] |
| 12438838 | 34414F | ME09370-08 | NO | [NULL] | [NULL] | [NULL] | [NULL] |
| 12438838 | 35S | ME03166-01 | NO | [NULL] | [NULL] | [NULL] | [NULL] |
| 12438838 | 35S | ME03166-02 | YES | N02 | [NULL] | 6.90 | SILIQUES-Length-Short |
| 12438838 | 35S | ME03166-02 | YES | P04 | [NULL] | 6.90 | FERTILITY-Fertility-Reduced |
| 12438838 | 35S | ME03166-03 | YES | N02 | [NULL] | 6.90 | SILIQUES-Length-Short |
| 12438838 | 35S | ME03166-03 | YES | P04 | [NULL] | 6.90 | FERTILITY-Fertility-Reduced |
| 12438838 | 35S | ME03166-04 | YES | N02 | [NULL] | 6.90 | SILIQUES-Length-Short |
| 12438838 | 35S | ME03166-04 | YES | P04 | [NULL] | 6.90 | FERTILITY-Fertility-Reduced |
| 12438838 | 35S | ME03166-05 | YES | N02 | [NULL] | 6.90 | SILIQUES-Length-Short |
| 12438838 | 35S | ME03166-05 | YES | P04 | [NULL] | 6.90 | FERTILITY-Fertility-Reduced |
| 12438838 | 35S | ME03166-06 | NO | [NULL] | [NULL] | [NULL] | [NULL] |
| 12439663 | 35S | ME03111-01 | NO | [NULL] | [NULL] | [NULL] | [NULL] |
| 12439663 | 35S | ME03111-02 | NO | [NULL] | [NULL] | [NULL] | [NULL] |
| 12439663 | 35S | ME03111-03 | YES | I08 | [NULL] | 6.50 | ROSETTE LEAVES-Disorganized Rosette- |
| | | | | | | | Disorganized Rosette |
| 12439663 | 35S | ME03111-03 | YES | I18 | [NULL] | 6.50 | ROSETTE LEAVES-Shape-Lanceolate |
| 12439663 | 35S | ME03111-04 | YES | I05 | [NULL] | 6.00 | ROSETTE LEAVES-Curled-Curled 3 |
| 12439663 | 35S | ME03111-04 | YES | J13 | [NULL] | 6.00 | WHOLE PLANT-Size-Small |
| 12439663 | 35S | ME03111-04 | YES | K05 | [NULL] | 6.00 | CAULINE LEAVES-Curled-Curled 3 |
| 12439663 | 35S | ME03111-04 | YES | L11 | [NULL] | 6.00 | FLOWERS-Other |
| 12439663 | 35S | ME03111-04 | YES | M09 | [NULL] | 6.00 | INFLORESCENCE-Branching-No Branching |
| 12439663 | 35S | ME03111-04 | YES | M17 | [NULL] | 6.00 | INFLORESCENCE-Internode Length-Short Internode |
| 12439663 | 35S | ME03111-05 | NO | [NULL] | [NULL] | [NULL] | [NULL] |
| 12439663 | 35S | ME03111-06 | NO | [NULL] | [NULL] | [NULL] | [NULL] |
| 12439663 | 35S | ME03111-07 | NO | [NULL] | [NULL] | [NULL] | [NULL] |
| 12439663 | 35S | ME03111-08 | YES | I08 | [NULL] | 6.50 | ROSETTE LEAVES-Disorganized Rosette- |
| | | | | | | | Disorganized Rosette |
| 12439663 | 35S | ME03111-08 | YES | I18 | [NULL] | 6.50 | ROSETTE LEAVES-Shape-Lanceolate |
| 12439663 | 35S | ME03111-09 | NO | [NULL] | [NULL] | [NULL] | [NULL] |
| 12439663 | 35S | ME03111-10 | NO | [NULL] | [NULL] | [NULL] | [NULL] |
| 12442501 | 35S | ME05206-01 | NO | [NULL] | [NULL] | [NULL] | [NULL] |
| 12442501 | 35S | ME05206-02 | NO | [NULL] | [NULL] | [NULL] | [NULL] |
| 12442501 | 35S | ME05206-03 | YES | I06 | [NULL] | 6.10 | ROSETTE LEAVES-Curled-Curled 4 |
| 12442501 | 35S | ME05206-03 | YES | J13 | [NULL] | 6.10 | WHOLE PLANT-Size-Small |
| 12442501 | 35S | ME05206-04 | NO | [NULL] | [NULL] | [NULL] | [NULL] |
| 12442501 | 35S | ME05206-05 | NO | [NULL] | [NULL] | [NULL] | [NULL] |
| 12442501 | 35S | ME05206-06 | NO | [NULL] | [NULL] | [NULL] | [NULL] |
| 12442501 | 35S | ME05206-07 | YES | J13 | [NULL] | 6.10 | WHOLE PLANT-Size-Small |
| 12442501 | 35S | ME05206-08 | YES | I07 | [NULL] | 6.10 | ROSETTE LEAVES-Curled-Curled 5 |
| 12442501 | 35S | ME05206-08 | YES | J13 | [NULL] | 6.10 | WHOLE PLANT-Size-Small |
| 12442501 | 35S | ME05206-09 | NO | [NULL] | [NULL] | [NULL] | [NULL] |
| 12442501 | 35S | ME05206-10 | YES | J13 | [NULL] | 6.10 | WHOLE PLANT-Size-Small |
| 12451835 | 35S | ME08782-01 | YES | P04 | [NULL] | 6.50 | FERTILITY-Fertility-Reduced |
| 12451835 | 35S | ME08782-02 | YES | P04 | [NULL] | 6.50 | FERTILITY-Fertility-Reduced |
| 12451835 | 35S | ME08782-03 | NO | [NULL] | [NULL] | [NULL] | [NULL] |
| 12451835 | 35S | ME08782-04 | YES | P04 | [NULL] | 6.50 | FERTILITY-Fertility-Reduced |
| 12451835 | 35S | ME08782-05 | NO | [NULL] | [NULL] | [NULL] | [NULL] |
| 12451835 | 35S | ME08782-06 | YES | P04 | [NULL] | 6.50 | FERTILITY-Fertility-Reduced |
| 12451835 | 35S | ME08782-07 | YES | P04 | [NULL] | 6.50 | FERTILITY-Fertility-Reduced |
| 12451835 | 35S | ME08782-08 | YES | P04 | [NULL] | 6.50 | FERTILITY-Fertility-Reduced |
| 12451835 | 35S | ME08782-09 | YES | P04 | [NULL] | 6.50 | FERTILITY-Fertility-Reduced |
| 12451835 | 35S | ME08782-10 | YES | P04 | [NULL] | 6.50 | FERTILITY-Fertility-Reduced |
| 12452690 | 32449 | ME00677-01 | YES | M02 | [NULL] | 6.30 | INFLORESCENCE-Appearance-Corkscrew |
| 12452690 | 32449 | ME00677-01 | YES | M19 | [NULL] | 6.30 | INFLORESCENCE-Strength-Strong |
| 12452690 | 32449 | ME00677-01 | YES | P05 | [NULL] | 6.90 | FERTILITY-Fertility-Sterile |
| 12452690 | 32449 | ME00677-02 | YES | M02 | [NULL] | 6.30 | INFLORESCENCE-Appearance-Corkscrew |
| 12452690 | 32449 | ME00677-02 | YES | M19 | [NULL] | 6.30 | INFLORESCENCE-Strength-Strong |
| 12452690 | 32449 | ME00677-02 | YES | P05 | [NULL] | 6.90 | FERTILITY-Fertility-Sterile |
| 12452690 | 32449 | ME00677-03 | NO | [NULL] | [NULL] | [NULL] | [NULL] |
| 12452690 | 32449 | ME00677-04 | YES | M02 | [NULL] | 6.30 | INFLORESCENCE-Appearance-Corkscrew |
| 12452690 | 32449 | ME00677-04 | YES | M19 | [NULL] | 6.30 | INFLORESCENCE-Strength-Strong |
| 12452690 | 32449 | ME00677-04 | YES | P04 | [NULL] | 6.90 | FERTILITY-Fertility-Reduced |
| 12452690 | 32449 | ME00677-05 | YES | M02 | [NULL] | 6.30 | INFLORESCENCE-Appearance-Corkscrew |
| 12452690 | 32449 | ME00677-05 | YES | M19 | [NULL] | 6.30 | INFLORESCENCE-Strength-Strong |
| 12452690 | 32449 | ME00677-05 | YES | P05 | [NULL] | 6.90 | FERTILITY-Fertility-Sterile |
| 12452690 | 32449 | ME00677-11 | NO | [NULL] | [NULL] | [NULL] | [NULL] |
| 12452690 | 32449 | ME00677-12 | NO | [NULL] | [NULL] | [NULL] | [NULL] |
| 12452690 | 32449 | ME00677-13 | NO | [NULL] | [NULL] | [NULL] | [NULL] |
| 12452690 | 32449 | ME00677-14 | NO | [NULL] | [NULL] | [NULL] | [NULL] |
| 12452690 | 32449 | ME00677-15 | NO | [NULL] | [NULL] | [NULL] | [NULL] |
| 12452690 | 32449 | ME00677-16 | NO | [NULL] | [NULL] | [NULL] | [NULL] |
| 12452690 | 32449 | ME00677-17 | NO | [NULL] | [NULL] | [NULL] | [NULL] |
| 12452690 | 32449 | ME00677-18 | NO | [NULL] | [NULL] | [NULL] | [NULL] |
| 12452690 | 32449 | ME00677-19 | NO | [NULL] | [NULL] | [NULL] | [NULL] |
| 12452690 | 32449 | ME00677-20 | NO | [NULL] | [NULL] | [NULL] | [NULL] |
| 12452690 | 32449 | ME00677-21 | NO | [NULL] | [NULL] | [NULL] | [NULL] |
| 12452690 | 32449 | ME00677-22 | NO | [NULL] | [NULL] | [NULL] | [NULL] |
| 12452690 | 32449 | ME03031-01 | YES | P04 | [NULL] | 6.50 | FERTILITY-Fertility-Reduced |
| 12452690 | 32449 | ME03031-02 | YES | P04 | [NULL] | 6.50 | FERTILITY-Fertility-Reduced |
| 12452690 | 32449 | ME03031-03 | YES | P04 | [NULL] | 6.50 | FERTILITY-Fertility-Reduced |
| 12452690 | 32449 | ME03031-04 | YES | P04 | [NULL] | 6.50 | FERTILITY-Fertility-Reduced |
| 12452690 | 32449 | ME03031-05 | YES | P04 | [NULL] | 6.50 | FERTILITY-Fertility-Reduced |
| 12452690 | 32449 | ME03031-06 | NO | [NULL] | [NULL] | [NULL] | [NULL] |
| 12452690 | 32449 | ME03031-07 | YES | J01 | [NULL] | 5.10 | WHOLE PLANT-Color-Dark Green |
| 12452690 | 32449 | ME03031-07 | YES | J13 | [NULL] | 5.10 | WHOLE PLANT-Size-Small |
| 12452690 | 32449 | ME03031-08 | YES | J01 | [NULL] | 6.50 | WHOLE PLANT-Color-Dark Green |
| 12452690 | 32449 | ME03031-08 | YES | J13 | [NULL] | 6.50 | WHOLE PLANT-Size-Small |
| 12452690 | 32449 | ME03031-09 | NO | [NULL] | [NULL] | [NULL] | [NULL] |
| 12452690 | 32449 | ME03031-10 | NO | [NULL] | [NULL] | [NULL] | [NULL] |
| 12452690 | 35S | ME05209-01 | NO | [NULL] | [NULL] | [NULL] | [NULL] |
| 12452690 | 35S | ME05209-02 | NO | [NULL] | [NULL] | [NULL] | [NULL] |
| 12452690 | 35S | ME05209-03 | NO | [NULL] | [NULL] | [NULL] | [NULL] |
| 12452690 | 35S | ME05209-04 | NO | [NULL] | [NULL] | [NULL] | [NULL] |
| 12452690 | 35S | ME05209-05 | NO | [NULL] | [NULL] | [NULL] | [NULL] |
| 12452690 | 35S | ME05209-06 | NO | [NULL] | [NULL] | [NULL] | [NULL] |
| 12452690 | 35S | ME05209-07 | NO | [NULL] | [NULL] | [NULL] | [NULL] |
| 12452690 | 35S | ME05209-08 | NO | [NULL] | [NULL] | [NULL] | [NULL] |
| 12452690 | 35S | ME05209-09 | NO | [NULL] | [NULL] | [NULL] | [NULL] |
| 12452690 | 35S | ME05209-10 | NO | [NULL] | [NULL] | [NULL] | [NULL] |
| 12452925 | 35S | ME05057-01 | YES | I08 | [NULL] | 6.50 | ROSETTE LEAVES-Disorganized Rosette- |
| | | | | | | | Disorganized Rosette |
| 12452925 | 35S | ME05057-01 | YES | I18 | [NULL] | 6.50 | ROSETTE LEAVES-Shape-Lanceolate |
| 12452925 | 35S | ME05057-01 | YES | I31 | [NULL] | 6.50 | ROSETTE LEAVES-Other |
| 12452925 | 35S | ME05057-01 | YES | J13 | [NULL] | 6.50 | WHOLE PLANT-Size-Small |
| 12452925 | 35S | ME05057-01 | YES | M14 | [NULL] | 6.50 | INFLORESCENCE-Height-Short |
| 12452925 | 35S | ME05057-02 | YES | I08 | [NULL] | 6.50 | ROSETTE LEAVES-Disorganized Rosette- |
| | | | | | | | Disorganized Rosette |
| 12452925 | 35S | ME05057-02 | YES | I18 | [NULL] | 6.50 | ROSETTE LEAVES-Shape-Lanceolate |
| 12452925 | 35S | ME05057-02 | YES | I31 | [NULL] | 6.50 | ROSETTE LEAVES-Other |
| 12452925 | 35S | ME05057-02 | YES | J13 | [NULL] | 6.50 | WHOLE PLANT-Size-Small |
| 12452925 | 35S | ME05057-02 | YES | M14 | [NULL] | 6.50 | INFLORESCENCE-Height-Short |
| 12452925 | 35S | ME05057-03 | YES | I08 | [NULL] | 6.50 | ROSETTE LEAVES-Disorganized Rosette- |
| | | | | | | | Disorganized Rosette |
| 12452925 | 35S | ME05057-03 | YES | I18 | [NULL] | 6.50 | ROSETTE LEAVES-Shape-Lanceolate |
| 12452925 | 35S | ME05057-03 | YES | I31 | [NULL] | 6.50 | ROSETTE LEAVES-Other |
| 12452925 | 35S | ME05057-03 | YES | J13 | [NULL] | 6.50 | WHOLE PLANT-Size-Small |
| 12452925 | 35S | ME05057-03 | YES | M14 | [NULL] | 6.50 | INFLORESCENCE-Height-Short |
| 12452925 | 35S | ME05057-04 | YES | I08 | [NULL] | 6.50 | ROSETTE LEAVES-Disorganized Rosette- |
| | | | | | | | Disorganized Rosette |
| 12452925 | 35S | ME05057-04 | YES | I18 | [NULL] | 6.50 | ROSETTE LEAVES-Shape-Lanceolate |
| 12452925 | 35S | ME05057-04 | YES | I31 | [NULL] | 6.50 | ROSETTE LEAVES-Other |
| 12452925 | 35S | ME05057-04 | YES | J13 | [NULL] | 6.50 | WHOLE PLANT-Size-Small |
| 12452925 | 35S | ME05057-04 | YES | M14 | [NULL] | 6.50 | INFLORESCENCE-Height-Short |
| 12452925 | 35S | ME05057-05 | YES | I08 | [NULL] | 6.50 | ROSETTE LEAVES-Disorganized Rosette- |
| | | | | | | | Disorganized Rosette |
| 12452925 | 35S | ME05057-05 | YES | I18 | [NULL] | 6.50 | ROSETTE LEAVES-Shape-Lanceolate |
| 12452925 | 35S | ME05057-05 | YES | I31 | [NULL] | 6.50 | ROSETTE LEAVES-Other |
| 12452925 | 35S | ME05057-05 | YES | J13 | [NULL] | 6.50 | WHOLE PLANT-Size-Small |
| 12452925 | 35S | ME05057-05 | YES | M14 | [NULL] | 6.50 | INFLORESCENCE-Height-Short |
| 12452925 | 35S | ME05057-06 | YES | I08 | [NULL] | 6.50 | ROSETTE LEAVES-Disorganized Rosette- |
| | | | | | | | Disorganized Rosette |
| 12452925 | 35S | ME05057-06 | YES | I18 | [NULL] | 6.50 | ROSETTE LEAVES-Shape-Lanceolate |
| 12452925 | 35S | ME05057-06 | YES | I31 | [NULL] | 6.50 | ROSETTE LEAVES-Other |
| 12452925 | 35S | ME05057-06 | YES | J13 | [NULL] | 6.50 | WHOLE PLANT-Size-Small |
| 12452925 | 35S | ME05057-06 | YES | M14 | [NULL] | 6.50 | INFLORESCENCE-Height-Short |
| 12452925 | 35S | ME05057-07 | YES | I08 | [NULL] | 6.50 | ROSETTE LEAVES-Disorganized Rosette- |
| | | | | | | | Disorganized Rosette |
| 12452925 | 35S | ME05057-07 | YES | I18 | [NULL] | 6.50 | ROSETTE LEAVES-Shape-Lanceolate |
| 12452925 | 35S | ME05057-07 | YES | I31 | [NULL] | 6.50 | ROSETTE LEAVES-Other |
| 12452925 | 35S | ME05057-07 | YES | J13 | [NULL] | 6.50 | WHOLE PLANT-Size-Small |
| 12452925 | 35S | ME05057-07 | YES | M14 | [NULL] | 6.50 | INFLORESCENCE-Height-Short |
| 12452925 | 35S | ME05057-08 | YES | I08 | [NULL] | 6.50 | ROSETTE LEAVES-Disorganized Rosette- |
| | | | | | | | Disorganized Rosette |
| 12452925 | 35S | ME05057-08 | YES | I18 | [NULL] | 6.50 | ROSETTE LEAVES-Shape-Lanceolate |
| 12452925 | 35S | ME05057-08 | YES | I31 | [NULL] | 6.50 | ROSETTE LEAVES-Other |
| 12452925 | 35S | ME05057-08 | YES | J13 | [NULL] | 6.50 | WHOLE PLANT-Size-Small |
| 12452925 | 35S | ME05057-08 | YES | M14 | [NULL] | 6.50 | INFLORESCENCE-Height-Short |
| 12452925 | 35S | ME05057-09 | YES | I08 | [NULL] | 6.50 | ROSETTE LEAVES-Disorganized Rosette- |
| | | | | | | | Disorganized Rosette |
| 12452925 | 35S | ME05057-09 | YES | I18 | [NULL] | 6.50 | ROSETTE LEAVES-Shape-Lanceolate |
| 12452925 | 35S | ME05057-09 | YES | I31 | [NULL] | 6.50 | ROSETTE LEAVES-Other |
| 12452925 | 35S | ME05057-09 | YES | J13 | [NULL] | 6.50 | WHOLE PLANT-Size-Small |
| 12452925 | 35S | ME05057-09 | YES | M14 | [NULL] | 6.50 | INFLORESCENCE-Height-Short |
| 12452925 | 35S | ME05057-10 | YES | I08 | [NULL] | 6.50 | ROSETTE LEAVES-Disorganized Rosette- |
| | | | | | | | Disorganized Rosette |
| 12452925 | 35S | ME05057-10 | YES | I18 | [NULL] | 6.50 | ROSETTE LEAVES-Shape-Lanceolate |
| 12452925 | 35S | ME05057-10 | YES | I31 | [NULL] | 6.50 | ROSETTE LEAVES-Other |
| 12452925 | 35S | ME05057-10 | YES | J13 | [NULL] | 6.50 | WHOLE PLANT-Size-Small |
| 12452925 | 35S | ME05057-10 | YES | M14 | [NULL] | 6.50 | INFLORESCENCE-Height-Short |
| 12453502 | 35S | ME05207-01 | NO | [NULL] | [NULL] | [NULL] | [NULL] |
| 12453502 | 35S | ME05207-02 | YES | J13 | [NULL] | 6.50 | WHOLE PLANT-Size-Small |
| 12453502 | 35S | ME05207-03 | YES | J13 | [NULL] | 6.50 | WHOLE PLANT-Size-Small |
| 12453502 | 35S | ME05207-04 | YES | J13 | [NULL] | 6.50 | WHOLE PLANT-Size-Small |
| 12453502 | 35S | ME05207-05 | YES | J13 | [NULL] | 6.50 | WHOLE PLANT-Size-Small |
| 12453502 | 35S | ME05207-06 | YES | J13 | [NULL] | 6.50 | WHOLE PLANT-Size-Small |
| 12453502 | 35S | ME05207-07 | NO | [NULL] | [NULL] | [NULL] | [NULL] |
| 12455436 | 35S | ME04762-01 | NO | [NULL] | [NULL] | [NULL] | [NULL] |
| 12455436 | 35S | ME04762-02 | NO | [NULL] | [NULL] | [NULL] | [NULL] |
| 12455436 | 35S | ME04762-03 | NO | [NULL] | [NULL] | [NULL] | [NULL] |
| 12455436 | 35S | ME04762-04 | YES | I20 | [NULL] | 6.30 | ROSETTE LEAVES-Shape-Oval |
| 12455436 | 35S | ME04762-04 | YES | J01 | [NULL] | 6.30 | WHOLE PLANT-Color-Dark Green |
| 12455436 | 35S | ME04762-04 | YES | M14 | [NULL] | 6.30 | INFLORESCENCE-Height-Short |
| 12455436 | 35S | ME04762-05 | NO | [NULL] | [NULL] | [NULL] | [NULL] |
| 12455436 | 35S | ME04762-06 | YES | I20 | [NULL] | 6.30 | ROSETTE LEAVES-Shape-Oval |
| 12455436 | 35S | ME04762-06 | YES | J02 | [NULL] | 6.30 | WHOLE PLANT-Color-High Anthocyanin |
| 12455436 | 35S | ME04762-06 | YES | M14 | [NULL] | 6.30 | INFLORESCENCE-Height-Short |
| 12455436 | 35S | ME04762-07 | YES | I20 | [NULL] | 6.30 | ROSETTE LEAVES-Shape-Oval |
| 12455436 | 35S | ME04762-07 | YES | J02 | [NULL] | 6.30 | WHOLE PLANT-Color-High Anthocyanin |
| 12455436 | 35S | ME04762-07 | YES | M14 | [NULL] | 6.30 | INFLORESCENCE-Height-Short |
| 12455436 | 35S | ME04762-08 | YES | I04 | [NULL] | 5.10 | ROSETTE LEAVES-Curled-Curled 2 |
| 12455436 | 35S | ME04762-08 | YES | I20 | [NULL] | 5.10 | ROSETTE LEAVES-Shape-Oval |
| 12455436 | 35S | ME04762-08 | YES | I31 | [NULL] | 5.10 | ROSETTE LEAVES-Other |
| 12455436 | 35S | ME04762-08 | YES | J01 | [NULL] | 5.10 | WHOLE PLANT-Color-Dark Green |
| 12455436 | 35S | ME04762-08 | YES | K20 | [NULL] | 5.10 | CAULINE LEAVES-Shape-Serrate |
| 12455436 | 35S | ME04762-08 | YES | M13 | [NULL] | 5.10 | INFLORESCENCE-Flowering Time-Late Flowering |
| 12455436 | 35S | ME04762-08 | YES | M14 | [NULL] | 5.10 | INFLORESCENCE-Height-Short |
| 12455436 | 35S | ME04762-08 | YES | M19 | [NULL] | 5.10 | INFLORESCENCE-Strength-Strong |
| 12455436 | 35S | ME04762-09 | NO | [NULL] | [NULL] | [NULL] | [NULL] |
| 12456365 | 35S | ME05211-01 | NO | [NULL] | [NULL] | [NULL] | [NULL] |
| 12456365 | 35S | ME05211-02 | YES | I31 | [NULL] | 6.30 | ROSETTE LEAVES-Other |
| 12456365 | 35S | ME05211-02 | YES | J01 | [NULL] | 6.30 | WHOLE PLANT-Color-Dark Green |
| 12456365 | 35S | ME05211-02 | YES | J12 | [NULL] | 6.30 | WHOLE PLANT-Size-Large |
| 12456365 | 35S | ME05211-02 | YES | M13 | [NULL] | 6.30 | INFLORESCENCE-Flowering Time-Late Flowering |
| 12456365 | 35S | ME05211-03 | YES | I31 | [NULL] | 6.10 | ROSETTE LEAVES-Other |
| 12456365 | 35S | ME05211-03 | YES | J01 | [NULL] | 6.10 | WHOLE PLANT-Color-Dark Green |
| 12456365 | 35S | ME05211-03 | YES | M13 | [NULL] | 6.10 | INFLORESCENCE-Flowering Time-Late Flowering |
| 12456365 | 35S | ME05211-04 | NO | [NULL] | [NULL] | [NULL] | [NULL] |
| 12456365 | 35S | ME05211-05 | NO | [NULL] | [NULL] | [NULL] | [NULL] |
| 12456365 | 35S | ME05211-06 | NO | [NULL] | [NULL] | [NULL] | [NULL] |
| 12456365 | 35S | ME05211-07 | NO | [NULL] | [NULL] | [NULL] | [NULL] |
| 12456365 | 35S | ME05211-08 | YES | I18 | [NULL] | 5.10 | ROSETTE LEAVES-Shape-Lanceolate |
| 12456365 | 35S | ME05211-08 | YES | I31 | [NULL] | 5.10 | ROSETTE LEAVES-Other |
| 12456365 | 35S | ME05211-08 | YES | J13 | [NULL] | 5.10 | WHOLE PLANT-Size-Small |
| 12456365 | 35S | ME05211-08 | YES | J14 | [NULL] | 5.10 | WHOLE PLANT-Other |
| 12456365 | 35S | ME05211-08 | YES | M13 | [NULL] | 5.10 | INFLORESCENCE-Flowering Time-Late Flowering |
| 12456365 | 35S | ME05211-09 | NO | [NULL] | [NULL] | [NULL] | [NULL] |
| 12466272 | 35S | ME04286-01 | NO | [NULL] | [NULL] | [NULL] | [NULL] |
| 12466272 | 35S | ME04286-02 | YES | I08 | [NULL] | 6.00 | ROSETTE LEAVES-Disorganized Rosette- |
| | | | | | | | Disorganized Rosette |
| 12466272 | 35S | ME04286-02 | YES | I18 | [NULL] | 1.14 | ROSETTE LEAVES-Shape-Lanceolate |
| 12466272 | 35S | ME04286-02 | YES | I18 | [NULL] | 6.00 | ROSETTE LEAVES-Shape-Lanceolate |
| 12466272 | 35S | ME04286-02 | YES | I22 | [NULL] | 1.14 | ROSETTE LEAVES-Shape-Serrate |
| 12466272 | 35S | ME04286-02 | YES | I31 | [NULL] | 1.14 | ROSETTE LEAVES-Other |
| 12466272 | 35S | ME04286-02 | YES | K23 | [NULL] | 6.00 | CAULINE LEAVES-Size-Large |
| 12466272 | 35S | ME04286-02 | YES | M13 | [NULL] | 1.14 | INFLORESCENCE-Flowering Time-Late Flowering |
| 12466272 | 35S | ME04286-02 | YES | M13 | [NULL] | 6.00 | INFLORESCENCE-Flowering Time-Late Flowering |
| 12466272 | 35S | ME04286-02 | YES | M14 | [NULL] | 6.00 | INFLORESCENCE-Height-Short |
| 12466272 | 35S | ME04286-02 | YES | M19 | [NULL] | 6.00 | INFLORESCENCE-Strength-Strong |
| 12466272 | 35S | ME04286-03 | YES | I18 | [NULL] | 6.10 | ROSETTE LEAVES-Shape-Lanceolate |
| 12466272 | 35S | ME04286-03 | YES | J13 | [NULL] | 6.10 | WHOLE PLANT-Size-Small |
| 12466272 | 35S | ME04286-03 | YES | M14 | [NULL] | 6.50 | INFLORESCENCE-Height-Short |
| 12466272 | 35S | ME04286-03 | YES | M25 | [NULL] | 6.50 | INFLORESCENCE-Other |
| 12466272 | 35S | ME04286-03 | YES | P05 | [NULL] | 6.50 | FERTILITY-Fertility-Sterile |
| 12466272 | 35S | ME04286-04 | YES | I18 | [NULL] | 6.10 | ROSETTE LEAVES-Shape-Lanceolate |
| 12466272 | 35S | ME04286-04 | YES | J13 | [NULL] | 6.10 | WHOLE PLANT-Size-Small |
| 12466272 | 35S | ME04286-04 | YES | M14 | [NULL] | 6.50 | INFLORESCENCE-Height-Short |
| 12466272 | 35S | ME04286-04 | YES | M25 | [NULL] | 6.50 | INFLORESCENCE-Other |
| 12466272 | 35S | ME04286-04 | YES | P05 | [NULL] | 6.50 | FERTILITY-Fertility-Sterile |
| 12466272 | 35S | ME04286-05 | NO | [NULL] | [NULL] | [NULL] | [NULL] |
| 12466272 | 35S | ME04286-06 | NO | [NULL] | [NULL] | [NULL] | [NULL] |
| 12466272 | 35S | ME04286-07 | NO | [NULL] | [NULL] | [NULL] | [NULL] |
| 12466272 | 35S | ME04286-08 | NO | [NULL] | [NULL] | [NULL] | [NULL] |
| 12466272 | 35S | ME04286-09 | YES | I22 | [NULL] | 5.10 | ROSETTE LEAVES-Shape-Serrate |
| 12466272 | 35S | ME04286-09 | YES | J01 | [NULL] | 5.10 | WHOLE PLANT-Color-Dark Green |
| 12482093 | 35S | ME06510-01 | NO | [NULL] | [NULL] | [NULL] | [NULL] |
| 12482093 | 35S | ME06510-02 | YES | I22 | [NULL] | 1.09 | ROSETTE LEAVES-Shape-Serrate |
| 12482093 | 35S | ME06510-02 | YES | J14 | [NULL] | 1.09 | WHOLE PLANT-Other |
| 12482093 | 35S | ME06510-02 | YES | P04 | [NULL] | 6.50 | FERTILITY-Fertility-Reduced |
| 12482093 | 35S | ME06510-03 | YES | I22 | [NULL] | 5.10 | ROSETTE LEAVES-Shape-Serrate |
| 12482093 | 35S | ME06510-03 | YES | J14 | [NULL] | 5.10 | WHOLE PLANT-Other |
| 12482093 | 35S | ME06510-03 | YES | P04 | [NULL] | 6.50 | FERTILITY-Fertility-Reduced |
| 12482093 | 35S | ME06510-04 | NO | [NULL] | [NULL] | [NULL] | [NULL] |
| 12482093 | 35S | ME06510-05 | YES | I18 | [NULL] | 6.10 | ROSETTE LEAVES-Shape-Lanceolate |
| 12482093 | 35S | ME06510-05 | YES | I22 | [NULL] | 6.10 | ROSETTE LEAVES-Shape-Serrate |
| 12482093 | 35S | ME06510-05 | YES | J01 | [NULL] | 6.10 | WHOLE PLANT-Color-Dark Green |
| 12482093 | 35S | ME06510-05 | YES | P04 | [NULL] | 6.50 | FERTILITY-Fertility-Reduced |
| 12482093 | 35S | ME06510-06 | NO | [NULL] | [NULL] | [NULL] | [NULL] |
| 12482093 | 35S | ME06510-07 | NO | [NULL] | [NULL] | [NULL] | [NULL] |
| 12482093 | 35S | ME06510-08 | NO | [NULL] | [NULL] | [NULL] | [NULL] |
| 12482093 | 35S | ME06510-09 | NO | [NULL] | [NULL] | [NULL] | [NULL] |
| 12482093 | 35S | ME06510-10 | NO | [NULL] | [NULL] | [NULL] | [NULL] |
| 12482146 | 326D | ME09201-01 | NO | [NULL] | [NULL] | [NULL] | [NULL] |
| 12482146 | 326D | ME09201-02 | NO | [NULL] | [NULL] | [NULL] | [NULL] |
| 12482146 | 326D | ME09201-03 | NO | [NULL] | [NULL] | [NULL] | [NULL] |
| 12482146 | 326D | ME09201-04 | NO | [NULL] | [NULL] | [NULL] | [NULL] |
| 12482146 | 326D | ME09201-05 | NO | [NULL] | [NULL] | [NULL] | [NULL] |
| 12482146 | 326D | ME09201-06 | NO | [NULL] | [NULL] | [NULL] | [NULL] |
| 12482146 | 326D | ME09201-07 | NO | [NULL] | [NULL] | [NULL] | [NULL] |
| 12482146 | 326D | ME09201-08 | NO | [NULL] | [NULL] | [NULL] | [NULL] |
| 12482146 | 34414F | ME09359-01 | NO | [NULL] | [NULL] | [NULL] | [NULL] |
| 12482146 | 34414F | ME09359-02 | NO | [NULL] | [NULL] | [NULL] | [NULL] |
| 12482146 | 34414F | ME09359-03 | NO | [NULL] | [NULL] | [NULL] | [NULL] |
| 12482146 | 34414F | ME09359-04 | NO | [NULL] | [NULL] | [NULL] | [NULL] |
| 12482146 | 34414F | ME09359-05 | NO | [NULL] | [NULL] | [NULL] | [NULL] |
| 12482146 | 34414F | ME09359-06 | NO | [NULL] | [NULL] | [NULL] | [NULL] |
| 12482146 | 34414F | ME09359-07 | NO | [NULL] | [NULL] | [NULL] | [NULL] |
| 12482146 | 34414F | ME09359-08 | NO | [NULL] | [NULL] | [NULL] | [NULL] |
| 12482146 | 34414F | ME09359-09 | NO | [NULL] | [NULL] | [NULL] | [NULL] |
| 12482146 | 34414F | ME09359-10 | NO | [NULL] | [NULL] | [NULL] | [NULL] |
| 12482146 | 35S | ME01932-01 | YES | J12 | [NULL] | 6.50 | WHOLE PLANT-Size-Large |
| 12482146 | 35S | ME01932-01 | YES | L11 | [NULL] | 6.50 | FLOWERS-Other |
| 12482146 | 35S | ME01932-01 | YES | P04 | [NULL] | 6.50 | FERTILITY-Fertility-Reduced |
| 12482146 | 35S | ME01932-02 | NO | [NULL] | [NULL] | [NULL] | [NULL] |
| 12482146 | 35S | ME01932-03 | NO | [NULL] | [NULL] | [NULL] | [NULL] |
| 12482146 | 35S | ME01932-04 | NO | [NULL] | [NULL] | [NULL] | [NULL] |
| 12482146 | 35S | ME01932-05 | YES | L11 | [NULL] | 6.50 | FLOWERS-Other |
| 12482146 | 35S | ME01932-05 | YES | P04 | [NULL] | 6.50 | FERTILITY-Fertility-Reduced |
| 12482146 | 35S | ME01932-06 | YES | P04 | [NULL] | 6.50 | FERTILITY-Fertility-Reduced |
| 12482146 | 35S | ME01932-07 | YES | L11 | [NULL] | 6.50 | FLOWERS-Other |
| 12482146 | 35S | ME01932-07 | YES | P04 | [NULL] | 6.50 | FERTILITY-Fertility-Reduced |
| 12482922 | 35S | ME02587-01 | NO | [NULL] | [NULL] | [NULL] | [NULL] |
| 12482922 | 35S | ME02587-02 | YES | P04 | [NULL] | 6.30 | FERTILITY-Fertility-Reduced |
| 12482922 | 35S | ME02587-03 | NO | [NULL] | [NULL] | [NULL] | [NULL] |
| 12482922 | 35S | ME02587-04 | YES | I22 | [NULL] | 1.10 | ROSETTE LEAVES-Shape-Serrate |
| 12482922 | 35S | ME02587-04 | YES | I31 | [NULL] | 1.10 | ROSETTE LEAVES-Other |
| 12482922 | 35S | ME02587-04 | YES | J01 | [NULL] | 1.10 | WHOLE PLANT-Color-Dark Green |
| 12482922 | 35S | ME02587-04 | YES | J13 | [NULL] | 1.10 | WHOLE PLANT-Size-Small |
| 12482922 | 35S | ME02587-04 | YES | M13 | [NULL] | 1.10 | INFLORESCENCE-Flowering Time-Late Flowering |
| 12482922 | 35S | ME02587-05 | YES | I22 | [NULL] | 1.08 | ROSETTE LEAVES-Shape-Serrate |
| 12482922 | 35S | ME02587-05 | YES | I31 | [NULL] | 1.08 | ROSETTE LEAVES-Other |
| 12482922 | 35S | ME02587-05 | YES | J01 | [NULL] | 1.08 | WHOLE PLANT-Color-Dark Green |
| 12482922 | 35S | ME02587-05 | YES | J13 | [NULL] | 1.08 | WHOLE PLANT-Size-Small |
| 12482922 | 35S | ME02587-05 | YES | M13 | [NULL] | 1.08 | INFLORESCENCE-Flowering Time-Late Flowering |
| 12482922 | 35S | ME02587-06 | YES | P04 | [NULL] | 6.30 | FERTILITY-Fertility-Reduced |
| 12482922 | 35S | ME02587-07 | YES | P04 | [NULL] | 6.30 | FERTILITY-Fertility-Reduced |
| 12482922 | 35S | ME02587-08 | NO | [NULL] | [NULL] | [NULL] | [NULL] |
| 12482922 | 35S | ME02587-09 | NO | [NULL] | [NULL] | [NULL] | [NULL] |
| 12482922 | 35S | ME02587-10 | NO | [NULL] | [NULL] | [NULL] | [NULL] |
| 12558789 | 34414F | ME09382-01 | [NULL] | [NULL] | [NULL] | [NULL] | [NULL] |
| 12558789 | 34414F | ME09382-02 | [NULL] | [NULL] | [NULL] | [NULL] | [NULL] |
| 12558789 | 34414F | ME09382-03 | [NULL] | [NULL] | [NULL] | [NULL] | [NULL] |
| 12558789 | 34414F | ME09382-04 | [NULL] | [NULL] | [NULL] | [NULL] | [NULL] |
| 12558789 | 34414F | ME09382-05 | [NULL] | [NULL] | [NULL] | [NULL] | [NULL] |
| 12558789 | 34414F | ME09382-06 | [NULL] | [NULL] | [NULL] | [NULL] | [NULL] |
| 12558789 | 34414F | ME09382-07 | [NULL] | [NULL] | [NULL] | [NULL] | [NULL] |
| 12558789 | 34414F | ME09382-08 | [NULL] | [NULL] | [NULL] | [NULL] | [NULL] |
| 12558789 | 34414F | ME09382-09 | [NULL] | [NULL] | [NULL] | [NULL] | [NULL] |
| 12558789 | 34414F | ME09382-10 | [NULL] | [NULL] | [NULL] | [NULL] | [NULL] |
| 12558789 | 35S | ME04754-01 | YES | I20 | [NULL] | 6.10 | ROSETTE LEAVES-Shape-Oval |
| 12558789 | 35S | ME04754-01 | YES | I22 | [NULL] | 6.10 | ROSETTE LEAVES-Shape-Serrate |
| 12558789 | 35S | ME04754-01 | YES | J01 | [NULL] | 5.10 | WHOLE PLANT-Color-Dark Green |
| 12558789 | 35S | ME04754-01 | YES | J02 | [NULL] | 5.10 | WHOLE PLANT-Color-High Anthocyanin |
| 12558789 | 35S | ME04754-01 | YES | J13 | [NULL] | 5.10 | WHOLE PLANT-Size-Small |
| 12558789 | 35S | ME04754-01 | YES | J13 | [NULL] | 6.10 | WHOLE PLANT-Size-Small |
| 12558789 | 35S | ME04754-01 | YES | M14 | [NULL] | 6.10 | INFLORESCENCE-Height-Short |
| 12558789 | 35S | ME04754-02 | YES | I20 | [NULL] | 1.04 | ROSETTE LEAVES-Shape-Oval |
| 12558789 | 35S | ME04754-02 | YES | J01 | [NULL] | 5.10 | WHOLE PLANT-Color-Dark Green |
| 12558789 | 35S | ME04754-02 | YES | J02 | [NULL] | 5.10 | WHOLE PLANT-Color-High Anthocyanin |
| 12558789 | 35S | ME04754-02 | YES | J13 | [NULL] | 1.04 | WHOLE PLANT-Size-Small |
| 12558789 | 35S | ME04754-02 | YES | J13 | [NULL] | 5.10 | WHOLE PLANT-Size-Small |
| 12558789 | 35S | ME04754-02 | YES | M13 | [NULL] | 1.04 | INFLORESCENCE-Flowering Time-Late Flowering |
| 12558789 | 35S | ME04754-03 | YES | I20 | [NULL] | 1.08 | ROSETTE LEAVES-Shape-Oval |
| 12558789 | 35S | ME04754-03 | YES | J13 | [NULL] | 1.08 | WHOLE PLANT-Size-Small |
| 12558789 | 35S | ME04754-03 | YES | M13 | [NULL] | 1.08 | INFLORESCENCE-Flowering Time-Late Flowering |
| 12558789 | 35S | ME04754-04 | NO | [NULL] | [NULL] | [NULL] | [NULL] |
| 12558789 | 35S | ME04754-05 | YES | I05 | [NULL] | 6.10 | ROSETTE LEAVES-Curled-Curled 3 |
| 12558789 | 35S | ME04754-05 | YES | J01 | [NULL] | 5.10 | WHOLE PLANT-Color-Dark Green |
| 12558789 | 35S | ME04754-05 | YES | J13 | [NULL] | 5.10 | WHOLE PLANT-Size-Small |
| 12558789 | 35S | ME04754-05 | YES | J13 | [NULL] | 6.10 | WHOLE PLANT-Size-Small |
| 12558789 | 35S | ME04754-05 | YES | M14 | [NULL] | 6.10 | INFLORESCENCE-Height-Short |
| 12558789 | 35S | ME04754-06 | NO | [NULL] | [NULL] | [NULL] | [NULL] |
| 12558789 | 35S | ME04754-07 | YES | I05 | [NULL] | 6.10 | ROSETTE LEAVES-Curled-Curled 3 |
| 12558789 | 35S | ME04754-07 | YES | J01 | [NULL] | 5.10 | WHOLE PLANT-Color-Dark Green |
| 12558789 | 35S | ME04754-07 | YES | J13 | [NULL] | 5.10 | WHOLE PLANT-Size-Small |
| 12558789 | 35S | ME04754-07 | YES | J13 | [NULL] | 6.10 | WHOLE PLANT-Size-Small |
| 12558789 | 35S | ME04754-07 | YES | M14 | [NULL] | 6.10 | INFLORESCENCE-Height-Short |
| 12558789 | 35S | ME04754-08 | YES | I05 | [NULL] | 6.10 | ROSETTE LEAVES-Curled-Curled 3 |
| 12558789 | 35S | ME04754-08 | YES | J01 | [NULL] | 5.10 | WHOLE PLANT-Color-Dark Green |
| 12558789 | 35S | ME04754-08 | YES | J13 | [NULL] | 5.10 | WHOLE PLANT-Size-Small |
| 12558789 | 35S | ME04754-08 | YES | J13 | [NULL] | 6.10 | WHOLE PLANT-Size-Small |
| 12558789 | 35S | ME04754-08 | YES | M14 | [NULL] | 6.10 | INFLORESCENCE-Height-Short |
| 12559599 | 35S | ME04788-01 | NO | [NULL] | [NULL] | [NULL] | [NULL] |
| 12559599 | 35S | ME04788-02 | NO | [NULL] | [NULL] | [NULL] | [NULL] |
| 12559599 | 35S | ME04788-03 | YES | I18 | [NULL] | 5.10 | ROSETTE LEAVES-Shape-Lanceolate |
| 12559599 | 35S | ME04788-03 | YES | I22 | [NULL] | 5.10 | ROSETTE LEAVES-Shape-Serrate |
| 12559599 | 35S | ME04788-04 | YES | I22 | [NULL] | 5.10 | ROSETTE LEAVES-Shape-Serrate |
| 12559599 | 35S | ME04788-05 | YES | I22 | [NULL] | 5.10 | ROSETTE LEAVES-Shape-Serrate |
| 12559599 | 35S | ME04788-06 | NO | [NULL] | [NULL] | [NULL] | [NULL] |
| 12559599 | 35S | ME04788-07 | NO | [NULL] | [NULL] | [NULL] | [NULL] |
| 12559599 | 35S | ME04788-08 | NO | [NULL] | [NULL] | [NULL] | [NULL] |
| 12559599 | 35S | ME04788-09 | NO | [NULL] | [NULL] | [NULL] | [NULL] |
| 12559599 | 35S | ME04788-10 | NO | [NULL] | [NULL] | [NULL] | [NULL] |
| 12561836 | 35S | ME03953-01 | YES | I30 | [NULL] | 6.50 | ROSETTE LEAVES-Wax-Glossy |
| 12561836 | 35S | ME03953-01 | YES | J13 | [NULL] | 6.50 | WHOLE PLANT-Size-Small |
| 12561836 | 35S | ME03953-02 | NO | [NULL] | [NULL] | [NULL] | [NULL] |
| 12561836 | 35S | ME03953-03 | YES | I30 | [NULL] | 6.50 | ROSETTE LEAVES-Wax-Glossy |
| 12561836 | 35S | ME03953-03 | YES | J13 | [NULL] | 6.50 | WHOLE PLANT-Size-Small |
| 12561836 | 35S | ME03953-04 | NO | [NULL] | [NULL] | [NULL] | [NULL] |
| 12561836 | 35S | ME06604-01 | NO | [NULL] | [NULL] | [NULL] | [NULL] |
| 12561836 | 35S | ME06604-02 | NO | [NULL] | [NULL] | [NULL] | [NULL] |
| 12561836 | 35S | ME06604-03 | NO | [NULL] | [NULL] | [NULL] | [NULL] |
| 12561836 | 35S | ME06604-04 | NO | [NULL] | [NULL] | [NULL] | [NULL] |
| 12561836 | 35S | ME06604-05 | NO | [NULL] | [NULL] | [NULL] | [NULL] |
| 12561836 | 35S | ME06604-06 | NO | [NULL] | [NULL] | [NULL] | [NULL] |
| 12561836 | 35S | ME06604-07 | NO | [NULL] | [NULL] | [NULL] | [NULL] |
| 12561836 | 35S | ME06604-08 | NO | [NULL] | [NULL] | [NULL] | [NULL] |
| 12561836 | 35S | ME06604-09 | NO | [NULL] | [NULL] | [NULL] | [NULL] |
| 12561836 | 35S | ME06604-10 | NO | [NULL] | [NULL] | [NULL] | [NULL] |
| 12562322 | 35S | ME04749-01 | YES | I31 | [NULL] | 6.30 | ROSETTE LEAVES-Other |
| 12562322 | 35S | ME04749-01 | YES | J02 | [NULL] | 6.30 | WHOLE PLANT-Color-High Anthocyanin |
| 12562322 | 35S | ME04749-01 | YES | J13 | [NULL] | 6.30 | WHOLE PLANT-Size-Small |
| 12562322 | 35S | ME04749-01 | YES | M14 | [NULL] | 6.30 | INFLORESCENCE-Height-Short |
| 12562322 | 35S | ME04749-02 | YES | I31 | [NULL] | 6.50 | ROSETTE LEAVES-Other |
| 12562322 | 35S | ME04749-02 | YES | J13 | [NULL] | 6.50 | WHOLE PLANT-Size-Small |
| 12562322 | 35S | ME04749-03 | NO | [NULL] | [NULL] | [NULL] | [NULL] |
| 12562322 | 35S | ME04749-04 | YES | I31 | [NULL] | 6.30 | ROSETTE LEAVES-Other |
| 12562322 | 35S | ME04749-04 | YES | J02 | [NULL] | 6.30 | WHOLE PLANT-Color-High Anthocyanin |
| 12562322 | 35S | ME04749-04 | YES | J13 | [NULL] | 6.30 | WHOLE PLANT-Size-Small |
| 12562322 | 35S | ME04749-04 | YES | M14 | [NULL] | 6.30 | INFLORESCENCE-Height-Short |
| 12562322 | 35S | ME04749-05 | NO | [NULL] | [NULL] | [NULL] | [NULL] |
| 12562322 | 35S | ME04749-06 | NO | [NULL] | [NULL] | [NULL] | [NULL] |
| 12562322 | 35S | ME04749-07 | NO | [NULL] | [NULL] | [NULL] | [NULL] |
| 12562322 | 35S | ME04749-08 | NO | [NULL] | [NULL] | [NULL] | [NULL] |
| 12562322 | 35S | ME04749-09 | NO | [NULL] | [NULL] | [NULL] | [NULL] |
| 12562371 | 35S | ME04888-01 | YES | I22 | [NULL] | 1.06 | ROSETTE LEAVES-Shape-Serrate |
| 12562371 | 35S | ME04888-01 | YES | I22 | [NULL] | 5.10 | ROSETTE LEAVES-Shape-Serrate |
| 12562371 | 35S | ME04888-01 | YES | J14 | [NULL] | 1.06 | WHOLE PLANT-Other |
| 12562371 | 35S | ME04888-01 | YES | M13 | [NULL] | 5.10 | INFLORESCENCE-Flowering Time-Late Flowering |
| 12562371 | 35S | ME04888-01 | YES | M14 | [NULL] | 5.10 | INFLORESCENCE-Height-Short |
| 12562371 | 35S | ME04888-02 | NO | [NULL] | [NULL] | [NULL] | [NULL] |
| 12562371 | 35S | ME04888-03 | NO | [NULL] | [NULL] | [NULL] | [NULL] |
| 12562371 | 35S | ME04888-04 | NO | [NULL] | [NULL] | [NULL] | [NULL] |
| 12562371 | 35S | ME04888-05 | NO | [NULL] | [NULL] | [NULL] | [NULL] |
| 12562371 | 35S | ME04888-06 | YES | I22 | [NULL] | 1.06 | ROSETTE LEAVES-Shape-Serrate |
| 12562371 | 35S | ME04888-06 | YES | J14 | [NULL] | 1.06 | WHOLE PLANT-Other |
| 12562371 | 35S | ME04888-07 | YES | I22 | [NULL] | 1.06 | ROSETTE LEAVES-Shape-Serrate |
| 12562371 | 35S | ME04888-07 | YES | I31 | [NULL] | 5.10 | ROSETTE LEAVES-Other |
| 12562371 | 35S | ME04888-07 | YES | J13 | [NULL] | 1.06 | WHOLE PLANT-Size-Small |
| 12562371 | 35S | ME04888-07 | YES | J13 | [NULL] | 5.10 | WHOLE PLANT-Size-Small |
| 12562371 | 35S | ME04888-07 | YES | J14 | [NULL] | 1.06 | WHOLE PLANT-Other |
| 12562371 | 35S | ME04888-07 | YES | M13 | [NULL] | 5.10 | INFLORESCENCE-Flowering Time-Late Flowering |
| 12562371 | 35S | ME04888-07 | YES | M14 | [NULL] | 5.10 | INFLORESCENCE-Height-Short |
| 12562371 | 35S | ME04888-07 | YES | M20 | [NULL] | 5.10 | INFLORESCENCE-Strength-Weak |
| 12562371 | 35S | ME04888-08 | NO | [NULL] | [NULL] | [NULL] | [NULL] |
| 12562371 | 35S | ME04888-09 | NO | [NULL] | [NULL] | [NULL] | [NULL] |
| 12562371 | 35S | ME04888-10 | YES | I22 | [NULL] | 1.06 | ROSETTE LEAVES-Shape-Serrate |
| 12562371 | 35S | ME04888-10 | YES | J13 | [NULL] | 1.06 | WHOLE PLANT-Size-Small |
| 12562371 | 35S | ME04888-10 | YES | J14 | [NULL] | 1.06 | WHOLE PLANT-Other |
| 12562371 | 35S | ME06912-01 | YES | J04 | [NULL] | 6.50 | WHOLE PLANT-Color-Yellow-Green Viable 2 |
| 12562371 | 35S | ME06912-01 | YES | J13 | [NULL] | 6.50 | WHOLE PLANT-Size-Small |
| 12562371 | 35S | ME06912-02 | NO | [NULL] | [NULL] | [NULL] | [NULL] |
| 12562371 | 35S | ME06912-03 | YES | I22 | [NULL] | 6.50 | ROSETTE LEAVES-Shape-Serrate |
| 12562371 | 35S | ME06912-03 | YES | J04 | [NULL] | 6.50 | WHOLE PLANT-Color-Yellow-Green Viable 2 |
| 12562371 | 35S | ME06912-03 | YES | J13 | [NULL] | 6.50 | WHOLE PLANT-Size-Small |
| 12562371 | 35S | ME06912-04 | YES | J13 | [NULL] | 6.50 | WHOLE PLANT-Size-Small |
| 12562371 | 35S | ME06912-05 | YES | J05 | [NULL] | 6.50 | WHOLE PLANT-Color-Yellow-Green Viable 3 |
| 12562371 | 35S | ME06912-05 | YES | J13 | [NULL] | 6.50 | WHOLE PLANT-Size-Small |
| 12562371 | 35S | ME06912-06 | NO | [NULL] | [NULL] | [NULL] | [NULL] |
| 12562371 | 35S | ME06912-07 | NO | [NULL] | [NULL] | [NULL] | [NULL] |
| 12562371 | 35S | ME06912-08 | NO | [NULL] | [NULL] | [NULL] | [NULL] |
| 12562371 | 35S | ME06912-09 | NO | [NULL] | [NULL] | [NULL] | [NULL] |
| 12562371 | 35S | ME06912-10 | NO | [NULL] | [NULL] | [NULL] | [NULL] |
| 12579436 | 35S | ME05091-01 | YES | J13 | [NULL] | 6.50 | WHOLE PLANT-Size-Small |
| 12579436 | 35S | ME05091-02 | YES | J13 | [NULL] | 6.50 | WHOLE PLANT-Size-Small |
| 12579436 | 35S | ME05091-03 | YES | I31 | [NULL] | 6.30 | ROSETTE LEAVES-Other |
| 12579436 | 35S | ME05091-03 | YES | J14 | [NULL] | 6.30 | WHOLE PLANT-Other |
| 12579436 | 35S | ME05091-03 | YES | M14 | [NULL] | 6.30 | INFLORESCENCE-Height-Short |
| 12579436 | 35S | ME05091-03 | YES | M25 | [NULL] | 6.30 | INFLORESCENCE-Other |
| 12579436 | 35S | ME05091-04 | YES | I22 | [NULL] | 6.10 | ROSETTE LEAVES-Shape-Serrate |
| 12579436 | 35S | ME05091-04 | YES | I31 | [NULL] | 6.10 | ROSETTE LEAVES-Other |
| 12579436 | 35S | ME05091-04 | YES | M13 | [NULL] | 6.10 | INFLORESCENCE-Flowering Time-Late Flowering |
| 12579436 | 35S | ME05091-05 | YES | J13 | [NULL] | 6.50 | WHOLE PLANT-Size-Small |
| 12579436 | 35S | ME05091-06 | NO | [NULL] | [NULL] | [NULL] | [NULL] |
| 12579436 | 35S | ME05091-07 | NO | [NULL] | [NULL] | [NULL] | [NULL] |
| 12579436 | 35S | ME05091-08 | NO | [NULL] | [NULL] | [NULL] | [NULL] |
| 12579436 | 35S | ME05091-09 | NO | [NULL] | [NULL] | [NULL] | [NULL] |
| 12579436 | 35S | ME05091-10 | NO | [NULL] | [NULL] | [NULL] | [NULL] |
| 12579859 | 35S | ME02877-01 | NO | [NULL] | [NULL] | [NULL] | [NULL] |
| 12579859 | 35S | ME02877-02 | YES | I18 | [NULL] | 6.30 | ROSETTE LEAVES-Shape-Lanceolate |
| 12579859 | 35S | ME02877-03 | YES | I18 | [NULL] | 6.10 | ROSETTE LEAVES-Shape-Lanceolate |
| 12579859 | 35S | ME02877-03 | YES | J13 | [NULL] | 6.10 | WHOLE PLANT-Size-Small |
| 12579859 | 35S | ME02877-04 | NO | [NULL] | [NULL] | [NULL] | [NULL] |
| 12579859 | 35S | ME02877-05 | NO | [NULL] | [NULL] | [NULL] | [NULL] |
| 12579859 | 35S | ME02877-06 | YES | I14 | [NULL] | 6.10 | ROSETTE LEAVES-Petiole Length-Short Petioles |
| 12579859 | 35S | ME02877-06 | YES | K23 | [NULL] | 6.10 | CAULINE LEAVES-Size-Large |
| 12579859 | 35S | ME02877-06 | YES | L09 | [NULL] | 6.10 | FLOWERS-Size-Large |
| 12579859 | 35S | ME02877-06 | YES | L11 | [NULL] | 6.10 | FLOWERS-Other |
| 12579859 | 35S | ME02877-06 | YES | M25 | [NULL] | 6.10 | INFLORESCENCE-Other |
| 12579859 | 35S | ME02877-07 | NO | [NULL] | [NULL] | [NULL] | [NULL] |
| 12579859 | 35S | ME02877-08 | NO | [NULL] | [NULL] | [NULL] | [NULL] |
| 12579859 | 35S | ME02877-09 | NO | [NULL] | [NULL] | [NULL] | [NULL] |
| 12579859 | 35S | ME02877-10 | NO | [NULL] | [NULL] | [NULL] | [NULL] |
| 12595094 | 35S | ME05153-01 | QUESTIONABLE | J13 | [NULL] | 6.10 | WHOLE PLANT-Size-Small |
| 12595094 | 35S | ME05153-02 | NO | [NULL] | [NULL] | [NULL] | [NULL] |
| 12595094 | 35S | ME05153-03 | YES | I08 | [NULL] | 6.10 | ROSETTE LEAVES-Disorganized Rosette- |
| | | | | | | | Disorganized Rosette |
| 12595094 | 35S | ME05153-03 | YES | I31 | [NULL] | 6.10 | ROSETTE LEAVES-Other |
| 12595094 | 35S | ME05153-03 | YES | J13 | [NULL] | 6.10 | WHOLE PLANT-Size-Small |
| 12595094 | 35S | ME05153-03 | YES | N07 | [NULL] | 6.10 | SILIQUES-Other |
| 12595094 | 35S | ME05153-03 | YES | P04 | [NULL] | 6.10 | FERTILITY-Fertility-Reduced |
| 12595094 | 35S | ME05153-04 | YES | J13 | [NULL] | 6.10 | WHOLE PLANT-Size-Small |
| 12595094 | 35S | ME05153-04 | YES | N07 | [NULL] | 6.10 | SILIQUES-Other |
| 12595094 | 35S | ME05153-05 | YES | J13 | [NULL] | 6.10 | WHOLE PLANT-Size-Small |
| 12595094 | 35S | ME05153-05 | YES | M25 | [NULL] | 6.10 | INFLORESCENCE-Other |
| 12595094 | 35S | ME05153-06 | NO | [NULL] | [NULL] | [NULL] | [NULL] |
| 12595094 | 35S | ME05153-07 | NO | [NULL] | [NULL] | [NULL] | [NULL] |
| 12595094 | 35S | ME05153-08 | YES | N07 | [NULL] | 6.10 | SILIQUES-Other |
| 12595094 | 35S | ME05153-09 | NO | [NULL] | [NULL] | [NULL] | [NULL] |
| 12595094 | 35S | ME05153-10 | NO | [NULL] | [NULL] | [NULL] | [NULL] |
| 12601407 | 35S | ME05687-01 | NO | [NULL] | [NULL] | [NULL] | [NULL] |
| 12601407 | 35S | ME05687-02 | NO | [NULL] | [NULL] | [NULL] | [NULL] |
| 12601407 | 35S | ME05687-03 | NO | [NULL] | [NULL] | [NULL] | [NULL] |
| 12601407 | 35S | ME05687-04 | NO | [NULL] | [NULL] | [NULL] | [NULL] |
| 12601407 | 35S | ME05687-05 | NO | [NULL] | [NULL] | [NULL] | [NULL] |
| 12601407 | 35S | ME05687-06 | YES | I14 | [NULL] | 1.09 | ROSETTE LEAVES-Petiole Length-Short Petioles |
| 12601407 | 35S | ME05687-06 | YES | I22 | [NULL] | 1.09 | ROSETTE LEAVES-Shape-Serrate |
| 12601407 | 35S | ME05687-06 | YES | J13 | [NULL] | 1.09 | WHOLE PLANT-Size-Small |
| 12601407 | 35S | ME05687-06 | YES | J14 | [NULL] | 1.09 | WHOLE PLANT-Other |
| 12601407 | 35S | ME05687-07 | NO | [NULL] | [NULL] | [NULL] | [NULL] |
| 12601407 | 35S | ME05687-08 | YES | I14 | [NULL] | 1.09 | ROSETTE LEAVES-Petiole Length-Short Petioles |
| 12601407 | 35S | ME05687-08 | YES | I22 | [NULL] | 1.09 | ROSETTE LEAVES-Shape-Serrate |
| 12601407 | 35S | ME05687-08 | YES | J13 | [NULL] | 1.09 | WHOLE PLANT-Size-Small |
| 12601407 | 35S | ME05687-08 | YES | J14 | [NULL] | 1.09 | WHOLE PLANT-Other |
| 12601407 | 35S | ME05687-08 | YES | M13 | [NULL] | 1.09 | INFLORESCENCE-Flowering Time-Late Flowering |
| 12601407 | 35S | ME05687-09 | YES | I14 | [NULL] | 5.10 | ROSETTE LEAVES-Petiole Length-Short Petioles |
| 12601407 | 35S | ME05687-09 | YES | I22 | [NULL] | 5.10 | ROSETTE LEAVES-Shape-Serrate |
| 12601407 | 35S | ME05687-09 | YES | J13 | [NULL] | 5.10 | WHOLE PLANT-Size-Small |
| 12601407 | 35S | ME05687-09 | YES | J14 | [NULL] | 5.10 | WHOLE PLANT-Other |
| 12601407 | 35S | ME05687-09 | YES | M13 | [NULL] | 6.00 | INFLORESCENCE-Flowering Time-Late Flowering |
| 12601407 | 35S | ME05687-10 | NO | [NULL] | [NULL] | [NULL] | [NULL] |
| 12602447 | 35S | ME05502-01 | NO | [NULL] | [NULL] | [NULL] | [NULL] |
| 12602447 | 35S | ME05502-02 | YES | J03 | [NULL] | 6.50 | WHOLE PLANT-Color-Yellow-Green Viable 1 |
| 12602447 | 35S | ME05502-02 | YES | K24 | [NULL] | 6.50 | CAULINE LEAVES-Size-Small |
| 12602447 | 35S | ME05502-03 | NO | [NULL] | [NULL] | [NULL] | [NULL] |
| 12602447 | 35S | ME05502-04 | YES | J03 | [NULL] | 6.50 | WHOLE PLANT-Color-Yellow-Green Viable 1 |
| 12602447 | 35S | ME05502-04 | YES | K24 | [NULL] | 6.50 | CAULINE LEAVES-Size-Small |
| 12602447 | 35S | ME05502-05 | YES | J03 | [NULL] | 6.50 | WHOLE PLANT-Color-Yellow-Green Viable 1 |
| 12602447 | 35S | ME05502-05 | YES | K24 | [NULL] | 6.50 | CAULINE LEAVES-Size-Small |
| 12602447 | 35S | ME05502-06 | NO | [NULL] | [NULL] | [NULL] | [NULL] |
| 12602447 | 35S | ME05502-07 | NO | [NULL] | [NULL] | [NULL] | [NULL] |
| 12602447 | 35S | ME05502-08 | NO | [NULL] | [NULL] | [NULL] | [NULL] |
| 12602447 | 35S | ME05502-09 | YES | J03 | [NULL] | 6.50 | WHOLE PLANT-Color-Yellow-Green Viable 1 |
| 12602447 | 35S | ME05502-09 | YES | K24 | [NULL] | 6.50 | CAULINE LEAVES-Size-Small |
| 12602447 | 35S | ME05502-10 | YES | J03 | [NULL] | 6.50 | WHOLE PLANT-Color-Yellow-Green Viable 1 |
| 12602447 | 35S | ME05502-10 | YES | K24 | [NULL] | 6.50 | CAULINE LEAVES-Size-Small |
| 12602447 | 35S | ME05502-10 | YES | P04 | [NULL] | 6.50 | FERTILITY-Fertility-Reduced |
| 12651668 | 35S | ME04181-01 | NO | [NULL] | [NULL] | [NULL] | [NULL] |
| 12651668 | 35S | ME04181-02 | YES | J01 | [NULL] | 6.50 | WHOLE PLANT-Color-Dark Green |
| 12651668 | 35S | ME04181-02 | YES | J12 | [NULL] | 6.50 | WHOLE PLANT-Size-Large |
| 12651668 | 35S | ME04181-02 | YES | M15 | [NULL] | 6.50 | INFLORESCENCE-Height-Tall |
| 12651668 | 35S | ME04181-02 | YES | P04 | [NULL] | 6.50 | FERTILITY-Fertility-Reduced |
| 12651668 | 35S | ME04181-03 | NO | [NULL] | [NULL] | [NULL] | [NULL] |
| 12651668 | 35S | ME04181-04 | YES | M15 | [NULL] | 6.50 | INFLORESCENCE-Height-Tall |
| 12651668 | 35S | ME04181-04 | YES | M25 | [NULL] | 6.50 | INFLORESCENCE-Other |
| 12651668 | 35S | ME04181-05 | NO | [NULL] | [NULL] | [NULL] | [NULL] |
| 12651668 | 35S | ME04181-06 | NO | [NULL] | [NULL] | [NULL] | [NULL] |
| 12651668 | 35S | ME04181-07 | NO | [NULL] | [NULL] | [NULL] | [NULL] |
| 12651668 | 35S | ME04181-08 | NO | [NULL] | [NULL] | [NULL] | [NULL] |
| 12651668 | 35S | ME04181-09 | YES | J12 | [NULL] | 6.50 | WHOLE PLANT-Size-Large |
| 12651668 | 35S | ME04181-09 | YES | M15 | [NULL] | 6.50 | INFLORESCENCE-Height-Tall |
| 12651668 | 35S | ME04181-10 | YES | J12 | [NULL] | 6.50 | WHOLE PLANT-Size-Large |
| 12651668 | 35S | ME04181-10 | YES | M15 | [NULL] | 6.50 | INFLORESCENCE-Height-Tall |
| 12653898 | 35S | ME04257-01 | YES | I04 | [NULL] | 6.10 | ROSETTE LEAVES-Curled-Curled 2 |
| 12653898 | 35S | ME04257-01 | YES | J13 | [NULL] | 6.10 | WHOLE PLANT-Size-Small |
| 12653898 | 35S | ME04257-01 | YES | J13 | [NULL] | 6.50 | WHOLE PLANT-Size-Small |
| 12653898 | 35S | ME04257-01 | YES | M14 | [NULL] | 6.10 | INFLORESCENCE-Height-Short |
| 12653898 | 35S | ME04257-01 | YES | P04 | [NULL] | 6.50 | FERTILITY-Fertility-Reduced |
| 12653898 | 35S | ME04257-02 | YES | I01 | [NULL] | 5.10 | ROSETTE LEAVES-Curled-Corkscrew |
| 12653898 | 35S | ME04257-02 | YES | I31 | [NULL] | 5.10 | ROSETTE LEAVES-Other |
| 12653898 | 35S | ME04257-02 | YES | J13 | [NULL] | 5.10 | WHOLE PLANT-Size-Small |
| 12653898 | 35S | ME04257-02 | YES | J13 | [NULL] | 6.50 | WHOLE PLANT-Size-Small |
| 12653898. | 35S | ME04257-02 | YES | K04 | [NULL] | 6.50 | CAULINE LEAVES-Curled-Curled 2 |
| 12653898 | 35S | ME04257-02 | YES | M13 | [NULL] | 5.10 | INFLORESCENCE-Flowering Time-Late Flowering |
| 12653898 | 35S | ME04257-02 | YES | M14 | [NULL] | 5.10 | INFLORESCENCE-Height-Short |
| 12653898 | 35S | ME04257-02 | YES | P05 | [NULL] | 6.50 | FERTILITY-Fertility-Sterile |
| 12653898 | 35S | ME04257-03 | NO | [NULL] | [NULL] | [NULL] | [NULL] |
| 12653898 | 35S | ME04257-04 | NO | [NULL] | [NULL] | [NULL] | [NULL] |
| 12653898 | 35S | ME04257-05 | NO | [NULL] | [NULL] | [NULL] | [NULL] |
| 12653898 | 35S | ME04257-06 | YES | I04 | [NULL] | 5.10 | ROSETTE LEAVES-Curled-Curled 2 |
| 12653898 | 35S | ME04257-06 | YES | I22 | [NULL] | 5.10 | ROSETTE LEAVES-Shape-Serrate |
| 12653898 | 35S | ME04257-06 | YES | I31 | [NULL] | 6.30 | ROSETTE LEAVES-Other |
| 12653898 | 35S | ME04257-06 | YES | J01 | [NULL] | 5.10 | WHOLE PLANT-Color-Dark Green |
| 12653898 | 35S | ME04257-06 | YES | J01 | [NULL] | 6.30 | WHOLE PLANT-Color-Dark Green |
| 12653898 | 35S | ME04257-06 | YES | J13 | [NULL] | 5.10 | WHOLE PLANT-Size-Small |
| 12653898 | 35S | ME04257-06 | YES | J13 | [NULL] | 6.30 | WHOLE PLANT-Size-Small |
| 12653898 | 35S | ME04257-06 | YES | M13 | [NULL] | 5.10 | INFLORESCENCE-Flowering Time-Late Flowering |
| 12653898 | 35S | ME04257-06 | YES | M14 | [NULL] | 5.10 | INFLORESCENCE-Height-Short |
| 12653898 | 35S | ME04257-06 | YES | P05 | [NULL] | 6.30 | FERTILITY-Fertility-Sterile |
| 12653898 | 35S | ME04257-07 | NO | [NULL] | [NULL] | [NULL] | [NULL] |
| 12653898 | 35S | ME04257-08 | NO | [NULL] | [NULL] | [NULL] | [NULL] |
| 12653898 | 35S | ME04257-09 | NO | [NULL] | [NULL] | [NULL] | [NULL] |
| 12653898 | 35S | ME04257-10 | NO | [NULL] | [NULL] | [NULL] | [NULL] |
| 12661399 | 35S | ME05979-01 | NO | [NULL] | [NULL] | [NULL] | [NULL] |
| 12661399 | 35S | ME05979-02 | YES | J01 | [NULL] | 1.04 | WHOLE PLANT-Color-Dark Green |
| 12661399 | 35S | ME05979-03 | YES | I18 | [NULL] | 1.06 | ROSETTE LEAVES-Shape-Lanceolate |
| 12661399 | 35S | ME05979-03 | YES | J01 | [NULL] | 1.06 | WHOLE PLANT-Color-Dark Green |
| 12661399 | 35S | ME05979-04 | YES | I18 | [NULL] | 1.06 | ROSETTE LEAVES-Shape-Lanceolate |
| 12661399 | 35S | ME05979-04 | YES | J01 | [NULL] | 1.06 | WHOLE PLANT-Color-Dark Green |
| 12661399 | 35S | ME05979-05 | YES | I18 | [NULL] | 1.06 | ROSETTE LEAVES-Shape-Lanceolate |
| 12661399 | 35S | ME05979-05 | YES | J01 | [NULL] | 1.06 | WHOLE PLANT-Color-Dark Green |
| 12661399 | 35S | ME05979-06 | YES | I18 | [NULL] | 1.06 | ROSETTE LEAVES-Shape-Lanceolate |
| 12661399 | 35S | ME05979-06 | YES | J01 | [NULL] | 1.06 | WHOLE PLANT-Color-Dark Green |
| 12661399 | 35S | ME05979-07 | NO | [NULL] | [NULL] | [NULL] | [NULL] |
| 12661399 | 35S | ME05979-08 | YES | I18 | [NULL] | 1.07 | ROSETTE LEAVES-Shape-Lanceolate |
| 12661399 | 35S | ME05979-08 | YES | J01 | [NULL] | 1.07 | WHOLE PLANT-Color-Dark Green |
| 12661399 | 35S | ME05979-09 | YES | I18 | [NULL] | 1.06 | ROSETTE LEAVES-Shape-Lanceolate |
| 12661399 | 35S | ME05979-09 | YES | J01 | [NULL] | 1.06 | WHOLE PLANT-Color-Dark Green |
| 12661399 | 35S | ME05979-10 | NO | [NULL] | [NULL] | [NULL] | [NULL] |
| 12727312 | 35S | ME04065-01 | YES | J13 | [NULL] | 6.50 | WHOLE PLANT-Size-Small |
| 12727312 | 35S | ME04065-01 | YES | P05 | [NULL] | 6.50 | FERTILITY-Fertility-Sterile |
| 12727312 | 35S | ME04065-01 | YES | R02 | [NULL] | 6.50 | SENESCENCE TIME-Senescence Time-Late Senescence |
| 12727312 | 35S | ME04065-02 | NO | [NULL] | [NULL] | [NULL] | [NULL] |
| 12727312 | 35S | ME04065-03 | YES | J13 | [NULL] | 6.50 | WHOLE PLANT-Size-Small |
| 12727312 | 35S | ME04065-03 | YES | M14 | [NULL] | 6.50 | INFLORESCENCE-Height-Short |
| 12727312 | 35S | ME04065-03 | YES | P05 | [NULL] | 6.50 | FERTILITY-Fertility-Sterile |
| 12727312 | 35S | ME04065-04 | YES | J13 | [NULL] | 6.50 | WHOLE PLANT-Size-Small |
| 12727312 | 35S | ME04065-04 | YES | P04 | [NULL] | 6.50 | FERTILITY-Fertility-Reduced |
| 12727312 | 35S | ME04065-04 | YES | R02 | [NULL] | 6.50 | SENESCENCE TIME-Senescence Time-Late Senescence |
| 12727312 | 35S | ME04065-05 | YES | N05 | [NULL] | 6.50 | SILIQUES-Shape-Clubbed |
| 12727312 | 35S | ME04065-05 | YES | R02 | [NULL] | 6.50 | SENESCENCE TIME-Senescence Time-Late Senescence |
| 12727312 | 35S | ME04065-06 | NO | [NULL] | [NULL] | [NULL] | [NULL] |
| 12727312 | 35S | ME04065-07 | NO | [NULL] | [NULL] | [NULL] | [NULL] |
| 12727312 | 35S | ME04065-08 | YES | J13 | [NULL] | 6.90 | WHOLE PLANT-Size-Small |
| 12727312 | 35S | ME04065-08 | YES | P05 | [NULL] | 6.90 | FERTILITY-Fertility-Sterile |
| 12727312 | 35S | ME04065-08 | YES | R02 | [NULL] | 6.90 | SENESCENCE TIME-Senescence Time-Late Senescence |
| 12727312 | 35S | ME04065-09 | YES | J13 | [NULL] | 6.90 | WHOLE PLANT-Size-Small |
| 12727312 | 35S | ME04065-09 | YES | R02 | [NULL] | 6.90 | SENESCENCE TIME-Senescence Time-Late Senescence |
| 12727312 | 35S | ME04065-10 | YES | J13 | [NULL] | 6.90 | WHOLE PLANT-Size-Small |
| 12727312 | 35S | ME04065-10 | YES | N03 | [NULL] | 6.90 | SILIQUES-Shape-Bent |
| 12727312 | 35S | ME04065-10 | YES | N05 | [NULL] | 6.90 | SILIQUES-Shape-Clubbed |
| 12727312 | 35S | ME04065-10 | YES | P04 | [NULL] | 6.90 | FERTILITY-Fertility-Reduced |
| 12738854 | 13879F | ME04688-01 | YES | I06 | [NULL] | 6.30 | ROSETTE LEAVES-Curled-Curled 4 |
| 12738854 | 13879F | ME04688-01 | YES | I06 | [NULL] | 6.90 | ROSETTE LEAVES-Curled-Curled 4 |
| 12738854 | 13879F | ME04688-01 | YES | J13 | [NULL] | 6.30 | WHOLE PLANT-Size-Small |
| 12738854 | 13879F | ME04688-01 | YES | J13 | [NULL] | 6.90 | WHOLE PLANT-Size-Small |
| 12738854 | 13879F | ME04688-01 | YES | K06 | [NULL] | 6.30 | CAULINE LEAVES-Curled-Curled 4 |
| 12738854 | 13879F | ME04688-01 | YES | N07 | [NULL] | 6.30 | SILIQUES-Other |
| 12738854 | 13879F | ME04688-02 | YES | I05 | [NULL] | 6.30 | ROSETTE LEAVES-Curled-Curled 3 |
| 12738854 | 13879F | ME04688-02 | YES | I05 | [NULL] | 6.90 | ROSETTE LEAVES-Curled-Curled 3 |
| 12738854 | 13879F | ME04688-02 | YES | I31 | [NULL] | 6.30 | ROSETTE LEAVES-Other |
| 12738854 | 13879F | ME04688-02 | YES | J13 | [NULL] | 6.90 | WHOLE PLANT-Size-Small |
| 12738854 | 13879F | ME04688-02 | YES | K05 | [NULL] | 6.30 | CAULINE LEAVES-Curled-Curled 3 |
| 12738854 | 13879F | ME04688-02 | YES | N07 | [NULL] | 6.30 | SILIQUES-Other |
| 12738854 | 13879F | ME04688-02 | YES | P04 | [NULL] | 6.30 | FERTILITY-Fertility-Reduced |
| 12738854 | 13879F | ME04688-03 | YES | I07 | [NULL] | 5.10 | ROSETTE LEAVES-Curled-Curled 5 |
| 12738854 | 13879F | ME04688-03 | YES | I07 | [NULL] | 6.90 | ROSETTE LEAVES-Curled-Curled 5 |
| 12738854 | 13879F | ME04688-03 | YES | J13 | [NULL] | 5.10 | WHOLE PLANT-Size-Small |
| 12738854 | 13879F | ME04688-03 | YES | J13 | [NULL] | 6.90 | WHOLE PLANT-Size-Small |
| 12738854 | 13879F | ME04688-03 | YES | K07 | [NULL] | 5.10 | CAULINE LEAVES-Curled-Curled 5 |
| 12738854 | 13879F | ME04688-03 | YES | M13 | [NULL] | 5.10 | INFLORESCENCE-Flowering Time-Late |
| | | | | | | | Flowering |
| 12738854 | 13879F | ME04688-03 | YES | P04 | [NULL] | 5.10 | FERTILITY-Fertility-Reduced |
| 12738854 | 13879F | ME04688-04 | YES | I07 | [NULL] | 6.00 | ROSETTE LEAVES-Curled-Curled 5 |
| 12738854 | 13879F | ME04688-04 | YES | I07 | [NULL] | 6.90 | ROSETTE LEAVES-Curled-Curled 5 |
| 12738854 | 13879F | ME04688-04 | YES | J13 | [NULL] | 6.00 | WHOLE PLANT-Size-Small |
| 12738854 | 13879F | ME04688-04 | YES | J13 | [NULL] | 6.90 | WHOLE PLANT-Size-Small |
| 12738854 | 13879F | ME04688-04 | YES | K07 | [NULL] | 6.00 | CAULINE LEAVES-Curled-Curled 5 |
| 12738854 | 13879F | ME04688-04 | YES | M13 | [NULL] | 6.00 | INFLORESCENCE-Flowering Time-Late |
| | | | | | | | Flowering |
| 12738854 | 13879F | ME04688-04 | YES | P04 | [NULL] | 6.00 | FERTILITY-Fertility-Reduced |
| 12738854 | 13879F | ME04688-05 | YES | I05 | [NULL] | 6.30 | ROSETTE LEAVES-Curled-Curled 3 |
| 12738854 | 13879F | ME04688-05 | YES | I05 | [NULL] | 6.90 | ROSETTE LEAVES-Curled-Curled 3 |
| 12738854 | 13879F | ME04688-05 | YES | I31 | [NULL] | 6.30 | ROSETTE LEAVES-Other |
| 12738854 | 13879F | ME04688-05 | YES | J13 | [NULL] | 6.90 | WHOLE PLANT-Size-Small |
| 12738854 | 13879F | ME04688-05 | YES | K05 | [NULL] | 6.30 | CAULINE LEAVES-Curled-Curled 3 |
| 12738854 | 13879F | ME04688-05 | YES | N07 | [NULL] | 6.30 | SILIQUES-Other |
| 12738854 | 13879F | ME04688-05 | YES | P04 | [NULL] | 6.30 | FERTILITY-Fertility-Reduced |
| 12738854 | 13879F | ME04688-06 | YES | I05 | [NULL] | 6.30 | ROSETTE LEAVES-Curled-Curled 3 |
| 12738854 | 13879F | ME04688-06 | YES | I05 | [NULL] | 6.90 | ROSETTE LEAVES-Curled-Curled 3 |
| 12738854 | 13879F | ME04688-06 | YES | I31 | [NULL] | 6.30 | ROSETTE LEAVES-Other |
| 12738854 | 13879F | ME04688-06 | YES | J13 | [NULL] | 6.90 | WHOLE PLANT-Size-Small |
| 12738854 | 13879F | ME04688-06 | YES | K05 | [NULL] | 6.30 | CAULINE LEAVES-Curled-Curled 3 |
| 12738854 | 13879F | ME04688-06 | YES | N07 | [NULL] | 6.30 | SILIQUES-Other |
| 12738854 | 13879F | ME04688-06 | YES | P04 | [NULL] | 6.30 | FERTILITY-Fertility-Reduced |
| 12738854 | 13879F | ME04688-07 | YES | I05 | [NULL] | 6.90 | ROSETTE LEAVES-Curled-Curled 3 |
| 12738854 | 13879F | ME04688-07 | YES | I07 | [NULL] | 6.10 | ROSETTE LEAVES-Curled-Curled 5 |
| 12738854 | 13879F | ME04688-07 | YES | J13 | [NULL] | 6.10 | WHOLE PLANT-Size-Small |
| 12738854 | 13879F | ME04688-07 | YES | J13 | [NULL] | 6.90 | WHOLE PLANT-Size-Small |
| 12738854 | 13879F | ME04688-07 | YES | K07 | [NULL] | 6.10 | CAULINE LEAVES-Curled-Curled 5 |
| 12738854 | 13879F | ME04688-07 | YES | M13 | [NULL] | 6.10 | INFLORESCENCE-Flowering Time-Late |
| | | | | | | | Flowering |
| 12738854 | 13879F | ME04688-07 | YES | P04 | [NULL] | 6.10 | FERTILITY-Fertility-Reduced |
| 12738854 | 13879F | ME04688-08 | YES | I05 | [NULL] | 6.30 | ROSETTE LEAVES-Curled-Curled 3 |
| 12738854 | 13879F | ME04688-08 | YES | I05 | [NULL] | 6.90 | ROSETTE LEAVES-Curled-Curled 3 |
| 12738854 | 13879F | ME04688-08 | YES | I31 | [NULL] | 6.30 | ROSETTE LEAVES-Other |
| 12738854 | 13879F | ME04688-08 | YES | J13 | [NULL] | 6.90 | WHOLE PLANT-Size-Small |
| 12738854 | 13879F | ME04688-08 | YES | K05 | [NULL] | 6.30 | CAULINE LEAVES-Curled-Curled 3 |
| 12738854 | 13879F | ME04688-08 | YES | N07 | [NULL] | 6.30 | SILIQUES-Other |
| 12738854 | 13879F | ME04688-08 | YES | P04 | [NULL] | 6.30 | FERTILITY-Fertility-Reduced |
| 12738854 | 13879F | ME04688-09 | YES | I05 | [NULL] | 6.90 | ROSETTE LEAVES-Curled-Curled 3 |
| 12738854 | 13879F | ME04688-09 | YES | I07 | [NULL] | 6.10 | ROSETTE LEAVES-Curled-Curled 5 |
| 12738854 | 13879F | ME04688-09 | YES | J13 | [NULL] | 6.10 | WHOLE PLANT-Size-Small |
| 12738854 | 13879F | ME04688-09 | YES | J13 | [NULL] | 6.90 | WHOLE PLANT-Size-Small |
| 12738854 | 13879F | ME04688-09 | YES | K07 | [NULL] | 6.10 | CAULINE LEAVES-Curled-Curled 5 |
| 12738854 | 13879F | ME04688-09 | YES | M13 | [NULL] | 6.10 | INFLORESCENCE-Flowering Time-Late |
| | | | | | | | Flowering |
| 12738854 | 13879F | ME04688-09 | YES | N07 | [NULL] | 6.10 | SILIQUES-Other |
| 12738854 | 13879F | ME04688-09 | YES | P04 | [NULL] | 6.10 | FERTILITY-Fertility-Reduced |
| 12738854 | 13879F | ME04688-10 | YES | I05 | [NULL] | 6.90 | ROSETTE LEAVES-Curled-Curled 3 |
| 12738854 | 13879F | ME04688-10 | YES | I06 | [NULL] | 6.30 | ROSETTE LEAVES-Curled-Curled 4 |
| 12738854 | 13879F | ME04688-10 | YES | J13 | [NULL] | 6.30 | WHOLE PLANT-Size-Small |
| 12738854 | 13879F | ME04688-10 | YES | J13 | [NULL] | 6.90 | WHOLE PLANT-Size-Small |
| 12738854 | 13879F | ME04688-10 | YES | K06 | [NULL] | 6.30 | CAULINE LEAVES-Curled-Curled 4 |
| 12738854 | 13879F | ME04688-10 | YES | N07 | [NULL] | 6.30 | SILIQUES-Other |
| 12738854 | 15529D | ME04744-01 | NO | [NULL] | [NULL] | [NULL] | [NULL] |
| 12738854 | 15529D | ME04744-02 | NO | [NULL] | [NULL] | [NULL] | [NULL] |
| 12738854 | 15529D | ME04744-03 | NO | [NULL] | [NULL] | [NULL] | [NULL] |
| 12738854 | 15529D | ME04744-04 | NO | [NULL] | [NULL] | [NULL] | [NULL] |
| 12738854 | 15529D | ME04744-05 | NO | [NULL] | [NULL] | [NULL] | [NULL] |
| 12738854 | 15529D | ME04744-06 | NO | [NULL] | [NULL] | [NULL] | [NULL] |
| 12738854 | 15529D | ME04744-07 | NO | [NULL] | [NULL] | [NULL] | [NULL] |
| 12738854 | 15529D | ME04744-08 | NO | [NULL] | [NULL] | [NULL] | [NULL] |
| 12738854 | 15529D | ME04744-09 | NO | [NULL] | [NULL] | [NULL] | [NULL] |
| 12738854 | 15529D | ME04744-10 | NO | [NULL] | [NULL] | [NULL] | [NULL] |
| 12738854 | 15529F | ME05072-01 | YES | I07 | [NULL] | 6.50 | ROSETTE LEAVES-Curled-Curled 5 |
| 12738854 | 15529F | ME05072-01 | YES | J13 | [NULL] | 6.50 | WHOLE PLANT-Size-Small |
| 12738854 | 15529F | ME05072-02 | YES | I07 | [NULL] | 6.50 | ROSETTE LEAVES-Curled-Curled 5 |
| 12738854 | 15529F | ME05072-02 | YES | J13 | [NULL] | 6.50 | WHOLE PLANT-Size-Small |
| 12738854 | 15529F | ME05072-03 | YES | I07 | [NULL] | 6.50 | ROSETTE LEAVES-Curled-Curled 5 |
| 12738854 | 15529F | ME05072-03 | YES | J13 | [NULL] | 6.50 | WHOLE PLANT-Size-Small |
| 12738854 | 15529F | ME05072-03 | YES | P04 | [NULL] | 6.50 | FERTILITY-Fertility-Reduced |
| 12738854 | 15529F | ME05072-04 | YES | I07 | [NULL] | 6.50 | ROSETTE LEAVES-Curled-Curled 5 |
| 12738854 | 15529F | ME05072-04 | YES | J13 | [NULL] | 6.50 | WHOLE PLANT-Size-Small |
| 12738854 | 15529F | ME05072-05 | YES | I07 | [NULL] | 6.50 | ROSETTE LEAVES-Curled-Curled 5 |
| 12738854 | 15529F | ME05072-05 | YES | J13 | [NULL] | 6.50 | WHOLE PLANT-Size-Small |
| 12738854 | 15529F | ME05072-06 | YES | I07 | [NULL] | 6.50 | ROSETTE LEAVES-Curled-Curled 5 |
| 12738854 | 15529F | ME05072-06 | YES | J13 | [NULL] | 6.50 | WHOLE PLANT-Size-Small |
| 12738854 | 15529F | ME05072-06 | YES | P04 | [NULL] | 6.50 | FERTILITY-Fertility-Reduced |
| 12738854 | 15529F | ME05072-07 | YES | I07 | [NULL] | 6.50 | ROSETTE LEAVES-Curled-Curled 5 |
| 12738854 | 15529F | ME05072-07 | YES | J13 | [NULL] | 6.50 | WHOLE PLANT-Size-Small |
| 12738854 | 15529F | ME05072-08 | YES | I07 | [NULL] | 6.50 | ROSETTE LEAVES-Curled-Curled 5 |
| 12738854 | 15529F | ME05072-08 | YES | J13 | [NULL] | 6.50 | WHOLE PLANT-Size-Small |
| 12738854 | 15529F | ME05072-09 | YES | I07 | [NULL] | 6.50 | ROSETTE LEAVES-Curled-Curled 5 |
| 12738854 | 15529F | ME05072-09 | YES | J13 | [NULL] | 6.50 | WHOLE PLANT-Size-Small |
| 12738854 | 15529F | ME05072-10 | YES | I07 | [NULL] | 6.50 | ROSETTE LEAVES-Curled-Curled 5 |
| 12738854 | 15529F | ME05072-10 | YES | J13 | [NULL] | 6.50 | WHOLE PLANT-Size-Small |
| 12738854 | 28716F | ME04734-01 | YES | I07 | [NULL] | 6.10 | ROSETTE LEAVES-Curled-Curled 5 |
| 12738854 | 28716F | ME04734-01 | YES | I07 | [NULL] | 6.90 | ROSETTE LEAVES-Curled-Curled 5 |
| 12738854 | 28716F | ME04734-01 | YES | J13 | [NULL] | 6.10 | WHOLE PLANT-Size-Small |
| 12738854 | 28716F | ME04734-01 | YES | J13 | [NULL] | 6.90 | WHOLE PLANT-Size-Small |
| 12738854 | 28716F | ME04734-01 | YES | K07 | [NULL] | 6.10 | CAULINE LEAVES-Curled-Curled 5 |
| 12738854 | 28716F | ME04734-01 | YES | L11 | [NULL] | 6.10 | FLOWERS-Other |
| 12738854 | 28716F | ME04734-01 | YES | P04 | [NULL] | 6.90 | FERTILITY-Fertility-Reduced |
| 12738854 | 28716F | ME04734-01 | YES | P05 | [NULL] | 6.10 | FERTILITY-Fertility-Sterile |
| 12738854 | 28716F | ME04734-02 | YES | I07 | [NULL] | 6.10 | ROSETTE LEAVES-Curled-Curled 5 |
| 12738854 | 28716F | ME04734-02 | YES | I07 | [NULL] | 6.90 | ROSETTE LEAVES-Curled-Curled 5 |
| 12738854 | 28716F | ME04734-02 | YES | J13 | [NULL] | 6.10 | WHOLE PLANT-Size-Small |
| 12738854 | 28716F | ME04734-02 | YES | J13 | [NULL] | 6.90 | WHOLE PLANT-Size-Small |
| 12738854 | 28716F | ME04734-02 | YES | K07 | [NULL] | 6.10 | CAULINE LEAVES-Curled-Curled 5 |
| 12738854 | 28716F | ME04734-02 | YES | L11 | [NULL] | 6.10 | FLOWERS-Other |
| 12738854 | 28716F | ME04734-02 | YES | P04 | [NULL] | 6.90 | FERTILITY-Fertility-Reduced |
| 12738854 | 28716F | ME04734-02 | YES | P05 | [NULL] | 6.10 | FERTILITY-Fertility-Sterile |
| 12738854 | 28716F | ME04734-03 | YES | I07 | [NULL] | 6.10 | ROSETTE LEAVES-Curled-Curled 5 |
| 12738854 | 28716F | ME04734-03 | YES | I07 | [NULL] | 6.90 | ROSETTE LEAVES-Curled-Curled 5 |
| 12738854 | 28716F | ME04734-03 | YES | J13 | [NULL] | 6.10 | WHOLE PLANT-Size-Small |
| 12738854 | 28716F | ME04734-03 | YES | J13 | [NULL] | 6.90 | WHOLE PLANT-Size-Small |
| 12738854 | 28716F | ME04734-03 | YES | K07 | [NULL] | 6.10 | CAULINE LEAVES-Curled-Curled 5 |
| 12738854 | 28716F | ME04734-03 | YES | L11 | [NULL] | 6.10 | FLOWERS-Other |
| 12738854 | 28716F | ME04734-03 | YES | P04 | [NULL] | 6.90 | FERTILITY-Fertility-Reduced |
| 12738854 | 28716F | ME04734-03 | YES | P05 | [NULL] | 6.10 | FERTILITY-Fertility-Sterile |
| 12738854 | 28716F | ME04734-04 | YES | I07 | [NULL] | 6.10 | ROSETTE LEAVES-Curled-Curled 5 |
| 12738854 | 28716F | ME04734-04 | YES | I07 | [NULL] | 6.90 | ROSETTE LEAVES-Curled-Curled 5 |
| 12738854 | 28716F | ME04734-04 | YES | J13 | [NULL] | 6.10 | WHOLE PLANT-Size-Small |
| 12738854 | 28716F | ME04734-04 | YES | J13 | [NULL] | 6.90 | WHOLE PLANT-Size-Small |
| 12738854 | 28716F | ME04734-04 | YES | K07 | [NULL] | 6.10 | CAULINE LEAVES-Curled-Curled 5 |
| 12738854 | 28716F | ME04734-04 | YES | L11 | [NULL] | 6.10 | FLOWERS-Other |
| 12738854 | 28716F | ME04734-04 | YES | P04 | [NULL] | 6.90 | FERTILITY-Fertility-Reduced |
| 12738854 | 28716F | ME04734-04 | YES | P05 | [NULL] | 6.10 | FERTILITY-Fertility-Sterile |
| 12738854 | 28716F | ME04734-05 | YES | I07 | [NULL] | 6.10 | ROSETTE LEAVES-Curled-Curled 5 |
| 12738854 | 28716F | ME04734-05 | YES | I07 | [NULL] | 6.90 | ROSETTE LEAVES-Curled-Curled 5 |
| 12738854 | 28716F | ME04734-05 | YES | J13 | [NULL] | 6.10 | WHOLE PLANT-Size-Small |
| 12738854 | 28716F | ME04734-05 | YES | J13 | [NULL] | 6.90 | WHOLE PLANT-Size-Small |
| 12738854 | 28716F | ME04734-05 | YES | K07 | [NULL] | 6.10 | CAULINE LEAVES-Curled-Curled 5 |
| 12738854 | 28716F | ME04734-05 | YES | L11 | [NULL] | 6.10 | FLOWERS-Other |
| 12738854 | 28716F | ME04734-05 | YES | P04 | [NULL] | 6.90 | FERTILITY-Fertility-Reduced |
| 12738854 | 28716F | ME04734-05 | YES | P05 | [NULL] | 6.10 | FERTILITY-Fertility-Sterile |
| 12738854 | 28716F | ME04734-06 | YES | I07 | [NULL] | 6.10 | ROSETTE LEAVES-Curled-Curled 5 |
| 12738854 | 28716F | ME04734-06 | YES | I07 | [NULL] | 6.90 | ROSETTE LEAVES-Curled-Curled 5 |
| 12738854 | 28716F | ME04734-06 | YES | J13 | [NULL] | 6.10 | WHOLE PLANT-Size-Small |
| 12738854 | 28716F | ME04734-06 | YES | J13 | [NULL] | 6.90 | WHOLE PLANT-Size-Small |
| 12738854 | 28716F | ME04734-06 | YES | K07 | [NULL] | 6.10 | CAULINE LEAVES-Curled-Curled 5 |
| 12738854 | 28716F | ME04734-06 | YES | L11 | [NULL] | 6.10 | FLOWERS-Other |
| 12738854 | 28716F | ME04734-06 | YES | P04 | [NULL] | 6.90 | FERTILITY-Fertility-Reduced |
| 12738854 | 28716F | ME04734-06 | YES | P05 | [NULL] | 6.10 | FERTILITY-Fertility-Sterile |
| 12738854 | 28716F | ME04734-07 | YES | I07 | [NULL] | 6.10 | ROSETTE LEAVES-Curled-Curled 5 |
| 12738854 | 28716F | ME04734-07 | YES | I07 | [NULL] | 6.90 | ROSETTE LEAVES-Curled-Curled 5 |
| 12738854 | 28716F | ME04734-07 | YES | J13 | [NULL] | 6.10 | WHOLE PLANT-Size-Small |
| 12738854 | 28716F | ME04734-07 | YES | J13 | [NULL] | 6.90 | WHOLE PLANT-Size-Small |
| 12738854 | 28716F | ME04734-07 | YES | K07 | [NULL] | 6.10 | CAULINE LEAVES-Curled-Curled 5 |
| 12738854 | 28716F | ME04734-07 | YES | L11 | [NULL] | 6.10 | FLOWERS-Other |
| 12738854 | 28716F | ME04734-07 | YES | P04 | [NULL] | 6.90 | FERTILITY-Fertility-Reduced |
| 12738854 | 28716F | ME04734-07 | YES | P05 | [NULL] | 6.10 | FERTILITY-Fertility-Sterile |
| 12738854 | 28716F | ME04734-08 | YES | I07 | [NULL] | 6.10 | ROSETTE LEAVES-Curled-Curled 5 |
| 12738854 | 28716F | ME04734-08 | YES | I07 | [NULL] | 6.90 | ROSETTE LEAVES-Curled-Curled 5 |
| 12738854 | 28716F | ME04734-08 | YES | J13 | [NULL] | 6.10 | WHOLE PLANT-Size-Small |
| 12738854 | 28716F | ME04734-08 | YES | J13 | [NULL] | 6.90 | WHOLE PLANT-Size-Small |
| 12738854 | 28716F | ME04734-08 | YES | K07 | [NULL] | 6.10 | CAULINE LEAVES-Curled-Curled 5 |
| 12738854 | 28716F | ME04734-08 | YES | L11 | [NULL] | 6.10 | FLOWERS-Other |
| 12738854 | 28716F | ME04734-08 | YES | P04 | [NULL] | 6.90 | FERTILITY-Fertility-Reduced |
| 12738854 | 28716F | ME04734-08 | YES | P05 | [NULL] | 6.10 | FERTILITY-Fertility-Sterile |
| 12738854 | 28716F | ME04734-09 | YES | I07 | [NULL] | 6.10 | ROSETTE LEAVES-Curled-Curled 5 |
| 12738854 | 28716F | ME04734-09 | YES | I07 | [NULL] | 6.90 | ROSETTE LEAVES-Curled-Curled 5 |
| 12738854 | 28716F | ME04734-09 | YES | J13 | [NULL] | 6.10 | WHOLE PLANT-Size-Small |
| 12738854 | 28716F | ME04734-09 | YES | J13 | [NULL] | 6.90 | WHOLE PLANT-Size-Small |
| 12738854 | 28716F | ME04734-09 | YES | K07 | [NULL] | 6.10 | CAULINE LEAVES-Curled-Curled 5 |
| 12738854 | 28716F | ME04734-09 | YES | L11 | [NULL] | 6.10 | FLOWERS-Other |
| 12738854 | 28716F | ME04734-09 | YES | P04 | [NULL] | 6.90 | FERTILITY-Fertility-Reduced |
| 12738854 | 28716F | ME04734-09 | YES | P05 | [NULL] | 6.10 | FERTILITY-Fertility-Sterile |
| 12738854 | 28716F | ME04734-10 | YES | I07 | [NULL] | 6.10 | ROSETTE LEAVES-Curled-Curled 5 |
| 12738854 | 28716F | ME04734-10 | YES | I07 | [NULL] | 6.90 | ROSETTE LEAVES-Curled-Curled 5 |
| 12738854 | 28716F | ME04734-10 | YES | J13 | [NULL] | 6.10 | WHOLE PLANT-Size-Small |
| 12738854 | 28716F | ME04734-10 | YES | J13 | [NULL] | 6.90 | WHOLE PLANT-Size-Small |
| 12738854 | 28716F | ME04734-10 | YES | K07 | [NULL] | 6.10 | CAULINE LEAVES-Curled-Curled 5 |
| 12738854 | 28716F | ME04734-10 | YES | L11 | [NULL] | 6.10 | FLOWERS-Other |
| 12738854 | 28716F | ME04734-10 | YES | P04 | [NULL] | 6.90 | FERTILITY-Fertility-Reduced |
| 12738854 | 28716F | ME04734-10 | YES | P05 | [NULL] | 6.10 | FERTILITY-Fertility-Sterile |
| 12738854 | 32449D | ME04726-01 | YES | I05 | [NULL] | 6.30 | ROSETTE LEAVES-Curled-Curled 3 |
| 12738854 | 32449D | ME04726-01 | YES | I05 | [NULL] | 6.90 | ROSETTE LEAVES-Curled-Curled 3 |
| 12738854 | 32449D | ME04726-01 | YES | J13 | [NULL] | 6.30 | WHOLE PLANT-Size-Small |
| 12738854 | 32449D | ME04726-01 | YES | J13 | [NULL] | 6.90 | WHOLE PLANT-Size-Small |
| 12738854 | 32449D | ME04726-02 | YES | I05 | [NULL] | 6.90 | ROSETTE LEAVES-Curled-Curled 3 |
| 12738854 | 32449D | ME04726-02 | YES | I06 | [NULL] | 6.30 | ROSETTE LEAVES-Curled-Curled 4 |
| 12738854 | 32449D | ME04726-02 | YES | J13 | [NULL] | 6.30 | WHOLE PLANT-Size-Small |
| 12738854 | 32449D | ME04726-02 | YES | J13 | [NULL] | 6.90 | WHOLE PLANT-Size-Small |
| 12738854 | 32449D | ME04726-03 | NO | [NULL] | [NULL] | [NULL] | [NULL] |
| 12738854 | 32449D | ME04726-04 | YES | I05 | [NULL] | 6.30 | ROSETTE LEAVES-Curled-Curled 3 |
| 12738854 | 32449D | ME04726-04 | YES | I05 | [NULL] | 6.90 | ROSETTE LEAVES-Curled-Curled 3 |
| 12738854 | 32449D | ME04726-04 | YES | J13 | [NULL] | 6.30 | WHOLE PLANT-Size-Small |
| 12738854 | 32449D | ME04726-04 | YES | J13 | [NULL] | 6.90 | WHOLE PLANT-Size-Small |
| 12738854 | 32449D | ME04726-05 | YES | I05 | [NULL] | 6.90 | ROSETTE LEAVES-Curled-Curled 3 |
| 12738854 | 32449D | ME04726-05 | YES | I07 | [NULL] | 6.30 | ROSETTE LEAVES-Curled-Curled 5 |
| 12738854 | 32449D | ME04726-05 | YES | J13 | [NULL] | 6.30 | WHOLE PLANT-Size-Small |
| 12738854 | 32449D | ME04726-05 | YES | J13 | [NULL] | 6.90 | WHOLE PLANT-Size-Small |
| 12738854 | 32449D | ME04726-06 | YES | I07 | [NULL] | 6.30 | ROSETTE LEAVES-Curled-Curled 5 |
| 12738854 | 32449D | ME04726-06 | YES | J13 | [NULL] | 6.30 | WHOLE PLANT-Size-Small |
| 12738854 | 32449D | ME04726-07 | YES | I07 | [NULL] | 6.30 | ROSETTE LEAVES-Curled-Curled 5 |
| 12738854 | 32449D | ME04726-07 | YES | I07 | [NULL] | 6.90 | ROSETTE LEAVES-Curled-Curled 5 |
| 12738854 | 32449D | ME04726-07 | YES | J13 | [NULL] | 6.30 | WHOLE PLANT-Size-Small |
| 12738854 | 32449D | ME04726-07 | YES | J13 | [NULL] | 6.90 | WHOLE PLANT-Size-Small |
| 12738854 | 32449D | ME04726-08 | YES | I07 | [NULL] | 6.30 | ROSETTE LEAVES-Curled-Curled 5 |
| 12738854 | 32449D | ME04726-08 | YES | I07 | [NULL] | 6.90 | ROSETTE LEAVES-Curled-Curled 5 |
| 12738854 | 32449D | ME04726-08 | YES | J13 | [NULL] | 6.30 | WHOLE PLANT-Size-Small |
| 12738854 | 32449D | ME04726-08 | YES | J13 | [NULL] | 6.90 | WHOLE PLANT-Size-Small |
| 12738854 | 32449D | ME04726-08 | YES | P04 | [NULL] | 6.90 | FERTILITY-Fertility-Reduced |
| 12738854 | 32449D | ME04726-09 | YES | I05 | [NULL] | 6.30 | ROSETTE LEAVES-Curled-Curled 3 |
| 12738854 | 32449D | ME04726-09 | YES | I05 | [NULL] | 6.90 | ROSETTE LEAVES-Curled-Curled 3 |
| 12738854 | 32449D | ME04726-09 | YES | J13 | [NULL] | 6.30 | WHOLE PLANT-Size-Small |
| 12738854 | 32449D | ME04726-09 | YES | J13 | [NULL] | 6.90 | WHOLE PLANT-Size-Small |
| 12738854 | 32449D | ME04726-10 | YES | I05 | [NULL] | 6.30 | ROSETTE LEAVES-Curled-Curled 3 |
| 12738854 | 32449D | ME04726-10 | YES | I05 | [NULL] | 6.90 | ROSETTE LEAVES-Curled-Curled 3 |
| 12738854 | 32449D | ME04726-10 | YES | J13 | [NULL] | 6.30 | WHOLE PLANT-Size-Small |
| 12738854 | 32449D | ME04726-10 | YES | J13 | [NULL] | 6.90 | WHOLE PLANT-Size-Small |
| 12738854 | 32449F | ME05084-01 | YES | I07 | [NULL] | 6.50 | ROSETTE LEAVES-Curled-Curled 5 |
| 12738854 | 32449F | ME05084-01 | YES | J13 | [NULL] | 6.50 | WHOLE PLANT-Size-Small |
| 12738854 | 32449F | ME05084-01 | YES | P04 | [NULL] | 6.50 | FERTILITY-Fertility-Reduced |
| 12738854 | 32449F | ME05084-02 | YES | I04 | [NULL] | 6.50 | ROSETTE LEAVES-Curled-Curled 2 |
| 12738854 | 32449F | ME05084-02 | YES | J13 | [NULL] | 6.50 | WHOLE PLANT-Size-Small |
| 12738854 | 32449F | ME05084-02 | YES | P04 | [NULL] | 6.50 | FERTILITY-Fertility-Reduced |
| 12738854 | 32449F | ME05084-03 | YES | I07 | [NULL] | 6.50 | ROSETTE LEAVES-Curled-Curled 5 |
| 12738854 | 32449F | ME05084-03 | YES | J13 | [NULL] | 6.50 | WHOLE PLANT-Size-Small |
| 12738854 | 32449F | ME05084-03 | YES | P04 | [NULL] | 6.50 | FERTILITY-Fertility-Reduced |
| 12738854 | 32449F | ME05084-04 | YES | I04 | [NULL] | 6.50 | ROSETTE LEAVES-Curled-Curled 2 |
| 12738854 | 32449F | ME05084-04 | YES | J13 | [NULL] | 6.50 | WHOLE PLANT-Size-Small |
| 12738854 | 32449F | ME05084-04 | YES | P04 | [NULL] | 6.50 | FERTILITY-Fertility-Reduced |
| 12738854 | 32449F | ME05084-05 | YES | I04 | [NULL] | 6.50 | ROSETTE LEAVES-Curled-Curled 2 |
| 12738854 | 32449F | ME05084-05 | YES | J13 | [NULL] | 6.50 | WHOLE PLANT-Size-Small |
| 12738854 | 32449F | ME05084-05 | YES | P04 | [NULL] | 6.50 | FERTILITY-Fertility-Reduced |
| 12738854 | 32449F | ME05084-06 | YES | I07 | [NULL] | 6.50 | ROSETTE LEAVES-Curled-Curled 5 |
| 12738854 | 32449F | ME05084-06 | YES | J13 | [NULL] | 6.50 | WHOLE PLANT-Size-Small |
| 12738854 | 32449F | ME05084-06 | YES | P04 | [NULL] | 6.50 | FERTILITY-Fertility-Reduced |
| 12738854 | 32449F | ME05084-07 | YES | I04 | [NULL] | 6.50 | ROSETTE LEAVES-Curled-Curled 2 |
| 12738854 | 32449F | ME05084-07 | YES | J13 | [NULL] | 6.50 | WHOLE PLANT-Size-Small |
| 12738854 | 32449F | ME05084-07 | YES | P04 | [NULL] | 6.50 | FERTILITY-Fertility-Reduced |
| 12738854 | 32449F | ME05084-08 | YES | I04 | [NULL] | 6.50 | ROSETTE LEAVES-Curled-Curled 2 |
| 12738854 | 32449F | ME05084-08 | YES | J13 | [NULL] | 6.50 | WHOLE PLANT-Size-Small |
| 12738854 | 32449F | ME05084-08 | YES | P04 | [NULL] | 6.50 | FERTILITY-Fertility-Reduced |
| 12738854 | 32449F | ME05084-09 | YES | I04 | [NULL] | 6.50 | ROSETTE LEAVES-Curled-Curled 2 |
| 12738854 | 32449F | ME05084-09 | YES | J13 | [NULL] | 6.50 | WHOLE PLANT-Size-Small |
| 12738854 | 32449F | ME05084-09 | YES | P04 | [NULL] | 6.50 | FERTILITY-Fertility-Reduced |
| 12738854 | 32449F | ME05084-10 | YES | I04 | [NULL] | 6.50 | ROSETTE LEAVES-Curled-Curled 2 |
| 12738854 | 32449F | ME05084-10 | YES | J13 | [NULL] | 6.50 | WHOLE PLANT-Size-Small |
| 12738854 | 32449F | ME05084-10 | YES | P04 | [NULL] | 6.50 | FERTILITY-Fertility-Reduced |
| 12738854 | 326D | ME04716-01 | YES | I07 | [NULL] | 6.90 | ROSETTE LEAVES-Curled-Curled 5 |
| 12738854 | 326D | ME04716-01 | YES | J13 | [NULL] | 6.90 | WHOLE PLANT-Size-Small |
| 12738854 | 326D | ME04716-02 | YES | I07 | [NULL] | 6.00 | ROSETTE LEAVES-Curled-Curled 5 |
| 12738854 | 326D | ME04716-02 | YES | I07 | [NULL] | 6.90 | ROSETTE LEAVES-Curled-Curled 5 |
| 12738854 | 326D | ME04716-02 | YES | J13 | [NULL] | 6.00 | WHOLE PLANT-Size-Small |
| 12738854 | 326D | ME04716-02 | YES | J13 | [NULL] | 6.90 | WHOLE PLANT-Size-Small |
| 12738854 | 326D | ME04716-03 | YES | I06 | [NULL] | 6.10 | ROSETTE LEAVES-Curled-Curled 4 |
| 12738854 | 326D | ME04716-03 | YES | I07 | [NULL] | 6.90 | ROSETTE LEAVES-Curled-Curled 5 |
| 12738854 | 326D | ME04716-03 | YES | J13 | [NULL] | 6.10 | WHOLE PLANT-Size-Small |
| 12738854 | 326D | ME04716-03 | YES | J13 | [NULL] | 6.90 | WHOLE PLANT-Size-Small |
| 12738854 | 326D | ME04716-04 | YES | I07 | [NULL] | 6.90 | ROSETTE LEAVES-Curled-Curled 5 |
| 12738854 | 326D | ME04716-04 | YES | J13 | [NULL] | 6.90 | WHOLE PLANT-Size-Small |
| 12738854 | 326D | ME04716-05 | YES | I07 | [NULL] | 6.00 | ROSETTE LEAVES-Curled-Curled 5 |
| 12738854 | 326D | ME04716-05 | YES | I07 | [NULL] | 6.90 | ROSETTE LEAVES-Curled-Curled 5 |
| 12738854 | 326D | ME04716-05 | YES | J13 | [NULL] | 6.00 | WHOLE PLANT-Size-Small |
| 12738854 | 326D | ME04716-05 | YES | J13 | [NULL] | 6.90 | WHOLE PLANT-Size-Small |
| 12738854 | 326D | ME04716-06 | YES | I05 | [NULL] | 6.30 | ROSETTE LEAVES-Curled-Curled 3 |
| 12738854 | 326D | ME04716-06 | YES | I05 | [NULL] | 6.90 | ROSETTE LEAVES-Curled-Curled 3 |
| 12738854 | 326D | ME04716-06 | YES | J13 | [NULL] | 6.90 | WHOLE PLANT-Size-Small |
| 12738854 | 326D | ME04716-06 | YES | K05 | [NULL] | 6.30 | CAULINE LEAVES-Curled-Curled 3 |
| 12738854 | 326D | ME04716-07 | YES | I06 | [NULL] | 6.10 | ROSETTE LEAVES-Curled-Curled 4 |
| 12738854 | 326D | ME04716-07 | YES | I06 | [NULL] | 6.90 | ROSETTE LEAVES-Curled-Curled 4 |
| 12738854 | 326D | ME04716-07 | YES | J13 | [NULL] | 6.10 | WHOLE PLANT-Size-Small |
| 12738854 | 326D | ME04716-07 | YES | J13 | [NULL] | 6.90 | WHOLE PLANT-Size-Small |
| 12738854 | 326D | ME04716-08 | YES | I06 | [NULL] | 6.10 | ROSETTE LEAVES-Curled-Curled 4 |
| 12738854 | 326D | ME04716-08 | YES | I06 | [NULL] | 6.90 | ROSETTE LEAVES-Curled-Curled 4 |
| 12738854 | 326D | ME04716-08 | YES | J13 | [NULL] | 6.10 | WHOLE PLANT-Size-Small |
| 12738854 | 326D | ME04716-08 | YES | J13 | [NULL] | 6.90 | WHOLE PLANT-Size-Small |
| 12738854 | 326D | ME04716-09 | YES | I06 | [NULL] | 6.90 | ROSETTE LEAVES-Curled-Curled 4 |
| 12738854 | 326D | ME04716-09 | YES | I07 | [NULL] | 6.00 | ROSETTE LEAVES-Curled-Curled 5 |
| 12738854 | 326D | ME04716-09 | YES | J13 | [NULL] | 6.00 | WHOLE PLANT-Size-Small |
| 12738854 | 326D | ME04716-09 | YES | J13 | [NULL] | 6.90 | WHOLE PLANT-Size-Small |
| 12738854 | 326D | ME04716-10 | YES | I05 | [NULL] | 6.30 | ROSETTE LEAVES-Curled-Curled 3 |
| 12738854 | 326D | ME04716-10 | YES | I06 | [NULL] | 6.90 | ROSETTE LEAVES-Curled-Curled 4 |
| 12738854 | 326D | ME04716-10 | YES | J13 | [NULL] | 6.90 | WHOLE PLANT-Size-Small |
| 12738854 | 326D | ME04716-10 | YES | K05 | [NULL] | 6.30 | CAULINE LEAVES-Curled-Curled 3 |
| 12738854 | 326F | ME04708-01 | YES | I07 | [NULL] | 6.10 | ROSETTE LEAVES-Curled-Curled 5 |
| 12738854 | 326F | ME04708-01 | YES | I07 | [NULL] | 6.90 | ROSETTE LEAVES-Curled-Curled 5 |
| 12738854 | 326F | ME04708-01 | YES | I31 | [NULL] | 6.10 | ROSETTE LEAVES-Other |
| 12738854 | 326F | ME04708-01 | YES | J13 | [NULL] | 6.10 | WHOLE PLANT-Size-Small |
| 12738854 | 326F | ME04708-01 | YES | J13 | [NULL] | 6.90 | WHOLE PLANT-Size-Small |
| 12738854 | 326F | ME04708-01 | YES | K07 | [NULL] | 6.10 | CAULINE LEAVES-Curled-Curled 5 |
| 12738854 | 326F | ME04708-01 | YES | M14 | [NULL] | 6.10 | INFLORESCENCE-Height-Short |
| 12738854 | 326F | ME04708-01 | YES | P04 | [NULL] | 6.10 | FERTILITY-Fertility-Reduced |
| 12738854 | 326F | ME04708-01 | YES | P04 | [NULL] | 6.90 | FERTILITY-Fertility-Reduced |
| 12738854 | 326F | ME04708-02 | YES | I07 | [NULL] | 6.30 | ROSETTE LEAVES-Curled-Curled 5 |
| 12738854 | 326F | ME04708-02 | YES | I31 | [NULL] | 6.30 | ROSETTE LEAVES-Other |
| 12738854 | 326F | ME04708-02 | YES | J13 | [NULL] | 6.30 | WHOLE PLANT-Size-Small |
| 12738854 | 326F | ME04708-02 | YES | K07 | [NULL] | 6.30 | CAULINE LEAVES-Curled-Curled 5 |
| 12738854 | 326F | ME04708-02 | YES | M14 | [NULL] | 6.30 | INFLORESCENCE-Height-Short |
| 12738854 | 326F | ME04708-02 | YES | P04 | [NULL] | 6.30 | FERTILITY-Fertility-Reduced |
| 12738854 | 326F | ME04708-03 | YES | I07 | [NULL] | 6.00 | ROSETTE LEAVES-Curled-Curled 5 |
| 12738854 | 326F | ME04708-03 | YES | I07 | [NULL] | 6.90 | ROSETTE LEAVES-Curled-Curled 5 |
| 12738854 | 326F | ME04708-03 | YES | I31 | [NULL] | 6.00 | ROSETTE LEAVES-Other |
| 12738854 | 326F | ME04708-03 | YES | J13 | [NULL] | 6.00 | WHOLE PLANT-Size-Small |
| 12738854 | 326F | ME04708-03 | YES | J13 | [NULL] | 6.90 | WHOLE PLANT-Size-Small |
| 12738854 | 326F | ME04708-03 | YES | K07 | [NULL] | 6.00 | CAULINE LEAVES-Curled-Curled 5 |
| 12738854 | 326F | ME04708-03 | YES | M13 | [NULL] | 6.00 | INFLORESCENCE-Flowering Time-Late Flowering |
| 12738854 | 326F | ME04708-03 | YES | M14 | [NULL] | 6.00 | INFLORESCENCE-Height-Short |
| 12738854 | 326F | ME04708-03 | YES | P04 | [NULL] | 6.00 | FERTILITY-Fertility-Reduced |
| 12738854 | 326F | ME04708-03 | YES | P04 | [NULL] | 6.90 | FERTILITY-Fertility-Reduced |
| 12738854 | 326F | ME04708-04 | YES | I07 | [NULL] | 6.10 | ROSETTE LEAVES-Curled-Curled 5 |
| 12738854 | 326F | ME04708-04 | YES | I07 | [NULL] | 6.90 | ROSETTE LEAVES-Curled-Curled 5 |
| 12738854 | 326F | ME04708-04 | YES | I31 | [NULL] | 6.10 | ROSETTE LEAVES-Other |
| 12738854 | 326F | ME04708-04 | YES | J13 | [NULL] | 6.10 | WHOLE PLANT-Size-Small |
| 12738854 | 326F | ME04708-04 | YES | J13 | [NULL] | 6.90 | WHOLE PLANT-Size-Small |
| 12738854 | 326F | ME04708-04 | YES | K07 | [NULL] | 6.10 | CAULINE LEAVES-Curled-Curled 5 |
| 12738854 | 326F | ME04708-04 | YES | M14 | [NULL] | 6.10 | INFLORESCENCE-Height-Short |
| 12738854 | 326F | ME04708-04 | YES | P04 | [NULL] | 6.10 | FERTILITY-Fertility-Reduced |
| 12738854 | 326F | ME04708-04 | YES | P04 | [NULL] | 6.90 | FERTILITY-Fertility-Reduced |
| 12738854 | 326F | ME04708-05 | YES | I07 | [NULL] | 6.30 | ROSETTE LEAVES-Curled-Curled 5 |
| 12738854 | 326F | ME04708-05 | YES | I07 | [NULL] | 6.90 | ROSETTE LEAVES-Curled-Curled 5 |
| 12738854 | 326F | ME04708-05 | YES | I31 | [NULL] | 6.30 | ROSETTE LEAVES-Other |
| 12738854 | 326F | ME04708-05 | YES | J13 | [NULL] | 6.30 | WHOLE PLANT-Size-Small |
| 12738854 | 326F | ME04708-05 | YES | J13 | [NULL] | 6.90 | WHOLE PLANT-Size-Small |
| 12738854 | 326F | ME04708-05 | YES | K07 | [NULL] | 6.30 | CAULINE LEAVES-Curled-Curled 5 |
| 12738854 | 326F | ME04708-05 | YES | M14 | [NULL] | 6.30 | INFLORESCENCE-Height-Short |
| 12738854 | 326F | ME04708-05 | YES | P04 | [NULL] | 6.30 | FERTILITY-Fertility-Reduced |
| 12738854 | 326F | ME04708-05 | YES | P04 | [NULL] | 6.90 | FERTILITY-Fertility-Reduced |
| 12738854 | 326F | ME04708-06 | YES | I07 | [NULL] | 6.30 | ROSETTE LEAVES-Curled-Curled 5 |
| 12738854 | 326F | ME04708-06 | YES | I07 | [NULL] | 6.90 | ROSETTE LEAVES-Curled-Curled 5 |
| 12738854 | 326F | ME04708-06 | YES | I31 | [NULL] | 6.30 | ROSETTE LEAVES-Other |
| 12738854 | 326F | ME04708-06 | YES | J13 | [NULL] | 6.30 | WHOLE PLANT-Size-Small |
| 12738854 | 326F | ME04708-06 | YES | J13 | [NULL] | 6.90 | WHOLE PLANT-Size-Small |
| 12738854 | 326F | ME04708-06 | YES | K07 | [NULL] | 6.30 | CAULINE LEAVES-Curled-Curled 5 |
| 12738854 | 326F | ME04708-06 | YES | M14 | [NULL] | 6.30 | INFLORESCENCE-Height-Short |
| 12738854 | 326F | ME04708-06 | YES | P04 | [NULL] | 6.30 | FERTILITY-Fertility-Reduced |
| 12738854 | 326F | ME04708-06 | YES | P04 | [NULL] | 6.90 | FERTILITY-Fertility-Reduced |
| 12738854 | 326F | ME04708-07 | YES | I07 | [NULL] | 6.30 | ROSETTE LEAVES-Curled-Curled 5 |
| 12738854 | 326F | ME04708-07 | YES | I07 | [NULL] | 6.90 | ROSETTE LEAVES-Curled-Curled 5 |
| 12738854 | 326F | ME04708-07 | YES | I31 | [NULL] | 6.30 | ROSETTE LEAVES-Other |
| 12738854 | 326F | ME04708-07 | YES | J13 | [NULL] | 6.30 | WHOLE PLANT-Size-Small |
| 12738854 | 326F | ME04708-07 | YES | J13 | [NULL] | 6.90 | WHOLE PLANT-Size-Small |
| 12738854 | 326F | ME04708-07 | YES | K07 | [NULL] | 6.30 | CAULINE LEAVES-Curled-Curled 5 |
| 12738854 | 326F | ME04708-07 | YES | M14 | [NULL] | 6.30 | INFLORESCENCE-Height-Short |
| 12738854 | 326F | ME04708-07 | YES | P04 | [NULL] | 6.30 | FERTILITY-Fertility-Reduced |
| 12738854 | 326F | ME04708-07 | YES | P04 | [NULL] | 6.90 | FERTILITY-Fertility-Reduced |
| 12738854 | 326F | ME04708-08 | YES | I07 | [NULL] | 6.30 | ROSETTE LEAVES-Curled-Curled 5 |
| 12738854 | 326F | ME04708-08 | YES | I07 | [NULL] | 6.90 | ROSETTE LEAVES-Curled-Curled 5 |
| 12738854 | 326F | ME04708-08 | YES | I31 | [NULL] | 6.30 | ROSETTE LEAVES-Other |
| 12738854 | 326F | ME04708-08 | YES | J13 | [NULL] | 6.30 | WHOLE PLANT-Size-Small |
| 12738854 | 326F | ME04708-08 | YES | J13 | [NULL] | 6.90 | WHOLE PLANT-Size-Small |
| 12738854 | 326F | ME04708-08 | YES | K07 | [NULL] | 6.30 | CAULINE LEAVES-Curled-Curled 5 |
| 12738854 | 326F | ME04708-08 | YES | M14 | [NULL] | 6.30 | INFLORESCENCE-Height-Short |
| 12738854 | 326F | ME04708-08 | YES | P04 | [NULL] | 6.30 | FERTILITY-Fertility-Reduced |
| 12738854 | 326F | ME04708-08 | YES | P04 | [NULL] | 6.90 | FERTILITY-Fertility-Reduced |
| 12738854 | 326F | ME04708-09 | YES | I07 | [NULL] | 6.10 | ROSETTE LEAVES-Curled-Curled 5 |
| 12738854 | 326F | ME04708-09 | YES | I07 | [NULL] | 6.90 | ROSETTE LEAVES-Curled-Curled 5 |
| 12738854 | 326F | ME04708-09 | YES | I31 | [NULL] | 6.10 | ROSETTE LEAVES-Other |
| 12738854 | 326F | ME04708-09 | YES | J13 | [NULL] | 6.10 | WHOLE PLANT-Size-Small |
| 12738854 | 326F | ME04708-09 | YES | J13 | [NULL] | 6.90 | WHOLE PLANT-Size-Small |
| 12738854 | 326F | ME04708-09 | YES | K07 | [NULL] | 6.10 | CAULINE LEAVES-Curled-Curled 5 |
| 12738854 | 326F | ME04708-09 | YES | M14 | [NULL] | 6.10 | INFLORESCENCE-Height-Short |
| 12738854 | 326F | ME04708-09 | YES | P04 | [NULL] | 6.10 | FERTILITY-Fertility-Reduced |
| 12738854 | 326F | ME04708-09 | YES | P04 | [NULL] | 6.90 | FERTILITY-Fertility-Reduced |
| 12738854 | 326F | ME04708-10 | YES | I07 | [NULL] | 6.10 | ROSETTE LEAVES-Curled-Curled 5 |
| 12738854 | 326F | ME04708-10 | YES | I07 | [NULL] | 6.90 | ROSETTE LEAVES-Curled-Curled 5 |
| 12738854 | 326F | ME04708-10 | YES | I31 | [NULL] | 6.10 | ROSETTE LEAVES-Other |
| 12738854 | 326F | ME04708-10 | YES | J13 | [NULL] | 6.10 | WHOLE PLANT-Size-Small |
| 12738854 | 326F | ME04708-10 | YES | J13 | [NULL] | 6.90 | WHOLE PLANT-Size-Small |
| 12738854 | 326F | ME04708-10 | YES | K07 | [NULL] | 6.10 | CAULINE LEAVES-Curled-Curled 5 |
| 12738854 | 326F | ME04708-10 | YES | M14 | [NULL] | 6.10 | INFLORESCENCE-Height-Short |
| 12738854 | 326F | ME04708-10 | YES | P04 | [NULL] | 6.10 | FERTILITY-Fertility-Reduced |
| 12738854 | 326F | ME04708-10 | YES | P04 | [NULL] | 6.90 | FERTILITY-Fertility-Reduced |
| 12738854 | 34414F | ME04698-01 | YES | I07 | [NULL] | 6.30 | ROSETTE LEAVES-Curled-Curled 5 |
| 12738854 | 34414F | ME04698-01 | YES | I07 | [NULL] | 6.90 | ROSETTE LEAVES-Curled-Curled 5 |
| 12738854 | 34414F | ME04698-01 | YES | I31 | [NULL] | 6.30 | ROSETTE LEAVES-Other |
| 12738854 | 34414F | ME04698-01 | YES | J13 | [NULL] | 6.30 | WHOLE PLANT-Size-Small |
| 12738854 | 34414F | ME04698-01 | YES | J13 | [NULL] | 6.90 | WHOLE PLANT-Size-Small |
| 12738854 | 34414F | ME04698-01 | YES | K07 | [NULL] | 6.30 | CAULINE LEAVES-Curled-Curled 5 |
| 12738854 | 34414F | ME04698-01 | YES | L11 | [NULL] | 6.30 | FLOWERS-Other |
| 12738854 | 34414F | ME04698-01 | YES | L11 | [NULL] | 6.90 | FLOWERS-Other |
| 12738854 | 34414F | ME04698-01 | YES | N07 | [NULL] | 6.30 | SILIQUES-Other |
| 12738854 | 34414F | ME04698-01 | YES | P04 | [NULL] | 6.30 | FERTILITY-Fertility-Reduced |
| 12738854 | 34414F | ME04698-01 | YES | P04 | [NULL] | 6.90 | FERTILITY-Fertility-Reduced |
| 12738854 | 34414F | ME04698-02 | YES | I07 | [NULL] | 6.30 | ROSETTE LEAVES-Curled-Curled 5 |
| 12738854 | 34414F | ME04698-02 | YES | I07 | [NULL] | 6.90 | ROSETTE LEAVES-Curled-Curled 5 |
| 12738854 | 34414F | ME04698-02 | YES | I31 | [NULL] | 6.30 | ROSETTE LEAVES-Other |
| 12738854 | 34414F | ME04698-02 | YES | J13 | [NULL] | 6.30 | WHOLE PLANT-Size-Small |
| 12738854 | 34414F | ME04698-02 | YES | J13 | [NULL] | 6.90 | WHOLE PLANT-Size-Small |
| 12738854 | 34414F | ME04698-02 | YES | K07 | [NULL] | 6.30 | CAULINE LEAVES-Curled-Curled 5 |
| 12738854 | 34414F | ME04698-02 | YES | L11 | [NULL] | 6.30 | FLOWERS-Other |
| 12738854 | 34414F | ME04698-02 | YES | L11 | [NULL] | 6.90 | FLOWERS-Other |
| 12738854 | 34414F | ME04698-02 | YES | N07 | [NULL] | 6.30 | SILIQUES-Other |
| 12738854 | 34414F | ME04698-02 | YES | P04 | [NULL] | 6.30 | FERTILITY-Fertility-Reduced |
| 12738854 | 34414F | ME04698-02 | YES | P04 | [NULL] | 6.90 | FERTILITY-Fertility-Reduced |
| 12738854 | 34414F | ME04698-03 | YES | I05 | [NULL] | 6.00 | ROSETTE LEAVES-Curled-Curled 3 |
| 12738854 | 34414F | ME04698-03 | YES | I07 | [NULL] | 6.90 | ROSETTE LEAVES-Curled-Curled 5 |
| 12738854 | 34414F | ME04698-03 | YES | J13 | [NULL] | 6.00 | WHOLE PLANT-Size-Small |
| 12738854 | 34414F | ME04698-03 | YES | J13 | [NULL] | 6.90 | WHOLE PLANT-Size-Small |
| 12738854 | 34414F | ME04698-03 | YES | K05 | [NULL] | 6.00 | CAULINE LEAVES-Curled-Curled 3 |
| 12738854 | 34414F | ME04698-03 | YES | L11 | [NULL] | 6.00 | FLOWERS-Other |
| 12738854 | 34414F | ME04698-03 | YES | L11 | [NULL] | 6.90 | FLOWERS-Other |
| 12738854 | 34414F | ME04698-03 | YES | M13 | [NULL] | 6.00 | INFLORESCENCE-Flowering Time-Late |
| | | | | | | | Flowering |
| 12738854 | 34414F | ME04698-03 | YES | M14 | [NULL] | 6.00 | INFLORESCENCE-Height-Short |
| 12738854 | 34414F | ME04698-03 | YES | P04 | [NULL] | 6.90 | FERTILITY-Fertility-Reduced |
| 12738854 | 34414F | ME04698-03 | YES | P05 | [NULL] | 6.00 | FERTILITY-Fertility-Sterile |
| 12738854 | 34414F | ME04698-04 | YES | I07 | [NULL] | 6.30 | ROSETTE LEAVES-Curled-Curled 5 |
| 12738854 | 34414F | ME04698-04 | YES | I07 | [NULL] | 6.90 | ROSETTE LEAVES-Curled-Curled 5 |
| 12738854 | 34414F | ME04698-04 | YES | I31 | [NULL] | 6.30 | ROSETTE LEAVES-Other |
| 12738854 | 34414F | ME04698-04 | YES | J13 | [NULL] | 6.30 | WHOLE PLANT-Size-Small |
| 12738854 | 34414F | ME04698-04 | YES | J13 | [NULL] | 6.90 | WHOLE PLANT-Size-Small |
| 12738854 | 34414F | ME04698-04 | YES | K07 | [NULL] | 6.30 | CAULINE LEAVES-Curled-Curled 5 |
| 12738854 | 34414F | ME04698-04 | YES | L11 | [NULL] | 6.30 | FLOWERS-Other |
| 12738854 | 34414F | ME04698-04 | YES | L11 | [NULL] | 6.90 | FLOWERS-Other |
| 12738854 | 34414F | ME04698-04 | YES | N07 | [NULL] | 6.30 | SILIQUES-Other |
| 12738854 | 34414F | ME04698-04 | YES | P04 | [NULL] | 6.30 | FERTILITY-Fertility-Reduced |
| 12738854 | 34414F | ME04698-04 | YES | P04 | [NULL] | 6.90 | FERTILITY-Fertility-Reduced |
| 12738854 | 34414F | ME04698-05 | YES | I07 | [NULL] | 6.30 | ROSETTE LEAVES-Curled-Curled 5 |
| 12738854 | 34414F | ME04698-05 | YES | I07 | [NULL] | 6.90 | ROSETTE LEAVES-Curled-Curled 5 |
| 12738854 | 34414F | ME04698-05 | YES | I31 | [NULL] | 6.30 | ROSETTE LEAVES-Other |
| 12738854 | 34414F | ME04698-05 | YES | J13 | [NULL] | 6.30 | WHOLE PLANT-Size-Small |
| 12738854 | 34414F | ME04698-05 | YES | J13 | [NULL] | 6.90 | WHOLE PLANT-Size-Small |
| 12738854 | 34414F | ME04698-05 | YES | K07 | [NULL] | 6.30 | CAULINE LEAVES-Curled-Curled 5 |
| 12738854 | 34414F | ME04698-05 | YES | L11 | [NULL] | 6.30 | FLOWERS-Other |
| 12738854 | 34414F | ME04698-05 | YES | L11 | [NULL] | 6.90 | FLOWERS-Other |
| 12738854 | 34414F | ME04698-05 | YES | N07 | [NULL] | 6.30 | SILIQUES-Other |
| 12738854 | 34414F | ME04698-05 | YES | P04 | [NULL] | 6.30 | FERTILITY-Fertility-Reduced |
| 12738854 | 34414F | ME04698-05 | YES | P04 | [NULL] | 6.90 | FERTILITY-Fertility-Reduced |
| 12738854 | 34414F | ME04698-06 | YES | I06 | [NULL] | 6.10 | ROSETTE LEAVES-Curled-Curled 4 |
| 12738854 | 34414F | ME04698-06 | YES | I07 | [NULL] | 6.90 | ROSETTE LEAVES-Curled-Curled 5 |
| 12738854 | 34414F | ME04698-06 | YES | I31 | [NULL] | 6.10 | ROSETTE LEAVES-Other |
| 12738854 | 34414F | ME04698-06 | YES | J13 | [NULL] | 6.10 | WHOLE PLANT-Size-Small |
| 12738854 | 34414F | ME04698-06 | YES | J13 | [NULL] | 6.90 | WHOLE PLANT-Size-Small |
| 12738854 | 34414F | ME04698-06 | YES | K06 | [NULL] | 6.10 | CAULINE LEAVES-Curled-Curled 4 |
| 12738854 | 34414F | ME04698-06 | YES | L11 | [NULL] | 6.90 | FLOWERS-Other |
| 12738854 | 34414F | ME04698-06 | YES | P04 | [NULL] | 6.10 | FERTILITY-Fertility-Reduced |
| 12738854 | 34414F | ME04698-06 | YES | P04 | [NULL] | 6.90 | FERTILITY-Fertility-Reduced |
| 12738854 | 34414F | ME04698-07 | YES | I06 | [NULL] | 6.30 | ROSETTE LEAVES-Curled-Curled 4 |
| 12738854 | 34414F | ME04698-07 | YES | I07 | [NULL] | 6.90 | ROSETTE LEAVES-Curled-Curled 5 |
| 12738854 | 34414F | ME04698-07 | YES | I31 | [NULL] | 6.30 | ROSETTE LEAVES-Other |
| 12738854 | 34414F | ME04698-07 | YES | J13 | [NULL] | 6.30 | WHOLE PLANT-Size-Small |
| 12738854 | 34414F | ME04698-07 | YES | J13 | [NULL] | 6.90 | WHOLE PLANT-Size-Small |
| 12738854 | 34414F | ME04698-07 | YES | K06 | [NULL] | 6.30 | CAULINE LEAVES-Curled-Curled 4 |
| 12738854 | 34414F | ME04698-07 | YES | L11 | [NULL] | 6.90 | FLOWERS-Other |
| 12738854 | 34414F | ME04698-07 | YES | P04 | [NULL] | 6.30 | FERTILITY-Fertility-Reduced |
| 12738854 | 34414F | ME04698-07 | YES | P04 | [NULL] | 6.90 | FERTILITY-Fertility-Reduced |
| 12738854 | 34414F | ME04698-08 | YES | I05 | [NULL] | 6.00 | ROSETTE LEAVES-Curled-Curled 3 |
| 12738854 | 34414F | ME04698-08 | YES | I07 | [NULL] | 6.90 | ROSETTE LEAVES-Curled-Curled 5 |
| 12738854 | 34414F | ME04698-08 | YES | I20 | [NULL] | 6.00 | ROSETTE LEAVES-Shape-Oval |
| 12738854 | 34414F | ME04698-08 | YES | I31 | [NULL] | 6.00 | ROSETTE LEAVES-Other |
| 12738854 | 34414F | ME04698-08 | YES | J13 | [NULL] | 6.90 | WHOLE PLANT-Size-Small |
| 12738854 | 34414F | ME04698-08 | YES | K05 | [NULL] | 6.00 | CAULINE LEAVES-Curled-Curled 3 |
| 12738854 | 34414F | ME04698-08 | YES | L11 | [NULL] | 6.00 | FLOWERS-Other |
| 12738854 | 34414F | ME04698-08 | YES | L11 | [NULL] | 6.90 | FLOWERS-Other |
| 12738854 | 34414F | ME04698-08 | YES | M13 | [NULL] | 6.00 | INFLORESCENCE-Flowering Time-Late |
| | | | | | | | Flowering |
| 12738854 | 34414F | ME04698-08 | YES | M14 | [NULL] | 6.00 | INFLORESCENCE-Height-Short |
| 12738854 | 34414F | ME04698-08 | YES | P04 | [NULL] | 6.90 | FERTILITY-Fertility-Reduced |
| 12738854 | 34414F | ME04698-09 | YES | I07 | [NULL] | 6.30 | ROSETTE LEAVES-Curled-Curled 5 |
| 12738854 | 34414F | ME04698-09 | YES | I07 | [NULL] | 6.90 | ROSETTE LEAVES-Curled-Curled 5 |
| 12738854 | 34414F | ME04698-09 | YES | I31 | [NULL] | 6.30 | ROSETTE LEAVES-Other |
| 12738854 | 34414F | ME04698-09 | YES | J13 | [NULL] | 6.30 | WHOLE PLANT-Size-Small |
| 12738854 | 34414F | ME04698-09 | YES | J13 | [NULL] | 6.90 | WHOLE PLANT-Size-Small |
| 12738854 | 34414F | ME04698-09 | YES | K07 | [NULL] | 6.30 | CAULINE LEAVES-Curled-Curled 5 |
| 12738854 | 34414F | ME04698-09 | YES | L11 | [NULL] | 6.30 | FLOWERS-Other |
| 12738854 | 34414F | ME04698-09 | YES | L11 | [NULL] | 6.90 | FLOWERS-Other |
| 12738854 | 34414F | ME04698-09 | YES | N07 | [NULL] | 6.30 | SILIQUES-Other |
| 12738854 | 34414F | ME04698-09 | YES | P04 | [NULL] | 6.30 | FERTILITY-Fertility-Reduced |
| 12738854 | 34414F | ME04698-09 | YES | P04 | [NULL] | 6.90 | FERTILITY-Fertility-Reduced |
| 12738854 | 34414F | ME04698-10 | YES | I06 | [NULL] | 6.30 | ROSETTE LEAVES-Curled-Curled 4 |
| 12738854 | 34414F | ME04698-10 | YES | I07 | [NULL] | 6.90 | ROSETTE LEAVES-Curled-Curled 5 |
| 12738854 | 34414F | ME04698-10 | YES | I31 | [NULL] | 6.30 | ROSETTE LEAVES-Other |
| 12738854 | 34414F | ME04698-10 | YES | J13 | [NULL] | 6.30 | WHOLE PLANT-Size-Small |
| 12738854 | 34414F | ME04698-10 | YES | J13 | [NULL] | 6.90 | WHOLE PLANT-Size-Small |
| 12738854 | 34414F | ME04698-10 | YES | K06 | [NULL] | 6.30 | CAULINE LEAVES-Curled-Curled 4 |
| 12738854 | 34414F | ME04698-10 | YES | L11 | [NULL] | 6.90 | FLOWERS-Other |
| 12738854 | 34414F | ME04698-10 | YES | P04 | [NULL] | 6.30 | FERTILITY-Fertility-Reduced |
| 12738854 | 34414F | ME04698-10 | YES | P04 | [NULL] | 6.90 | FERTILITY-Fertility-Reduced |
| 12738854 | 35S | ME01486-01 | YES | I07 | [NULL] | 6.00 | ROSETTE LEAVES-Curled-Curled 5 |
| 12738854 | 35S | ME01486-01 | YES | J13 | [NULL] | 5.10 | WHOLE PLANT-Size-Small |
| 12738854 | 35S | ME01486-01 | YES | M20 | [NULL] | 6.30 | INFLORESCENCE-Strength-Weak |
| 12738854 | 35S | ME01486-01 | YES | P03 | [NULL] | 6.30 | FERTILITY-Fertility-Male-sterile |
| 12738854 | 35S | ME01486-01 | YES | P04 | [NULL] | 9.70 | FERTILITY-Fertility-Reduced |
| 12738854 | 35S | ME01486-01 | YES | P05 | [NULL] | 6.50 | FERTILITY-Fertility-Sterile |
| 12738854 | 35S | ME01486-02 | YES | I07 | [NULL] | 6.00 | ROSETTE LEAVES-Curled-Curled 5 |
| 12738854 | 35S | ME01486-02 | YES | J13 | [NULL] | 5.10 | WHOLE PLANT-Size-Small |
| 12738854 | 35S | ME01486-02 | YES | M20 | [NULL] | 6.30 | INFLORESCENCE-Strength-Weak |
| 12738854 | 35S | ME01486-02 | YES | P03 | [NULL] | 6.30 | FERTILITY-Fertility-Male-sterile |
| 12738854 | 35S | ME01486-02 | YES | P05 | [NULL] | 6.50 | FERTILITY-Fertility-Sterile |
| 12738854 | 35S | ME01486-03 | YES | I07 | [NULL] | 6.00 | ROSETTE LEAVES-Curled-Curled 5 |
| 12738854 | 35S | ME01486-03 | YES | J13 | [NULL] | 5.10 | WHOLE PLANT-Size-Small |
| 12738854 | 35S | ME01486-03 | YES | M20 | [NULL] | 6.30 | INFLORESCENCE-Strength-Weak |
| 12738854 | 35S | ME01486-03 | YES | P03 | [NULL] | 6.30 | FERTILITY-Fertility-Male-sterile |
| 12738854 | 35S | ME01486-03 | YES | P04 | [NULL] | 9.70 | FERTILITY-Fertility-Reduced |
| 12738854 | 35S | ME01486-03 | YES | P05 | [NULL] | 6.50 | FERTILITY-Fertility-Sterile |
| 12738854 | 35S | ME01486-04 | NO | [NULL] | [NULL] | [NULL] | [NULL] |
| 12738854 | 35S | ME01486-05 | NO | [NULL] | [NULL] | [NULL] | [NULL] |
| 12738854 | 35S | ME01486-06 | NO | [NULL] | [NULL] | [NULL] | [NULL] |
| 12738854 | 35S | ME01486-07 | YES | I04 | [NULL] | 6.00 | ROSETTE LEAVES-Curled-Curled 2 |
| 12738854 | 35S | ME01486-07 | YES | N02 | [NULL] | 6.50 | SILIQUES-Length-Short |
| 12738854 | 35S | ME01486-08 | YES | I07 | [NULL] | 6.00 | ROSETTE LEAVES-Curled-Curled 5 |
| 12738854 | 35S | ME01486-08 | YES | J13 | [NULL] | 5.10 | WHOLE PLANT-Size-Small |
| 12738854 | 35S | ME01486-08 | YES | M20 | [NULL] | 6.30 | INFLORESCENCE-Strength-Weak |
| 12738854 | 35S | ME01486-08 | YES | P03 | [NULL] | 6.30 | FERTILITY-Fertility-Male-sterile |
| 12738854 | 35S | ME01486-08 | YES | P05 | [NULL] | 6.50 | FERTILITY-Fertility-Sterile |
| 12738854 | 35S | ME01486-09 | NO | [NULL] | [NULL] | [NULL] | [NULL] |
| 12738854 | 35S | ME01486-10 | NO | [NULL] | [NULL] | [NULL] | [NULL] |
| 13486619 | 35S | ME05513-01 | NO | [NULL] | [NULL] | [NULL] | [NULL] |
| 13486619 | 35S | ME05513-02 | NO | [NULL] | [NULL] | [NULL] | [NULL] |
| 13486619 | 35S | ME05513-03 | YES | P04 | [NULL] | 6.50 | FERTILITY-Fertility-Reduced |
| 13486619 | 35S | ME05513-04 | NO | [NULL] | [NULL] | [NULL] | [NULL] |
| 13486619 | 35S | ME05513-05 | YES | P04 | [NULL] | 6.50 | FERTILITY-Fertility-Reduced |
| 13486619 | 35S | ME05513-06 | NO | [NULL] | [NULL] | [NULL] | [NULL] |
| 13486619 | 35S | ME05513-07 | YES | P04 | [NULL] | 6.50 | FERTILITY-Fertility-Reduced |
| 13486619 | 35S | ME05513-08 | NO | [NULL] | [NULL] | [NULL] | [NULL] |
| 13486619 | 35S | ME05513-09 | NO | [NULL] | [NULL] | [NULL] | [NULL] |
| 13486619 | 35S | ME05513-10 | NO | [NULL] | [NULL] | [NULL] | [NULL] |
| 13486708 | 35S | ME04339-01 | NO | [NULL] | [NULL] | [NULL] | [NULL] |
| 13486708 | 35S | ME04339-02 | YES | I31 | [NULL] | 6.30 | ROSETTE LEAVES-Other |
| 13486708 | 35S | ME04339-02 | YES | J13 | [NULL] | 6.30 | WHOLE PLANT-Size-Small |
| 13486708 | 35S | ME04339-03 | NO | [NULL] | [NULL] | [NULL] | [NULL] |
| 13486708 | 35S | ME04339-04 | YES | I31 | [NULL] | 6.30 | ROSETTE LEAVES-Other |
| 13486708 | 35S | ME04339-04 | YES | J13 | [NULL] | 6.30 | WHOLE PLANT-Size-Small |
| 13486708 | 35S | ME04339-05 | YES | I31 | [NULL] | 6.30 | ROSETTE LEAVES-Other |
| 13486708 | 35S | ME04339-05 | YES | J13 | [NULL] | 6.30 | WHOLE PLANT-Size-Small |
| 13486708 | 35S | ME04339-06 | NO | [NULL] | [NULL] | [NULL] | [NULL] |
| 13486708 | 35S | ME04339-07 | NO | [NULL] | [NULL] | [NULL] | [NULL] |
| 13486708 | 35S | ME04339-08 | YES | I31 | [NULL] | 6.30 | ROSETTE LEAVES-Other |
| 13486708 | 35S | ME04339-08 | YES | J13 | [NULL] | 6.30 | WHOLE PLANT-Size-Small |
| 13486708 | 35S | ME04339-09 | YES | I31 | [NULL] | 6.30 | ROSETTE LEAVES-Other |
| 13486708 | 35S | ME04339-09 | YES | J13 | [NULL] | 6.30 | WHOLE PLANT-Size-Small |
| 13486876 | 13879F | ME04684-01 | NO | [NULL] | [NULL] | [NULL] | [NULL] |
| 13486876 | 13879F | ME04684-02 | NO | [NULL] | [NULL] | [NULL] | [NULL] |
| 13486876 | 13879F | ME04684-03 | NO | [NULL] | [NULL] | [NULL] | [NULL] |
| 13486876 | 13879F | ME04684-04 | NO | [NULL] | [NULL] | [NULL] | [NULL] |
| 13486876 | 13879F | ME04684-05 | NO | [NULL] | [NULL] | [NULL] | [NULL] |
| 13486876 | 13879F | ME04684-06 | NO | [NULL] | [NULL] | [NULL] | [NULL] |
| 13486876 | 13879F | ME04684-07 | NO | [NULL] | [NULL] | [NULL] | [NULL] |
| 13486876 | 13879F | ME04684-08 | NO | [NULL] | [NULL] | [NULL] | [NULL] |
| 13486876 | 13879F | ME04684-09 | NO | [NULL] | [NULL] | [NULL] | [NULL] |
| 13486876 | 13879F | ME04684-10 | NO | [NULL] | [NULL] | [NULL] | [NULL] |
| 13486876 | 15529D | ME04740-01 | NO | [NULL] | [NULL] | [NULL] | [NULL] |
| 13486876 | 15529D | ME04740-02 | NO | [NULL] | [NULL] | [NULL] | [NULL] |
| 13486876 | 15529D | ME04740-03 | NO | [NULL] | [NULL] | [NULL] | [NULL] |
| 13486876 | 15529D | ME04740-04 | NO | [NULL] | [NULL] | [NULL] | [NULL] |
| 13486876 | 15529D | ME04740-05 | NO | [NULL] | [NULL] | [NULL] | [NULL] |
| 13486876 | 15529D | ME04740-06 | NO | [NULL] | [NULL] | [NULL] | [NULL] |
| 13486876 | 15529D | ME04740-07 | NO | [NULL] | [NULL] | [NULL] | [NULL] |
| 13486876 | 15529D | ME04740-08 | NO | [NULL] | [NULL] | [NULL] | [NULL] |
| 13486876 | 15529D | ME04740-09 | NO | [NULL] | [NULL] | [NULL] | [NULL] |
| 13486876 | 15529D | ME04740-10 | NO | [NULL] | [NULL] | [NULL] | [NULL] |
| 13486876 | 15529F | ME05067-01 | YES | I08 | [NULL] | 6.50 | ROSETTE LEAVES-Disorganized Rosette- |
| | | | | | | | Disorganized Rosette |
| 13486876 | 15529F | ME05067-01 | YES | I18 | [NULL] | 6.50 | ROSETTE LEAVES-Shape-Lanceolate |
| 13486876 | 15529F | ME05067-01 | YES | I31 | [NULL] | 6.50 | ROSETTE LEAVES-Other |
| 13486876 | 15529F | ME05067-01 | YES | J13 | [NULL] | 6.50 | WHOLE PLANT-Size-Small |
| 13486876 | 15529F | ME05067-02 | YES | I08 | [NULL] | 6.50 | ROSETTE LEAVES-Disorganized Rosette- |
| | | | | | | | Disorganized Rosette |
| 13486876 | 15529F | ME05067-02 | YES | I18 | [NULL] | 6.50 | ROSETTE LEAVES-Shape-Lanceolate |
| 13486876 | 15529F | ME05067-02 | YES | I31 | [NULL] | 6.50 | ROSETTE LEAVES-Other |
| 13486876 | 15529F | ME05067-02 | YES | J13 | [NULL] | 6.50 | WHOLE PLANT-Size-Small |
| 13486876 | 15529F | ME05067-03 | YES | I08 | [NULL] | 6.50 | ROSETTE LEAVES-Disorganized Rosette- |
| | | | | | | | Disorganized Rosette |
| 13486876 | 15529F | ME05067-03 | YES | I18 | [NULL] | 6.50 | ROSETTE LEAVES-Shape-Lanceolate |
| 13486876 | 15529F | ME05067-03 | YES | I31 | [NULL] | 6.50 | ROSETTE LEAVES-Other |
| 13486876 | 15529F | ME05067-03 | YES | J13 | [NULL] | 6.50 | WHOLE PLANT-Size-Small |
| 13486876 | 15529F | ME05067-04 | YES | I08 | [NULL] | 6.50 | ROSETTE LEAVES-Disorganized Rosette- |
| | | | | | | | Disorganized Rosette |
| 13486876 | 15529F | ME05067-04 | YES | I18 | [NULL] | 6.50 | ROSETTE LEAVES-Shape-Lanceolate |
| 13486876 | 15529F | ME05067-04 | YES | I31 | [NULL] | 6.50 | ROSETTE LEAVES-Other |
| 13486876 | 15529F | ME05067-04 | YES | J13 | [NULL] | 6.50 | WHOLE PLANT-Size-Small |
| 13486876 | 15529F | ME05067-05 | YES | I08 | [NULL] | 6.50 | ROSETTE LEAVES-Disorganized Rosette- |
| | | | | | | | Disorganized Rosette |
| 13486876 | 15529F | ME05067-05 | YES | I18 | [NULL] | 6.50 | ROSETTE LEAVES-Shape-Lanceolate |
| 13486876 | 15529F | ME05067-05 | YES | I31 | [NULL] | 6.50 | ROSETTE LEAVES-Other |
| 13486876 | 15529F | ME05067-05 | YES | J13 | [NULL] | 6.50 | WHOLE PLANT-Size-Small |
| 13486876 | 15529F | ME05067-06 | NO | [NULL] | [NULL] | [NULL] | [NULL] |
| 13486876 | 15529F | ME05067-07 | YES | I08 | [NULL] | 6.30 | ROSETTE LEAVES-Disorganized Rosette- |
| | | | | | | | Disorganized Rosette |
| 13486876 | 15529F | ME05067-07 | YES | I18 | [NULL] | 6.30 | ROSETTE LEAVES-Shape-Lanceolate |
| 13486876 | 15529F | ME05067-07 | YES | I31 | [NULL] | 6.30 | ROSETTE LEAVES-Other |
| 13486876 | 15529F | ME05067-07 | YES | K16 | [NULL] | 6.30 | CAULINE LEAVES-Shape-Lanceolate |
| 13486876 | 15529F | ME05067-08 | YES | I08 | [NULL] | 6.50 | ROSETTE LEAVES-Disorganized Rosette- |
| | | | | | | | Disorganized Rosette |
| 13486876 | 15529F | ME05067-08 | YES | I18 | [NULL] | 6.50 | ROSETTE LEAVES-Shape-Lanceolate |
| 13486876 | 15529F | ME05067-08 | YES | I31 | [NULL] | 6.50 | ROSETTE LEAVES-Other |
| 13486876 | 15529F | ME05067-08 | YES | J13 | [NULL] | 6.50 | WHOLE PLANT-Size-Small |
| 13486876 | 28716F | ME04730-01 | YES | I08 | [NULL] | 6.90 | ROSETTE LEAVES-Disorganized Rosette- |
| | | | | | | | Disorganized Rosette |
| 13486876 | 28716F | ME04730-01 | YES | I18 | [NULL] | 6.90 | ROSETTE LEAVES-Shape-Lanceolate |
| 13486876 | 28716F | ME04730-01 | YES | M14 | [NULL] | 6.90 | INFLORESCENCE-Height-Short |
| 13486876 | 28716F | ME04730-02 | YES | I08 | [NULL] | 6.90 | ROSETTE LEAVES-Disorganized Rosette- |
| | | | | | | | Disorganized Rosette |
| 13486876 | 28716F | ME04730-02 | YES | I18 | [NULL] | 6.90 | ROSETTE LEAVES-Shape-Lanceolate |
| 13486876 | 28716F | ME04730-02 | YES | I31 | [NULL] | 6.90 | ROSETTE LEAVES-Other |
| 13486876 | 28716F | ME04730-02 | YES | L11 | [NULL] | 6.90 | FLOWERS-Other |
| 13486876 | 28716F | ME04730-02 | YES | M14 | [NULL] | 6.90 | INFLORESCENCE-Height-Short |
| 13486876 | 28716F | ME04730-02 | YES | P04 | [NULL] | 6.90 | FERTILITY-Fertility-Reduced |
| 13486876 | 28716F | ME04730-03 | YES | I08 | [NULL] | 6.90 | ROSETTE LEAVES-Disorganized Rosette- |
| | | | | | | | Disorganized Rosette |
| 13486876 | 28716F | ME04730-03 | YES | I18 | [NULL] | 6.90 | ROSETTE LEAVES-Shape-Lanceolate |
| 13486876 | 28716F | ME04730-03 | YES | I31 | [NULL] | 6.90 | ROSETTE LEAVES-Other |
| 13486876 | 28716F | ME04730-03 | YES | L11 | [NULL] | 6.90 | FLOWERS-Other |
| 13486876 | 28716F | ME04730-03 | YES | M14 | [NULL] | 6.90 | INFLORESCENCE-Height-Short |
| 13486876 | 28716F | ME04730-03 | YES | P04 | [NULL] | 6.90 | FERTILITY-Fertility-Reduced |
| 13486876 | 28716F | ME04730-04 | YES | I08 | [NULL] | 6.90 | ROSETTE LEAVES-Disorganized Rosette- |
| | | | | | | | Disorganized Rosette |
| 13486876 | 28716F | ME04730-04 | YES | I18 | [NULL] | 6.90 | ROSETTE LEAVES-Shape-Lanceolate |
| 13486876 | 28716F | ME04730-04 | YES | M14 | [NULL] | 6.90 | INFLORESCENCE-Height-Short |
| 13486876 | 28716F | ME04730-05 | YES | I08 | [NULL] | 6.90 | ROSETTE LEAVES-Disorganized Rosette- |
| | | | | | | | Disorganized Rosette |
| 13486876 | 28716F | ME04730-05 | YES | I18 | [NULL] | 6.90 | ROSETTE LEAVES-Shape-Lanceolate |
| 13486876 | 28716F | ME04730-05 | YES | I31 | [NULL] | 6.90 | ROSETTE LEAVES-Other |
| 13486876 | 28716F | ME04730-05 | YES | L11 | [NULL] | 6.90 | FLOWERS-Other |
| 13486876 | 28716F | ME04730-05 | YES | M14 | [NULL] | 6.90 | INFLORESCENCE-Height-Short |
| 13486876 | 28716F | ME04730-05 | YES | P04 | [NULL] | 6.90 | FERTILITY-Fertility-Reduced |
| 13486876 | 28716F | ME04730-06 | YES | I08 | [NULL] | 6.90 | ROSETTE LEAVES-Disorganized Rosette- |
| | | | | | | | Disorganized Rosette |
| 13486876 | 28716F | ME04730-06 | YES | I18 | [NULL] | 6.90 | ROSETTE LEAVES-Shape-Lanceolate |
| 13486876 | 28716F | ME04730-06 | YES | M14 | [NULL] | 6.90 | INFLORESCENCE-Height-Short |
| 13486876 | 28716F | ME04730-07 | YES | I08 | [NULL] | 6.90 | ROSETTE LEAVES-Disorganized Rosette- |
| | | | | | | | Disorganized Rosette |
| 13486876 | 28716F | ME04730-07 | YES | I18 | [NULL] | 6.90 | ROSETTE LEAVES-Shape-Lanceolate |
| 13486876 | 28716F | ME04730-07 | YES | I31 | [NULL] | 6.90 | ROSETTE LEAVES-Other |
| 13486876 | 28716F | ME04730-07 | YES | L11 | [NULL] | 6.90 | FLOWERS-Other |
| 13486876 | 28716F | ME04730-07 | YES | M14 | [NULL] | 6.90 | INFLORESCENCE-Height-Short |
| 13486876 | 28716F | ME04730-07 | YES | P04 | [NULL] | 6.90 | FERTILITY-Fertility-Reduced |
| 13486876 | 28716F | ME04730-08 | YES | I08 | [NULL] | 6.90 | ROSETTE LEAVES-Disorganized Rosette- |
| | | | | | | | Disorganized Rosette |
| 13486876 | 28716F | ME04730-08 | YES | I18 | [NULL] | 6.90 | ROSETTE LEAVES-Shape-Lanceolate |
| 13486876 | 28716F | ME04730-08 | YES | M14 | [NULL] | 6.90 | INFLORESCENCE-Height-Short |
| 13486876 | 28716F | ME04730-09 | YES | I08 | [NULL] | 6.90 | ROSETTE LEAVES-Disorganized Rosette- |
| | | | | | | | Disorganized Rosette |
| 13486876 | 28716F | ME04730-09 | YES | I18 | [NULL] | 6.90 | ROSETTE LEAVES-Shape-Lanceolate |
| 13486876 | 28716F | ME04730-09 | YES | I31 | [NULL] | 6.90 | ROSETTE LEAVES-Other |
| 13486876 | 28716F | ME04730-09 | YES | L11 | [NULL] | 6.90 | FLOWERS-Other |
| 13486876 | 28716F | ME04730-09 | YES | M14 | [NULL] | 6.90 | INFLORESCENCE-Height-Short |
| 13486876 | 28716F | ME04730-09 | YES | P04 | [NULL] | 6.90 | FERTILITY-Fertility-Reduced |
| 13486876 | 28716F | ME04730-10 | YES | I08 | [NULL] | 6.90 | ROSETTE LEAVES-Disorganized Rosette- |
| | | | | | | | Disorganized Rosette |
| 13486876 | 28716F | ME04730-10 | YES | I18 | [NULL] | 6.90 | ROSETTE LEAVES-Shape-Lanceolate |
| 13486876 | 28716F | ME04730-10 | YES | M14 | [NULL] | 6.90 | INFLORESCENCE-Height-Short |
| 13486876 | 32449D | ME04722-01 | YES | I18 | [NULL] | 6.90 | ROSETTE LEAVES-Shape-Lanceolate |
| 13486876 | 32449D | ME04722-02 | YES | I18 | [NULL] | 6.90 | ROSETTE LEAVES-Shape-Lanceolate |
| 13486876 | 32449D | ME04722-03 | YES | I18 | [NULL] | 6.90 | ROSETTE LEAVES-Shape-Lanceolate |
| 13486876 | 32449D | ME04722-04 | YES | I18 | [NULL] | 6.90 | ROSETTE LEAVES-Shape-Lanceolate |
| 13486876 | 32449D | ME04722-05 | YES | I18 | [NULL] | 6.90 | ROSETTE LEAVES-Shape-Lanceolate |
| 13486876 | 32449D | ME04722-06 | YES | I18 | [NULL] | 6.90 | ROSETTE LEAVES-Shape-Lanceolate |
| 13486876 | 32449D | ME04722-07 | YES | I18 | [NULL] | 6.90 | ROSETTE LEAVES-Shape-Lanceolate |
| 13486876 | 32449D | ME04722-08 | YES | I18 | [NULL] | 6.90 | ROSETTE LEAVES-Shape-Lanceolate |
| 13486876 | 32449D | ME04722-09 | YES | I18 | [NULL] | 6.90 | ROSETTE LEAVES-Shape-Lanceolate |
| 13486876 | 32449D | ME04722-10 | YES | I18 | [NULL] | 6.90 | ROSETTE LEAVES-Shape-Lanceolate |
| 13486876 | 32449F | ME05079-01 | QUESTIONABLE | I18 | [NULL] | 6.50 | ROSETTE LEAVES-Shape- |
| | | | | | | | Lanceolate |
| 13486876 | 32449F | ME05079-01 | QUESTIONABLE | I31 | [NULL] | 6.50 | ROSETTE LEAVES-Other |
| 13486876 | 32449F | ME05079-01 | QUESTIONABLE | K16 | [NULL] | 6.50 | CAULINE LEAVES-Shape- |
| | | | | | | | Lanceolate |
| 13486876 | 32449F | ME05079-01 | QUESTIONABLE | K31 | [NULL] | 6.50 | CAULINE LEAVES-Other |
| 13486876 | 32449F | ME05079-02 | NO | [NULL] | [NULL] | [NULL] | [NULL] |
| 13486876 | 32449F | ME05079-03 | NO | [NULL] | [NULL] | [NULL] | [NULL] |
| 13486876 | 32449F | ME05079-04 | NO | [NULL] | [NULL] | [NULL] | [NULL] |
| 13486876 | 32449F | ME05079-05 | NO | [NULL] | [NULL] | [NULL] | [NULL] |
| 13486876 | 32449F | ME05079-06 | NO | [NULL] | [NULL] | [NULL] | [NULL] |
| 13486876 | 32449F | ME05079-07 | NO | [NULL] | [NULL] | [NULL] | [NULL] |
| 13486876 | 32449F | ME05079-08 | NO | [NULL] | [NULL] | [NULL] | [NULL] |
| 13486876 | 32449F | ME05079-09 | NO | [NULL] | [NULL] | [NULL] | [NULL] |
| 13486876 | 32449F | ME05079-10 | NO | [NULL] | [NULL] | [NULL] | [NULL] |
| 13486876 | 34414F | ME04694-01 | YES | I08 | [NULL] | 8.00 | ROSETTE LEAVES-Disorganized Rosette- |
| | | | | | | | Disorganized Rosette |
| 13486876 | 34414F | ME04694-01 | YES | I18 | [NULL] | 8.00 | ROSETTE LEAVES-Shape-Lanceolate |
| 13486876 | 34414F | ME04694-01 | YES | I31 | [NULL] | 8.00 | ROSETTE LEAVES-Other |
| 13486876 | 34414F | ME04694-01 | YES | M25 | [NULL] | 8.00 | INFLORESCENCE-Other |
| 13486876 | 34414F | ME04694-02 | YES | I08 | [NULL] | 8.00 | ROSETTE LEAVES-Disorganized Rosette- |
| | | | | | | | Disorganized Rosette |
| 13486876 | 34414F | ME04694-02 | YES | I18 | [NULL] | 8.00 | ROSETTE LEAVES-Shape-Lanceolate |
| 13486876 | 34414F | ME04694-02 | YES | I31 | [NULL] | 8.00 | ROSETTE LEAVES-Other |
| 13486876 | 34414F | ME04694-02 | YES | M14 | [NULL] | 8.00 | INFLORESCENCE-Height-Short |
| 13486876 | 34414F | ME04694-02 | YES | M25 | [NULL] | 8.00 | INFLORESCENCE-Other |
| 13486876 | 34414F | ME04694-02 | YES | P04 | [NULL] | 8.00 | FERTILITY-Fertility-Reduced |
| 13486876 | 34414F | ME04694-03 | NO | [NULL] | [NULL] | [NULL] | [NULL] |
| 13486876 | 34414F | ME04694-04 | YES | I08 | [NULL] | 8.00 | ROSETTE LEAVES-Disorganized Rosette- |
| | | | | | | | Disorganized Rosette |
| 13486876 | 34414F | ME04694-04 | YES | I18 | [NULL] | 8.00 | ROSETTE LEAVES-Shape-Lanceolate |
| 13486876 | 34414F | ME04694-04 | YES | I31 | [NULL] | 8.00 | ROSETTE LEAVES-Other |
| 13486876 | 34414F | ME04694-04 | YES | M14 | [NULL] | 8.00 | INFLORESCENCE-Height-Short |
| 13486876 | 34414F | ME04694-04 | YES | M25 | [NULL] | 8.00 | INFLORESCENCE-Other |
| 13486876 | 34414F | ME04694-04 | YES | P04 | [NULL] | 8.00 | FERTILITY-Fertility-Reduced |
| 13486876 | 34414F | ME04694-05 | NO | [NULL] | [NULL] | [NULL] | [NULL] |
| 13486876 | 34414F | ME04694-06 | YES | I08 | [NULL] | 8.00 | ROSETTE LEAVES-Disorganized Rosette- |
| | | | | | | | Disorganized Rosette |
| 13486876 | 34414F | ME04694-06 | YES | I18 | [NULL] | 8.00 | ROSETTE LEAVES-Shape-Lanceolate |
| 13486876 | 34414F | ME04694-06 | YES | I31 | [NULL] | 8.00 | ROSETTE LEAVES-Other |
| 13486876 | 34414F | ME04694-06 | YES | M14 | [NULL] | 8.00 | INFLORESCENCE-Height-Short |
| 13486876 | 34414F | ME04694-06 | YES | M25 | [NULL] | 8.00 | INFLORESCENCE-Other |
| 13486876 | 34414F | ME04694-06 | YES | P04 | [NULL] | 8.00 | FERTILITY-Fertility-Reduced |
| 13486876 | 34414F | ME04694-07 | YES | I08 | [NULL] | 8.00 | ROSETTE LEAVES-Disorganized Rosette- |
| | | | | | | | Disorganized Rosette |
| 13486876 | 34414F | ME04694-07 | YES | I18 | [NULL] | 8.00 | ROSETTE LEAVES-Shape-Lanceolate |
| 13486876 | 34414F | ME04694-07 | YES | I31 | [NULL] | 8.00 | ROSETTE LEAVES-Other |
| 13486876 | 34414F | ME04694-07 | YES | M14 | [NULL] | 8.00 | INFLORESCENCE-Height-Short |
| 13486876 | 34414F | ME04694-07 | YES | M25 | [NULL] | 8.00 | INFLORESCENCE-Other |
| 13486876 | 34414F | ME04694-07 | YES | P04 | [NULL] | 8.00 | FERTILITY-Fertility-Reduced |
| 13486876 | 34414F | ME04694-08 | YES | M25 | [NULL] | 8.00 | INFLORESCENCE-Other |
| 13486876 | 34414F | ME04694-09 | NO | [NULL] | [NULL] | [NULL] | [NULL] |
| 13486876 | 34414F | ME04694-10 | NO | [NULL] | [NULL] | [NULL] | [NULL] |
| 13486876 | 35S | ME02742-01 | YES | I18 | [NULL] | 1.14 | ROSETTE LEAVES-Shape-Lanceolate |
| 13486876 | 35S | ME02742-01 | YES | I22 | [NULL] | 6.30 | ROSETTE LEAVES-Shape-Serrate |
| 13486876 | 35S | ME02742-01 | YES | I31 | [NULL] | 1.14 | ROSETTE LEAVES-Other |
| 13486876 | 35S | ME02742-01 | YES | I31 | [NULL] | 6.30 | ROSETTE LEAVES-Other |
| 13486876 | 35S | ME02742-01 | YES | J01 | [NULL] | 1.10 | WHOLE PLANT-Color-Dark Green |
| 13486876 | 35S | ME02742-01 | YES | J01 | [NULL] | 1.14 | WHOLE PLANT-Color-Dark Green |
| 13486876 | 35S | ME02742-01 | YES | J01 | [NULL] | 6.30 | WHOLE PLANT-Color-Dark Green |
| 13486876 | 35S | ME02742-01 | YES | J13 | [NULL] | 1.10 | WHOLE PLANT-Size-Small |
| 13486876 | 35S | ME02742-01 | YES | J13 | [NULL] | 1.14 | WHOLE PLANT-Size-Small |
| 13486876 | 35S | ME02742-01 | YES | J14 | [NULL] | 6.30 | WHOLE PLANT-Other |
| 13486876 | 35S | ME02742-01 | YES | M09 | [NULL] | 6.30 | INFLORESCENCE-Branching-No Branching |
| 13486876 | 35S | ME02742-01 | YES | M13 | [NULL] | 1.10 | INFLORESCENCE-Flowering Time-Late Flowering |
| 13486876 | 35S | ME02742-01 | YES | M13 | [NULL] | 1.14 | INFLORESCENCE-Flowering Time-Late Flowering |
| 13486876 | 35S | ME02742-01 | YES | M13 | [NULL] | 6.30 | INFLORESCENCE-Flowering Time-Late Flowering |
| 13486876 | 35S | ME02742-01 | YES | R02 | [NULL] | 6.30 | SENESCENCE TIME-Senescence Time-Late Senescence |
| 13486876 | 35S | ME02742-02 | YES | I08 | [NULL] | 6.30 | ROSETTE LEAVES-Disorganized Rosette- |
| | | | | | | | Disorganized Rosette |
| 13486876 | 35S | ME02742-02 | YES | I18 | [NULL] | 1.14 | ROSETTE LEAVES-Shape-Lanceolate |
| 13486876 | 35S | ME02742-02 | YES | I31 | [NULL] | 1.14 | ROSETTE LEAVES-Other |
| 13486876 | 35S | ME02742-02 | YES | I31 | [NULL] | 6.30 | ROSETTE LEAVES-Other |
| 13486876 | 35S | ME02742-02 | YES | J01 | [NULL] | 1.10 | WHOLE PLANT-Color-Dark Green |
| 13486876 | 35S | ME02742-02 | YES | J01 | [NULL] | 1.14 | WHOLE PLANT-Color-Dark Green |
| 13486876 | 35S | ME02742-02 | YES | J01 | [NULL] | 6.30 | WHOLE PLANT-Color-Dark Green |
| 13486876 | 35S | ME02742-02 | YES | J09 | [NULL] | 6.30 | WHOLE PLANT-Rosette Shape-Bushy |
| 13486876 | 35S | ME02742-02 | YES | J13 | [NULL] | 1.10 | WHOLE PLANT-Size-Small |
| 13486876 | 35S | ME02742-02 | YES | J13 | [NULL] | 1.14 | WHOLE PLANT-Size-Small |
| 13486876 | 35S | ME02742-02 | YES | J13 | [NULL] | 6.30 | WHOLE PLANT-Size-Small |
| 13486876 | 35S | ME02742-02 | YES | K24 | [NULL] | 6.30 | CAULINE LEAVES-Size-Small |
| 13486876 | 35S | ME02742-02 | YES | K31 | [NULL] | 6.30 | CAULINE LEAVES-Other |
| 13486876 | 35S | ME02742-02 | YES | L10 | [NULL] | 6.30 | FLOWERS-Size-Small |
| 13486876 | 35S | ME02742-02 | YES | M09 | [NULL] | 6.30 | INFLORESCENCE-Branching-No Branching |
| 13486876 | 35S | ME02742-02 | YES | M10 | [NULL] | 6.30 | INFLORESCENCE-Branching-Reduced Apical |
| | | | | | | | Dominance |
| 13486876 | 35S | ME02742-02 | YES | M13 | [NULL] | 1.10 | INFLORESCENCE-Flowering Time-Late Flowering |
| 13486876 | 35S | ME02742-02 | YES | M13 | [NULL] | 1.14 | INFLORESCENCE-Flowering Time-Late Flowering |
| 13486876 | 35S | ME02742-02 | YES | M13 | [NULL] | 6.30 | INFLORESCENCE-Flowering Time-Late Flowering |
| 13486876 | 35S | ME02742-02 | YES | M14 | [NULL] | 6.30 | INFLORESCENCE-Height-Short |
| 13486876 | 35S | ME02742-02 | YES | M17 | [NULL] | 6.30 | INFLORESCENCE-Internode Length-Short Internode |
| 13486876 | 35S | ME02742-02 | YES | M25 | [NULL] | 6.30 | INFLORESCENCE-Other |
| 13486876 | 35S | ME02742-02 | YES | P04 | [NULL] | 6.30 | FERTILITY-Fertility-Reduced |
| 13486876 | 35S | ME02742-02 | YES | R02 | [NULL] | 6.30 | SENESCENCE TIME-Senescence Time-Late Senescence |
| 13486876 | 35S | ME02742-03 | NO | [NULL] | [NULL] | [NULL] | [NULL] |
| 13486876 | 35S | ME02742-04 | NO | [NULL] | [NULL] | [NULL] | [NULL] |
| 13486876 | 35S | ME02742-05 | YES | J11 | [NULL] | 1.10 | WHOLE PLANT-Rosette Shape-Standing |
| 13486876 | 35S | ME02742-05 | YES | J13 | [NULL] | 1.10 | WHOLE PLANT-Size-Small |
| 13486876 | 35S | ME02742-05 | YES | M13 | [NULL] | 1.10 | INFLORESCENCE-Flowering Time-Late Flowering |
| 13486876 | 35S | ME02742-06 | YES | I03 | [NULL] | 1.10 | ROSETTE LEAVES-Curled-Curled 1 |
| 13486876 | 35S | ME02742-06 | YES | J01 | [NULL] | 1.10 | WHOLE PLANT-Color-Dark Green |
| 13486876 | 35S | ME02742-06 | YES | J13 | [NULL] | 1.10 | WHOLE PLANT-Size-Small |
| 13486876 | 35S | ME02742-07 | YES | I31 | [NULL] | 6.50 | ROSETTE LEAVES-Other |
| 13486876 | 35S | ME02742-07 | YES | J01 | [NULL] | 1.10 | WHOLE PLANT-Color-Dark Green |
| 13486876 | 35S | ME02742-07 | YES | J01 | [NULL] | 6.50 | WHOLE PLANT-Color-Dark Green |
| 13486876 | 35S | ME02742-07 | YES | J13 | [NULL] | 1.10 | WHOLE PLANT-Size-Small |
| 13486876 | 35S | ME02742-07 | YES | J13 | [NULL] | 6.50 | WHOLE PLANT-Size-Small |
| 13486876 | 35S | ME02742-07 | YES | K24 | [NULL] | 6.50 | CAULINE LEAVES-Size-Small |
| 13486876 | 35S | ME02742-07 | YES | L11 | [NULL] | 6.50 | FLOWERS-Other |
| 13486876 | 35S | ME02742-07 | YES | M10 | [NULL] | 6.50 | INFLORESCENCE-Branching-Reduced Apical |
| | | | | | | | Dominance |
| 13486876 | 35S | ME02742-07 | YES | M13 | [NULL] | 1.10 | INFLORESCENCE-Flowering Time-Late Flowering |
| 13486876 | 35S | ME02742-07 | YES | M17 | [NULL] | 6.50 | INFLORESCENCE-Internode Length-Short Internode |
| 13486876 | 35S | ME02742-07 | YES | M25 | [NULL] | 6.50 | INFLORESCENCE-Other |
| 13486876 | 35S | ME02742-07 | YES | P04 | [NULL] | 6.50 | FERTILITY-Fertility-Reduced |
| 13486876 | 35S | ME02742-08 | YES | I08 | [NULL] | 6.30 | ROSETTE LEAVES-Disorganized Rosette- |
| | | | | | | | Disorganized Rosette |
| 13486876 | 35S | ME02742-08 | YES | I13 | [NULL] | 6.30 | ROSETTE LEAVES-Petiole Length-Long Petioles |
| 13486876 | 35S | ME02742-08 | YES | I31 | [NULL] | 6.30 | ROSETTE LEAVES-Other |
| 13486876 | 35S | ME02742-08 | YES | J01 | [NULL] | 1.10 | WHOLE PLANT-Color-Dark Green |
| 13486876 | 35S | ME02742-08 | YES | J13 | [NULL] | 1.10 | WHOLE PLANT-Size-Small |
| 13486876 | 35S | ME02742-08 | YES | K31 | [NULL] | 6.30 | CAULINE LEAVES-Other |
| 13486876 | 35S | ME02742-08 | YES | M09 | [NULL] | 6.30 | INFLORESCENCE-Branching-No Branching |
| 13486876 | 35S | ME02742-08 | YES | M13 | [NULL] | 1.10 | INFLORESCENCE-Flowering Time-Late Flowering |
| 13486876 | 35S | ME02742-08 | YES | M13 | [NULL] | 6.30 | INFLORESCENCE-Flowering Time-Late Flowering |
| 13486876 | 35S | ME02742-09 | YES | I08 | [NULL] | 6.30 | ROSETTE LEAVES-Disorganized Rosette- |
| | | | | | | | Disorganized Rosette |
| 13486876 | 35S | ME02742-09 | YES | I31 | [NULL] | 6.30 | ROSETTE LEAVES-Other |
| 13486876 | 35S | ME02742-09 | YES | J01 | [NULL] | 1.10 | WHOLE PLANT-Color-Dark Green |
| 13486876 | 35S | ME02742-09 | YES | J01 | [NULL] | 6.30 | WHOLE PLANT-Color-Dark Green |
| 13486876 | 35S | ME02742-09 | YES | J09 | [NULL] | 6.30 | WHOLE PLANT-Rosette Shape-Bushy |
| 13486876 | 35S | ME02742-09 | YES | J13 | [NULL] | 1.10 | WHOLE PLANT-Size-Small |
| 13486876 | 35S | ME02742-09 | YES | J13 | [NULL] | 6.30 | WHOLE PLANT-Size-Small |
| 13486876 | 35S | ME02742-09 | YES | K24 | [NULL] | 6.30 | CAULINE LEAVES-Size-Small |
| 13486876 | 35S | ME02742-09 | YES | K31 | [NULL] | 6.30 | CAULINE LEAVES-Other |
| 13486876 | 35S | ME02742-09 | YES | L10 | [NULL] | 6.30 | FLOWERS-Size-Small |
| 13486876 | 35S | ME02742-09 | YES | M09 | [NULL] | 6.30 | INFLORESCENCE-Branching-No Branching |
| 13486876 | 35S | ME02742-09 | YES | M10 | [NULL] | 6.30 | INFLORESCENCE-Branching-Reduced Apical |
| | | | | | | | Dominance |
| 13486876 | 35S | ME02742-09 | YES | M13 | [NULL] | 1.10 | INFLORESCENCE-Flowering Time-Late Flowering |
| 13486876 | 35S | ME02742-09 | YES | M13 | [NULL] | 6.30 | INFLORESCENCE-Flowering Time-Late Flowering |
| 13486876 | 35S | ME02742-09 | YES | M14 | [NULL] | 6.30 | INFLORESCENCE-Height-Short |
| 13486876 | 35S | ME02742-09 | YES | M17 | [NULL] | 6.30 | INFLORESCENCE-Internode Length-Short Internode |
| 13486876 | 35S | ME02742-09 | YES | M25 | [NULL] | 6.30 | INFLORESCENCE-Other |
| 13486876 | 35S | ME02742-09 | YES | P04 | [NULL] | 6.30 | FERTILITY-Fertility-Reduced |
| 13486876 | 35S | ME02742-09 | YES | R02 | [NULL] | 6.30 | SENESCENCE TIME-Senescence Time-Late Senescence |
| 13486876 | 35S | ME02742-10 | NO | [NULL] | [NULL] | [NULL] | [NULL] |
| 13486876 | 35S | ME04224-01 | YES | J01 | [NULL] | 5.10 | WHOLE PLANT-Color-Dark Green |
| 13486876 | 35S | ME04224-01 | YES | M14 | [NULL] | 5.10 | INFLORESCENCE-Height-Short |
| 13486876 | 35S | ME04224-02 | YES | J13 | [NULL] | 5.10 | WHOLE PLANT-Size-Small |
| 13486876 | 35S | ME04224-02 | YES | M14 | [NULL] | 5.10 | INFLORESCENCE-Height-Short |
| 13486876 | 35S | ME04224-03 | YES | I31 | [NULL] | 1.14 | ROSETTE LEAVES-Other |
| 13486876 | 35S | ME04224-03 | YES | J01 | [NULL] | 1.14 | WHOLE PLANT-Color-Dark Green |
| 13486876 | 35S | ME04224-03 | YES | J02 | [NULL] | 1.14 | WHOLE PLANT-Color-High Anthocyanin |
| 13486876 | 35S | ME04224-03 | YES | J13 | [NULL] | 1.14 | WHOLE PLANT-Size-Small |
| 13486876 | 35S | ME04224-03 | YES | M13 | [NULL] | 1.14 | INFLORESCENCE-Flowering Time-Late Flowering |
| 13486876 | 35S | ME04224-04 | YES | J13 | [NULL] | 1.14 | WHOLE PLANT-Size-Small |
| 13486876 | 35S | ME04224-04 | YES | K31 | [NULL] | 6.30 | CAULINE LEAVES-Other |
| 13486876 | 35S | ME04224-04 | YES | M13 | [NULL] | 1.14 | INFLORESCENCE-Flowering Time-Late Flowering |
| 13486876 | 35S | ME04224-05 | YES | N02 | [NULL] | 6.50 | SILIQUES-Length-Short |
| 13486967 | 35S | ME02915-01 | YES | I22 | [NULL] | 6.30 | ROSETTE LEAVES-Shape-Serrate |
| 13486967 | 35S | ME02915-01 | YES | I31 | [NULL] | 6.30 | ROSETTE LEAVES-Other |
| 13486967 | 35S | ME02915-01 | YES | J14 | [NULL] | 6.30 | WHOLE PLANT-Other |
| 13486967 | 35S | ME02915-02 | NO | [NULL] | [NULL] | [NULL] | [NULL] |
| 13486967 | 35S | ME02915-03 | NO | [NULL] | [NULL] | [NULL] | [NULL] |
| 13486967 | 35S | ME02915-04 | YES | I03 | [NULL] | 6.30 | ROSETTE LEAVES-Curled-Curled 1 |
| 13486967 | 35S | ME02915-04 | YES | I22 | [NULL] | 6.30 | ROSETTE LEAVES-Shape-Serrate |
| 13486967 | 35S | ME02915-04 | YES | J14 | [NULL] | 6.30 | WHOLE PLANT-Other |
| 13486967 | 35S | ME02915-05 | NO | [NULL] | [NULL] | [NULL] | [NULL] |
| 13486967 | 35S | ME02915-06 | YES | J14 | [NULL] | 6.30 | WHOLE PLANT-Other |
| 13486967 | 35S | ME02915-07 | NO | [NULL] | [NULL] | [NULL] | [NULL] |
| 13486967 | 35S | ME02915-08 | NO | [NULL] | [NULL] | [NULL] | [NULL] |
| 13486967 | 35S | ME02915-09 | YES | I20 | [NULL] | 6.10 | ROSETTE LEAVES-Shape-Oval |
| 13486967 | 35S | ME02915-09 | YES | J01 | [NULL] | 6.10 | WHOLE PLANT-Color-Dark Green |
| 13486967 | 35S | ME02915-09 | YES | J13 | [NULL] | 6.10 | WHOLE PLANT-Size-Small |
| 13486967 | 35S | ME02915-10 | NO | [NULL] | [NULL] | [NULL] | [NULL] |
| 13487308 | 32449 | ME00075-01 | NO | [NULL] | [NULL] | [NULL] | [NULL] |
| 13487308 | 32449 | ME00075-02 | NO | [NULL] | [NULL] | [NULL] | [NULL] |
| 13487308 | 32449 | ME00075-03 | NO | [NULL] | [NULL] | [NULL] | [NULL] |
| 13487308 | 32449 | ME00075-04 | NO | [NULL] | [NULL] | [NULL] | [NULL] |
| 13487308 | 32449 | ME00075-05 | NO | [NULL] | [NULL] | [NULL] | [NULL] |
| 13487308 | 32449 | ME00075-06 | NO | [NULL] | [NULL] | [NULL] | [NULL] |
| 13487308 | 32449 | ME00075-07 | NO | [NULL] | [NULL] | [NULL] | [NULL] |
| 13487308 | 32449 | ME00075-08 | NO | [NULL] | [NULL] | [NULL] | [NULL] |
| 13487308 | 32449 | ME00075-09 | NO | [NULL] | [NULL] | [NULL] | [NULL] |
| 13487308 | 35S | ME03563-01 | YES | J13 | [NULL] | 6.50 | WHOLE PLANT-Size-Small |
| 13487308 | 35S | ME03563-01 | YES | M20 | [NULL] | 6.50 | INFLORESCENCE-Strength-Weak |
| 13487308 | 35S | ME03563-02 | YES | I07 | [NULL] | 6.50 | ROSETTE LEAVES-Curled-Curled 5 |
| 13487308 | 35S | ME03563-02 | YES | J13 | [NULL] | 6.50 | WHOLE PLANT-Size-Small |
| 13487308 | 35S | ME03563-02 | YES | M20 | [NULL] | 6.50 | INFLORESCENCE-Strength-Weak |
| 13487308 | 35S | ME03563-03 | YES | I07 | [NULL] | 6.50 | ROSETTE LEAVES-Curled-Curled 5 |
| 13487308 | 35S | ME03563-03 | YES | J13 | [NULL] | 6.50 | WHOLE PLANT-Size-Small |
| 13487308 | 35S | ME03563-03 | YES | M20 | [NULL] | 6.50 | INFLORESCENCE-Strength-Weak |
| 13487308 | 35S | ME03563-04 | YES | I07 | [NULL] | 6.50 | ROSETTE LEAVES-Curled-Curled 5 |
| 13487308 | 35S | ME03563-04 | YES | J13 | [NULL] | 6.50 | WHOLE PLANT-Size-Small |
| 13487308 | 35S | ME03563-04 | YES | M20 | [NULL] | 6.50 | INFLORESCENCE-Strength-Weak |
| 13487308 | 35S | ME03563-05 | YES | I07 | [NULL] | 6.50 | ROSETTE LEAVES-Curled-Curled 5 |
| 13487308 | 35S | ME03563-05 | YES | J13 | [NULL] | 6.50 | WHOLE PLANT-Size-Small |
| 13487308 | 35S | ME03563-05 | YES | M20 | [NULL] | 6.50 | INFLORESCENCE-Strength-Weak |
| 13487308 | 35S | ME03563-06 | YES | I07 | [NULL] | 6.50 | ROSETTE LEAVES-Curled-Curled 5 |
| 13487308 | 35S | ME03563-06 | YES | J13 | [NULL] | 6.50 | WHOLE PLANT-Size-Small |
| 13487308 | 35S | ME03563-06 | YES | M20 | [NULL] | 6.50 | INFLORESCENCE-Strength-Weak |
| 13487308 | 35S | ME03563-07 | YES | I07 | [NULL] | 6.50 | ROSETTE LEAVES-Curled-Curled 5 |
| 13487308 | 35S | ME03563-07 | YES | J13 | [NULL] | 6.50 | WHOLE PLANT-Size-Small |
| 13487308 | 35S | ME03563-07 | YES | M20 | [NULL] | 6.50 | INFLORESCENCE-Strength-Weak |
| 13487308 | 35S | ME03563-08 | YES | I07 | [NULL] | 6.50 | ROSETTE LEAVES-Curled-Curled 5 |
| 13487308 | 35S | ME03563-08 | YES | J13 | [NULL] | 6.50 | WHOLE PLANT-Size-Small |
| 13487308 | 35S | ME03563-08 | YES | M20 | [NULL] | 6.50 | INFLORESCENCE-Strength-Weak |
| 13487308 | 35S | ME03563-09 | YES | I07 | [NULL] | 6.50 | ROSETTE LEAVES-Curled-Curled 5 |
| 13487308 | 35S | ME03563-09 | YES | J13 | [NULL] | 6.50 | WHOLE PLANT-Size-Small |
| 13487308 | 35S | ME03563-09 | YES | M20 | [NULL] | 6.50 | INFLORESCENCE-Strength-Weak |
| 13487308 | 35S | ME03563-10 | YES | I07 | [NULL] | 6.50 | ROSETTE LEAVES-Curled-Curled 5 |
| 13487308 | 35S | ME03563-10 | YES | J13 | [NULL] | 6.50 | WHOLE PLANT-Size-Small |
| 13487308 | 35S | ME03563-10 | YES | M20 | [NULL] | 6.50 | INFLORESCENCE-Strength-Weak |
| 13487605 | 32449 | ME00258-01 | NO | [NULL] | [NULL] | [NULL] | [NULL] |
| 13487605 | 32449 | ME00258-02 | NO | [NULL] | [NULL] | [NULL] | [NULL] |
| 13487605 | 32449 | ME00258-03 | NO | [NULL] | [NULL] | [NULL] | [NULL] |
| 13487605 | 32449 | ME00258-04 | NO | [NULL] | [NULL] | [NULL] | [NULL] |
| 13487605 | 32449 | ME00258-05 | NO | [NULL] | [NULL] | [NULL] | [NULL] |
| 13487605 | 32449 | ME00258-06 | NO | [NULL] | [NULL] | [NULL] | [NULL] |
| 13487605 | 35S | ME04524-01 | YES | I14 | [NULL] | 6.10 | ROSETTE LEAVES-Petiole Length-Short Petioles |
| 13487605 | 35S | ME04524-01 | YES | I20 | [NULL] | 6.10 | ROSETTE LEAVES-Shape-Oval |
| 13487605 | 35S | ME04524-01 | YES | J12 | [NULL] | 6.10 | WHOLE PLANT-Size-Large |
| 13487605 | 35S | ME04524-02 | YES | J12 | [NULL] | 6.10 | WHOLE PLANT-Size-Large |
| 13487605 | 35S | ME04524-03 | YES | I14 | [NULL] | 6.10 | ROSETTE LEAVES-Petiole Length-Short Petioles |
| 13487605 | 35S | ME04524-03 | YES | I20 | [NULL] | 6.10 | ROSETTE LEAVES-Shape-Oval |
| 13487605 | 35S | ME04524-03 | YES | J12 | [NULL] | 6.10 | WHOLE PLANT-Size-Large |
| 13487605 | 35S | ME04524-04 | YES | I14 | [NULL] | 5.10 | ROSETTE LEAVES-Petiole Length-Short Petioles |
| 13487605 | 35S | ME04524-04 | YES | I20 | [NULL] | 5.10 | ROSETTE LEAVES-Shape-Oval |
| 13487605 | 35S | ME04524-04 | YES | M13 | [NULL] | 5.10 | INFLORESCENCE-Flowering Time-Late Flowering |
| 13487605 | 35S | ME04524-05 | NO | [NULL] | [NULL] | [NULL] | [NULL] |
| 13487605 | 35S | ME04524-06 | YES | I20 | [NULL] | 5.10 | ROSETTE LEAVES-Shape-Oval |
| 13487605 | 35S | ME04524-06 | YES | M13 | [NULL] | 5.10 | INFLORESCENCE-Flowering Time-Late Flowering |
| 13487605 | 35S | ME04524-07 | YES | I08 | [NULL] | 5.10 | ROSETTE LEAVES-Disorganized Rosette- |
| | | | | | | | Disorganized Rosette |
| 13487605 | 35S | ME04524-07 | YES | I31 | [NULL] | 5.10 | ROSETTE LEAVES-Other |
| 13487605 | 35S | ME04524-07 | YES | M13 | [NULL] | 5.10 | INFLORESCENCE-Flowering Time-Late Flowering |
| 13487605 | 35S | ME04524-08 | YES | I20 | [NULL] | 6.00 | ROSETTE LEAVES-Shape-Oval |
| 13487605 | 35S | ME04524-09 | NO | [NULL] | [NULL] | [NULL] | [NULL] |
| 13487605 | 35S | ME04524-10 | NO | [NULL] | [NULL] | [NULL] | [NULL] |
| 13487605 | 35S | ME04874-01 | NO | [NULL] | [NULL] | [NULL] | [NULL] |
| 13487605 | 35S | ME04874-02 | NO | [NULL] | [NULL] | [NULL] | [NULL] |
| 13487605 | 35S | ME04874-03 | YES | I20 | [NULL] | 1.14 | ROSETTE LEAVES-Shape-Oval |
| 13487605 | 35S | ME04874-03 | YES | J13 | [NULL] | 1.14 | WHOLE PLANT-Size-Small |
| 13487605 | 35S | ME04874-03 | YES | M13 | [NULL] | 1.14 | INFLORESCENCE-Flowering Time-Late Flowering |
| 13487605 | 35S | ME04874-03 | YES | M14 | [NULL] | 1.14 | INFLORESCENCE-Height-Short |
| 13487605 | 35S | ME04874-04 | NO | [NULL] | [NULL] | [NULL] | [NULL] |
| 13487605 | 35S | ME04874-05 | YES | I04 | [NULL] | 1.14 | ROSETTE LEAVES-Curled-Curled 2 |
| 13487605 | 35S | ME04874-05 | YES | I20 | [NULL] | 1.08 | ROSETTE LEAVES-Shape-Oval |
| 13487605 | 35S | ME04874-05 | YES | I20 | [NULL] | 1.14 | ROSETTE LEAVES-Shape-Oval |
| 13487605 | 35S | ME04874-05 | YES | I30 | [NULL] | 1.08 | ROSETTE LEAVES-Wax-Glossy |
| 13487605 | 35S | ME04874-05 | YES | J13 | [NULL] | 1.14 | WHOLE PLANT-Size-Small |
| 13487605 | 35S | ME04874-05 | YES | M13 | [NULL] | 1.14 | INFLORESCENCE-Flowering Time-Late Flowering |
| 13487605 | 35S | ME04874-05 | YES | M14 | [NULL] | 1.14 | INFLORESCENCE-Height-Short |
| 13487605 | 35S | ME04874-06 | NO | [NULL] | [NULL] | [NULL] | [NULL] |
| 13487605 | 35S | ME04874-07 | NO | [NULL] | [NULL] | [NULL] | [NULL] |
| 13487605 | 35S | ME04874-08 | YES | I05 | [NULL] | 5.10 | ROSETTE LEAVES-Curled-Curled 3 |
| 13487605 | 35S | ME04874-08 | YES | I20 | [NULL] | 5.10 | ROSETTE LEAVES-Shape-Oval |
| 13487605 | 35S | ME04874-08 | YES | I22 | [NULL] | 5.10 | ROSETTE LEAVES-Shape-Serrate |
| 13487605 | 35S | ME04874-08 | YES | M13 | [NULL] | 5.10 | INFLORESCENCE-Flowering Time-Late Flowering |
| 13487605 | 35S | ME04874-08 | YES | M14 | [NULL] | 5.10 | INFLORESCENCE-Height-Short |
| 13487605 | 35S | ME04874-09 | YES | I05 | [NULL] | 5.10 | ROSETTE LEAVES-Curled-Curled 3 |
| 13487605 | 35S | ME04874-09 | YES | I20 | [NULL] | 5.10 | ROSETTE LEAVES-Shape-Oval |
| 13487605 | 35S | ME04874-09 | YES | I22 | [NULL] | 5.10 | ROSETTE LEAVES-Shape-Serrate |
| 13487605 | 35S | ME04874-09 | YES | M13 | [NULL] | 5.10 | INFLORESCENCE-Flowering Time-Late Flowering |
| 13487605 | 35S | ME04874-09 | YES | M14 | [NULL] | 5.10 | INFLORESCENCE-Height-Short |
| 13487605 | 35S | ME04874-10 | YES | I22 | [NULL] | 6.10 | ROSETTE LEAVES-Shape-Serrate |
| 13487605 | 35S | ME04874-10 | YES | I31 | [NULL] | 6.10 | ROSETTE LEAVES-Other |
| 13487605 | 35S | ME04874-10 | YES | J12 | [NULL] | 6.10 | WHOLE PLANT-Size-Large |
| 13487771 | 35S | ME04917-01 | NO | [NULL] | [NULL] | [NULL] | [NULL] |
| 13487771 | 35S | ME04917-02 | YES | I06 | [NULL] | 6.10 | ROSETTE LEAVES-Curled-Curled 4 |
| 13487771 | 35S | ME04917-02 | YES | I31 | [NULL] | 6.10 | ROSETTE LEAVES-Other |
| 13487771 | 35S | ME04917-03 | NO | [NULL] | [NULL] | [NULL] | [NULL] |
| 13487771 | 35S | ME04917-04 | NO | [NULL] | [NULL] | [NULL] | [NULL] |
| 13487771 | 35S | ME04917-05 | NO | [NULL] | [NULL] | [NULL] | [NULL] |
| 13487771 | 35S | ME04917-06 | YES | I06 | [NULL] | 6.10 | ROSETTE LEAVES-Curled-Curled 4 |
| 13487771 | 35S | ME04917-06 | YES | I31 | [NULL] | 6.10 | ROSETTE LEAVES-Other |
| 13487771 | 35S | ME04917-07 | NO | [NULL] | [NULL] | [NULL] | [NULL] |
| 13487771 | 35S | ME04917-08 | YES | I06 | [NULL] | 5.10 | ROSETTE LEAVES-Curled-Curled 4 |
| 13487771 | 35S | ME04917-08 | YES | I31 | [NULL] | 5.10 | ROSETTE LEAVES-Other |
| 13487771 | 35S | ME04917-09 | YES | I06 | [NULL] | 5.10 | ROSETTE LEAVES-Curled-Curled 4 |
| 13487771 | 35S | ME04917-09 | YES | I31 | [NULL] | 5.10 | ROSETTE LEAVES-Other |
| 13487771 | 35S | ME04917-10 | YES | I06 | [NULL] | 5.10 | ROSETTE LEAVES-Curled-Curled 4 |
| 13487771 | 35S | ME04917-10 | YES | I31 | [NULL] | 5.10 | ROSETTE LEAVES-Other |
| 13488537 | 35S | ME05440-01 | NO | [NULL] | [NULL] | [NULL] | [NULL] |
| 13488537 | 35S | ME05440-02 | NO | [NULL] | [NULL] | [NULL] | [NULL] |
| 13488537 | 35S | ME05440-03 | NO | [NULL] | [NULL] | [NULL] | [NULL] |
| 13488537 | 35S | ME05440-04 | NO | [NULL] | [NULL] | [NULL] | [NULL] |
| 13488537 | 35S | ME05440-05 | NO | [NULL] | [NULL] | [NULL] | [NULL] |
| 13488537 | 35S | ME05440-06 | YES | P04 | [NULL] | 6.90 | FERTILITY-Fertility-Reduced |
| 13488537 | 35S | ME05440-06 | YES | R01 | [NULL] | 6.90 | SENESCENCE TIME-Senescence Time-Early |
| | | | | | | | Senescence |
| 13488537 | 35S | ME05440-07 | YES | P04 | [NULL] | 6.50 | FERTILITY-Fertility-Reduced |
| 13488537 | 35S | ME05440-08 | NO | [NULL] | [NULL] | [NULL] | [NULL] |
| 13488537 | 35S | ME05440-09 | YES | P04 | [NULL] | 6.50 | FERTILITY-Fertility-Reduced |
| 13488537 | 35S | ME05440-10 | NO | [NULL] | [NULL] | [NULL] | [NULL] |
| 13488574 | 35S | ME02509-01 | YES | J13 | [NULL] | 5.10 | WHOLE PLANT-Size-Small |
| 13488574 | 35S | ME02509-01 | YES | M13 | [NULL] | 5.10 | INFLORESCENCE-Flowering Time-Late Flowering |
| 13488574 | 35S | ME02509-02 | NO | [NULL] | [NULL] | [NULL] | [NULL] |
| 13488574 | 35S | ME02509-03 | YES | J13 | [NULL] | 6.00 | WHOLE PLANT-Size-Small |
| 13488574 | 35S | ME02509-03 | YES | M13 | [NULL] | 6.00 | INFLORESCENCE-Flowering Time-Late Flowering |
| 13488574 | 35S | ME02509-04 | YES | J13 | [NULL] | 6.00 | WHOLE PLANT-Size-Small |
| 13488574 | 35S | ME02509-04 | YES | M13 | [NULL] | 6.00 | INFLORESCENCE-Flowering Time-Late Flowering |
| 13488574 | 35S | ME02509-05 | NO | [NULL] | [NULL] | [NULL] | [NULL] |
| 13488574 | 35S | ME02509-06 | NO | [NULL] | [NULL] | [NULL] | [NULL] |
| 13488574 | 35S | ME02509-07 | YES | J13 | [NULL] | 6.00 | WHOLE PLANT-Size-Small |
| 13488574 | 35S | ME02509-07 | YES | M13 | [NULL] | 6.00 | INFLORESCENCE-Flowering Time-Late Flowering |
| 13488574 | 35S | ME02509-08 | NO | [NULL] | [NULL] | [NULL] | [NULL] |
| 13489309 | 32449 | ME00505-01 | NO | [NULL] | [NULL] | [NULL] | [NULL] |
| 13489309 | 32449 | ME00505-02 | NO | [NULL] | [NULL] | [NULL] | [NULL] |
| 13489309 | 32449 | ME00505-03 | NO | [NULL] | [NULL] | [NULL] | [NULL] |
| 13489309 | 32449 | ME00505-04 | NO | [NULL] | [NULL] | [NULL] | [NULL] |
| 13489309 | 32449 | ME00505-05 | NO | [NULL] | [NULL] | [NULL] | [NULL] |
| 13489309 | 35S | ME05553-01 | NO | [NULL] | [NULL] | [NULL] | [NULL] |
| 13489309 | 35S | ME05553-02 | NO | [NULL] | [NULL] | [NULL] | [NULL] |
| 13489309 | 35S | ME05553-03 | YES | J14 | [NULL] | 6.90 | WHOLE PLANT-Other |
| 13489309 | 35S | ME05553-03 | YES | K01 | [NULL] | 6.10 | CAULINE LEAVES-Curled-Corkscrew |
| 13489309 | 35S | ME05553-03 | YES | L11 | [NULL] | 6.10 | FLOWERS-Other |
| 13489309 | 35S | ME05553-03 | YES | M10 | [NULL] | 6.10 | INFLORESCENCE-Branching-Reduced Apical |
| | | | | | | | Dominance |
| 13489309 | 35S | ME05553-03 | YES | M13 | [NULL] | 6.10 | INFLORESCENCE-Flowering Time-Late Flowering |
| 13489309 | 35S | ME05553-03 | YES | M14 | [NULL] | 6.10 | INFLORESCENCE-Height-Short |
| 13489309 | 35S | ME05553-03 | YES | M14 | [NULL] | 6.90 | INFLORESCENCE-Height-Short |
| 13489309 | 35S | ME05553-03 | YES | M17 | [NULL] | 6.10 | INFLORESCENCE-Internode Length-Short Internode |
| 13489309 | 35S | ME05553-03 | YES | M25 | [NULL] | 6.10 | INFLORESCENCE-Other |
| 13489309 | 35S | ME05553-03 | YES | M25 | [NULL] | 6.90 | INFLORESCENCE-Other |
| 13489309 | 35S | ME05553-03 | YES | P04 | [NULL] | 6.10 | FERTILITY-Fertility-Reduced |
| 13489309 | 35S | ME05553-03 | YES | P05 | [NULL] | 6.90 | FERTILITY-Fertility-Sterile |
| 13489309 | 35S | ME05553-04 | NO | [NULL] | [NULL] | [NULL] | [NULL] |
| 13489309 | 35S | ME05553-05 | NO | [NULL] | [NULL] | [NULL] | [NULL] |
| 13489309 | 35S | ME05553-06 | NO | [NULL] | [NULL] | [NULL] | [NULL] |
| 13489309 | 35S | ME05553-07 | YES | J14 | [NULL] | 6.90 | WHOLE PLANT-Other |
| 13489309 | 35S | ME05553-07 | YES | K01 | [NULL] | 6.10 | CAULINE LEAVES-Curled-Corkscrew |
| 13489309 | 35S | ME05553-07 | YES | L11 | [NULL] | 6.10 | FLOWERS-Other |
| 13489309 | 35S | ME05553-07 | YES | M10 | [NULL] | 6.10 | INFLORESCENCE-Branching-Reduced Apical |
| | | | | | | | Dominance |
| 13489309 | 35S | ME05553-07 | YES | M13 | [NULL] | 6.10 | INFLORESCENCE-Flowering Time-Late Flowering |
| 13489309 | 35S | ME05553-07 | YES | M14 | [NULL] | 6.10 | INFLORESCENCE-Height-Short |
| 13489309 | 35S | ME05553-07 | YES | M14 | [NULL] | 6.90 | INFLORESCENCE-Height-Short |
| 13489309 | 35S | ME05553-07 | YES | M17 | [NULL] | 6.10 | INFLORESCENCE-Internode Length-Short Internode |
| 13489309 | 35S | ME05553-07 | YES | M25 | [NULL] | 6.10 | INFLORESCENCE-Other |
| 13489309 | 35S | ME05553-07 | YES | M25 | [NULL] | 6.90 | INFLORESCENCE-Other |
| 13489309 | 35S | ME05553-07 | YES | P04 | [NULL] | 6.10 | FERTILITY-Fertility-Reduced |
| 13489309 | 35S | ME05553-07 | YES | P05 | [NULL] | 6.90 | FERTILITY-Fertility-Sterile |
| 13489309 | 35S | ME05553-08 | NO | [NULL] | [NULL] | [NULL] | [NULL] |
| 13489309 | 35S | ME05553-09 | NO | [NULL] | [NULL] | [NULL] | [NULL] |
| 13489309 | 35S | ME05553-10 | YES | J14 | [NULL] | 6.90 | WHOLE PLANT-Other |
| 13489309 | 35S | ME05553-10 | YES | K01 | [NULL] | 6.10 | CAULINE LEAVES-Curled-Corkscrew |
| 13489309 | 35S | ME05553-10 | YES | L11 | [NULL] | 6.10 | FLOWERS-Other |
| 13489309 | 35S | ME05553-10 | YES | M10 | [NULL] | 6.10 | INFLORESCENCE-Branching-Reduced Apical |
| | | | | | | | Dominance |
| 13489309 | 35S | ME05553-10 | YES | M13 | [NULL] | 6.10 | INFLORESCENCE-Flowering Time-Late Flowering |
| 13489309 | 35S | ME05553-10 | YES | M14 | [NULL] | 6.10 | INFLORESCENCE-Height-Short |
| 13489309 | 35S | ME05553-10 | YES | M14 | [NULL] | 6.90 | INFLORESCENCE-Height-Short |
| 13489309 | 35S | ME05553-10 | YES | M17 | [NULL] | 6.10 | INFLORESCENCE-Internode Length-Short Internode |
| 13489309 | 35S | ME05553-10 | YES | M25 | [NULL] | 6.10 | INFLORESCENCE-Other |
| 13489309 | 35S | ME05553-10 | YES | M25 | [NULL] | 6.90 | INFLORESCENCE-Other |
| 13489309 | 35S | ME05553-10 | YES | P04 | [NULL] | 6.10 | FERTILITY-Fertility-Reduced |
| 13489309 | 35S | ME05553-10 | YES | P05 | [NULL] | 6.90 | FERTILITY-Fertility-Sterile |
| 13489408 | 35S | ME06945-01 | YES | I02 | [NULL] | 1.06 | ROSETTE LEAVES-Curled-Cup-shaped |
| 13489408 | 35S | ME06945-01 | YES | I08 | [NULL] | 6.50 | ROSETTE LEAVES-Disorganized Rosette- |
| | | | | | | | Disorganized Rosette |
| 13489408 | 35S | ME06945-01 | YES | I18 | [NULL] | 1.06 | ROSETTE LEAVES-Shape-Lanceolate |
| 13489408 | 35S | ME06945-01 | YES | I18 | [NULL] | 6.50 | ROSETTE LEAVES-Shape-Lanceolate |
| 13489408 | 35S | ME06945-01 | YES | I31 | [NULL] | 6.50 | ROSETTE LEAVES-Other |
| 13489408 | 35S | ME06945-01 | YES | J13 | [NULL] | 1.06 | WHOLE PLANT-Size-Small |
| 13489408 | 35S | ME06945-01 | YES | J13 | [NULL] | 6.50 | WHOLE PLANT-Size-Small |
| 13489408 | 35S | ME06945-01 | YES | J14 | [NULL] | 1.06 | WHOLE PLANT-Other |
| 13489408 | 35S | ME06945-01 | YES | M13 | [NULL] | 6.50 | INFLORESCENCE-Flowering Time-Late Flowering |
| 13489408 | 35S | ME06945-01 | YES | M14 | [NULL] | 6.50 | INFLORESCENCE-Height-Short |
| 13489408 | 35S | ME06945-02 | YES | I02 | [NULL] | 1.06 | ROSETTE LEAVES-Curled-Cup-shaped |
| 13489408 | 35S | ME06945-02 | YES | I08 | [NULL] | 6.50 | ROSETTE LEAVES-Disorganized Rosette- |
| | | | | | | | Disorganized Rosette |
| 13489408 | 35S | ME06945-02 | YES | I18 | [NULL] | 1.06 | ROSETTE LEAVES-Shape-Lanceolate |
| 13489408 | 35S | ME06945-02 | YES | I18 | [NULL] | 6.50 | ROSETTE LEAVES-Shape-Lanceolate |
| 13489408 | 35S | ME06945-02 | YES | I31 | [NULL] | 6.50 | ROSETTE LEAVES-Other |
| 13489408 | 35S | ME06945-02 | YES | J13 | [NULL] | 1.06 | WHOLE PLANT-Size-Small |
| 13489408 | 35S | ME06945-02 | YES | J13 | [NULL] | 6.50 | WHOLE PLANT-Size-Small |
| 13489408 | 35S | ME06945-02 | YES | J14 | [NULL] | 1.06 | WHOLE PLANT-Other |
| 13489408 | 35S | ME06945-02 | YES | M13 | [NULL] | 6.50 | INFLORESCENCE-Flowering Time-Late Flowering |
| 13489408 | 35S | ME06945-02 | YES | M14 | [NULL] | 6.50 | INFLORESCENCE-Height-Short |
| 13489408 | 35S | ME06945-03 | NO | [NULL] | [NULL] | [NULL] | [NULL] |
| 13489408 | 35S | ME06945-04 | NO | [NULL] | [NULL] | [NULL] | [NULL] |
| 13489408 | 35S | ME06945-05 | YES | I02 | [NULL] | 1.04 | ROSETTE LEAVES-Curled-Cup-shaped |
| 13489408 | 35S | ME06945-05 | YES | I08 | [NULL] | 6.50 | ROSETTE LEAVES-Disorganized Rosette- |
| | | | | | | | Disorganized Rosette |
| 13489408 | 35S | ME06945-05 | YES | I18 | [NULL] | 1.04 | ROSETTE LEAVES-Shape-Lanceolate |
| 13489408 | 35S | ME06945-05 | YES | I18 | [NULL] | 6.50 | ROSETTE LEAVES-Shape-Lanceolate |
| 13489408 | 35S | ME06945-05 | YES | I31 | [NULL] | 6.50 | ROSETTE LEAVES-Other |
| 13489408 | 35S | ME06945-05 | YES | J13 | [NULL] | 1.04 | WHOLE PLANT-Size-Small |
| 13489408 | 35S | ME06945-05 | YES | J13 | [NULL] | 6.50 | WHOLE PLANT-Size-Small |
| 13489408 | 35S | ME06945-05 | YES | J14 | [NULL] | 1.04 | WHOLE PLANT-Other |
| 13489408 | 35S | ME06945-05 | YES | M13 | [NULL] | 6.50 | INFLORESCENCE-Flowering Time-Late Flowering |
| 13489408 | 35S | ME06945-05 | YES | M14 | [NULL] | 6.50 | INFLORESCENCE-Height-Short |
| 13489408 | 35S | ME06945-06 | YES | I02 | [NULL] | 1.05 | ROSETTE LEAVES-Curled-Cup-shaped |
| 13489408 | 35S | ME06945-06 | YES | I08 | [NULL] | 6.50 | ROSETTE LEAVES-Disorganized Rosette- |
| | | | | | | | Disorganized Rosette |
| 13489408 | 35S | ME06945-06 | YES | I18 | [NULL] | 1.05 | ROSETTE LEAVES-Shape-Lanceolate |
| 13489408 | 35S | ME06945-06 | YES | I18 | [NULL] | 6.50 | ROSETTE LEAVES-Shape-Lanceolate |
| 13489408 | 35S | ME06945-06 | YES | I31 | [NULL] | 6.50 | ROSETTE LEAVES-Other |
| 13489408 | 35S | ME06945-06 | YES | J13 | [NULL] | 1.05 | WHOLE PLANT-Size-Small |
| 13489408 | 35S | ME06945-06 | YES | J13 | [NULL] | 6.50 | WHOLE PLANT-Size-Small |
| 13489408 | 35S | ME06945-06 | YES | J14 | [NULL] | 1.05 | WHOLE PLANT-Other |
| 13489408 | 35S | ME06945-06 | YES | M13 | [NULL] | 6.50 | INFLORESCENCE-Flowering Time-Late Flowering |
| 13489408 | 35S | ME06945-06 | YES | M14 | [NULL] | 6.50 | INFLORESCENCE-Height-Short |
| 13489408 | 35S | ME06945-07 | NO | [NULL] | [NULL] | [NULL] | [NULL] |
| 13489408 | 35S | ME06945-08 | YES | I02 | [NULL] | 1.06 | ROSETTE LEAVES-Curled-Cup-shaped |
| 13489408 | 35S | ME06945-08 | YES | I18 | [NULL] | 1.06 | ROSETTE LEAVES-Shape-Lanceolate |
| 13489408 | 35S | ME06945-08 | YES | J13 | [NULL] | 1.06 | WHOLE PLANT-Size-Small |
| 13489408 | 35S | ME06945-08 | YES | J14 | [NULL] | 1.06 | WHOLE PLANT-Other |
| 13489408 | 35S | ME06945-09 | YES | I02 | [NULL] | 1.05 | ROSETTE LEAVES-Curled-Cup-shaped |
| 13489408 | 35S | ME06945-09 | YES | I08 | [NULL] | 6.50 | ROSETTE LEAVES-Disorganized Rosette- |
| | | | | | | | Disorganized Rosette |
| 13489408 | 35S | ME06945-09 | YES | I18 | [NULL] | 1.05 | ROSETTE LEAVES-Shape-Lanceolate |
| 13489408 | 35S | ME06945-09 | YES | I18 | [NULL] | 6.50 | ROSETTE LEAVES-Shape-Lanceolate |
| 13489408 | 35S | ME06945-09 | YES | I31 | [NULL] | 6.50 | ROSETTE LEAVES-Other |
| 13489408 | 35S | ME06945-09 | YES | J13 | [NULL] | 1.05 | WHOLE PLANT-Size-Small |
| 13489408 | 35S | ME06945-09 | YES | J13 | [NULL] | 6.50 | WHOLE PLANT-Size-Small |
| 13489408 | 35S | ME06945-09 | YES | J14 | [NULL] | 1.05 | WHOLE PLANT-Other |
| 13489408 | 35S | ME06945-09 | YES | M13 | [NULL] | 6.50 | INFLORESCENCE-Flowering Time-Late Flowering |
| 13489408 | 35S | ME06945-09 | YES | M14 | [NULL] | 6.50 | INFLORESCENCE-Height-Short |
| 13489408 | 35S | ME06945-10 | NO | [NULL] | [NULL] | [NULL] | [NULL] |
| 13489786 | 32449 | ME00550-01 | NO | [NULL] | [NULL] | [NULL] | [NULL] |
| 13489786 | 32449 | ME00550-02 | NO | [NULL] | [NULL] | [NULL] | [NULL] |
| 13489786 | 32449 | ME00550-03 | NO | [NULL] | [NULL] | [NULL] | [NULL] |
| 13489786 | 32449 | ME00550-04 | NO | [NULL] | [NULL] | [NULL] | [NULL] |
| 13489786 | 32449 | ME00550-05 | NO | [NULL] | [NULL] | [NULL] | [NULL] |
| 13489786 | 35S | ME04832-01 | NO | [NULL] | [NULL] | [NULL] | [NULL] |
| 13489786 | 35S | ME04832-02 | NO | [NULL] | [NULL] | [NULL] | [NULL] |
| 13489786 | 35S | ME04832-03 | YES | I31 | [NULL] | 5.10 | ROSETTE LEAVES-Other |
| 13489786 | 35S | ME04832-03 | YES | I31 | [NULL] | 6.30 | ROSETTE LEAVES-Other |
| 13489786 | 35S | ME04832-03 | YES | J13 | [NULL] | 5.10 | WHOLE PLANT-Size-Small |
| 13489786 | 35S | ME04832-03 | YES | J13 | [NULL] | 6.30 | WHOLE PLANT-Size-Small |
| 13489786 | 35S | ME04832-03 | YES | M14 | [NULL] | 6.30 | INFLORESCENCE-Height-Short |
| 13489786 | 35S | ME04832-03 | YES | M20 | [NULL] | 6.30 | INFLORESCENCE-Strength-Weak |
| 13489786 | 35S | ME04832-04 | NO | [NULL] | [NULL] | [NULL] | [NULL] |
| 13489786 | 35S | ME04832-05 | NO | [NULL] | [NULL] | [NULL] | [NULL] |
| 13489786 | 35S | ME04832-06 | YES | I31 | [NULL] | 6.30 | ROSETTE LEAVES-Other |
| 13489786 | 35S | ME04832-07 | NO | [NULL] | [NULL] | [NULL] | [NULL] |
| 13489786 | 35S | ME04832-08 | YES | I31 | [NULL] | 6.30 | ROSETTE LEAVES-Other |
| 13489786 | 35S | ME04832-09 | NO | [NULL] | [NULL] | [NULL] | [NULL] |
| 13489786 | 35S | ME04832-10 | QUESTIONABLE | I22 | [NULL] | 5.10 | ROSETTE LEAVES-Shape-Serrate |
| 13489838 | 35S | ME02623-01 | YES | P04 | [NULL] | 6.30 | FERTILITY-Fertility-Reduced |
| 13489838 | 35S | ME02623-02 | YES | P04 | [NULL] | 6.30 | FERTILITY-Fertility-Reduced |
| 13489838 | 35S | ME02623-03 | NO | [NULL] | [NULL] | [NULL] | [NULL] |
| 13489838 | 35S | ME02623-04 | YES | I18 | [NULL] | 6.30 | ROSETTE LEAVES-Shape-Lanceolate |
| 13489838 | 35S | ME02623-04 | YES | I31 | [NULL] | 6.30 | ROSETTE LEAVES-Other |
| 13489838 | 35S | ME02623-05 | YES | P04 | [NULL] | 6.30 | FERTILITY-Fertility-Reduced |
| 13489838 | 35S | ME02623-06 | YES | P04 | [NULL] | 6.30 | FERTILITY-Fertility-Reduced |
| 13489838 | 35S | ME02623-07 | NO | [NULL] | [NULL] | [NULL] | [NULL] |
| 13489838 | 35S | ME02623-08 | NO | [NULL] | [NULL] | [NULL] | [NULL] |
| 13489838 | 35S | ME02623-09 | QUESTIONABLE | I08 | [NULL] | 6.30 | ROSETTE LEAVES-Disorganized |
| | | | | | | | Rosette-Disorganized Rosette |
| 13489838 | 35S | ME02623-09 | QUESTIONABLE | I31 | [NULL] | 6.30 | ROSETTE LEAVES-Other |
| 13489838 | 35S | ME02623-09 | QUESTIONABLE | M13 | [NULL] | 6.30 | INFLORESCENCE-Flowering Time-Late |
| | | | | | | | Flowering |
| 13489838 | 35S | ME02623-10 | NO | [NULL] | [NULL] | [NULL] | [NULL] |
| 13490147 | 32449 | ME00196-01 | NO | [NULL] | [NULL] | [NULL] | [NULL] |
| 13490147 | 32449 | ME00196-02 | NO | [NULL] | [NULL] | [NULL] | [NULL] |
| 13490147 | 32449 | ME00196-03 | NO | [NULL] | [NULL] | [NULL] | [NULL] |
| 13490147 | 35S | ME02702-01 | YES | A24 | [NULL] | 6.50 | COTYLEDONS-Other |
| 13490147 | 35S | ME02702-02 | NO | [NULL] | [NULL] | [NULL] | [NULL] |
| 13490147 | 35S | ME02702-03 | NO | [NULL] | [NULL] | [NULL] | [NULL] |
| 13490147 | 35S | ME02702-04 | NO | [NULL] | [NULL] | [NULL] | [NULL] |
| 13490147 | 35S | ME02702-05 | YES | A24 | [NULL] | 6.50 | COTYLEDONS-Other |
| 13490147 | 35S | ME02702-06 | NO | [NULL] | [NULL] | [NULL] | [NULL] |
| 13490147 | 35S | ME02702-07 | YES | A24 | [NULL] | 6.50 | COTYLEDONS-Other |
| 13490147 | 35S | ME02702-08 | NO | [NULL] | [NULL] | [NULL] | [NULL] |
| 13490147 | 35S | ME02702-09 | YES | A24 | [NULL] | 6.50 | COTYLEDONS-Other |
| 13490147 | 35S | ME02702-10 | YES | A24 | [NULL] | 6.50 | COTYLEDONS-Other |
| 13490207 | 35S | ME02627-01 | YES | P04 | [NULL] | 6.30 | FERTILITY-Fertility-Reduced |
| 13490207 | 35S | ME02627-02 | NO | [NULL] | [NULL] | [NULL] | [NULL] |
| 13490207 | 35S | ME02627-03 | NO | [NULL] | [NULL] | [NULL] | [NULL] |
| 13490207 | 35S | ME02627-04 | YES | I31 | [NULL] | 6.30 | ROSETTE LEAVES-Other |
| 13490207 | 35S | ME02627-04 | YES | P04 | [NULL] | 6.30 | FERTILITY-Fertility-Reduced |
| 13490207 | 35S | ME02627-05 | YES | P04 | [NULL] | 6.30 | FERTILITY-Fertility-Reduced |
| 13490207 | 35S | ME02627-06 | NO | [NULL] | [NULL] | [NULL] | [NULL] |
| 13490207 | 35S | ME02627-07 | NO | [NULL] | [NULL] | [NULL] | [NULL] |
| 13490207 | 35S | ME02627-08 | NO | [NULL] | [NULL] | [NULL] | [NULL] |
| 13490207 | 35S | ME02627-09 | NO | [NULL] | [NULL] | [NULL] | [NULL] |
| 13490207 | 35S | ME02627-10 | YES | P04 | [NULL] | 6.30 | FERTILITY-Fertility-Reduced |
| 13490207 | 35S | ME03907-01 | NO | [NULL] | [NULL] | [NULL] | [NULL] |
| 13490207 | 35S | ME03907-02 | NO | [NULL] | [NULL] | [NULL] | [NULL] |
| 13490207 | 35S | ME03907-03 | NO | [NULL] | [NULL] | [NULL] | [NULL] |
| 13490207 | 35S | ME03907-04 | NO | [NULL] | [NULL] | [NULL] | [NULL] |
| 13490207 | 35S | ME03907-05 | NO | [NULL] | [NULL] | [NULL] | [NULL] |
| 13490207 | 35S | ME03907-06 | NO | [NULL] | [NULL] | [NULL] | [NULL] |
| 13490207 | 35S | ME03907-07 | NO | [NULL] | [NULL] | [NULL] | [NULL] |
| 13490207 | 35S | ME03907-08 | NO | [NULL] | [NULL] | [NULL] | [NULL] |
| 13490207 | 35S | ME03907-09 | NO | [NULL] | [NULL] | [NULL] | [NULL] |
| 13490207 | 35S | ME03907-10 | NO | [NULL] | [NULL] | [NULL] | [NULL] |
| 13490630 | 35S | ME04235-01 | YES | B01 | [NULL] | 6.50 | HYPOCOTYL-Length-Long |
| 13490630 | 35S | ME04235-02 | NO | [NULL] | [NULL] | [NULL] | [NULL] |
| 13490630 | 35S | ME04235-03 | NO | [NULL] | [NULL] | [NULL] | [NULL] |
| 13490630 | 35S | ME04235-04 | NO | [NULL] | [NULL] | [NULL] | [NULL] |
| 13490630 | 35S | ME04235-05 | NO | [NULL] | [NULL] | [NULL] | [NULL] |
| 13490630 | 35S | ME04235-06 | YES | B01 | [NULL] | 6.50 | HYPOCOTYL-Length-Long |
| 13490630 | 35S | ME04235-06 | YES | J13 | [NULL] | 6.50 | WHOLE PLANT-Size-Small |
| 13490630 | 35S | ME04235-07 | YES | B01 | [NULL] | 6.50 | HYPOCOTYL-Length-Long |
| 13490630 | 35S | ME04235-07 | YES | J13 | [NULL] | 6.50 | WHOLE PLANT-Size-Small |
| 13490630 | 35S | ME04235-08 | YES | J13 | [NULL] | 6.50 | WHOLE PLANT-Size-Small |
| 13490630 | 35S | ME04235-09 | YES | B01 | [NULL] | 6.50 | HYPOCOTYL-Length-Long |
| 13490630 | 35S | ME04235-09 | YES | J13 | [NULL] | 6.30 | WHOLE PLANT-Size-Small |
| 13490630 | 35S | ME04235-09 | YES | J13 | [NULL] | 6.50 | WHOLE PLANT-Size-Small |
| 13490630 | 35S | ME04235-10 | YES | B01 | [NULL] | 6.30 | HYPOCOTYL-Length-Long |
| 13490630 | 35S | ME04235-10 | YES | J13 | [NULL] | 6.30 | WHOLE PLANT-Size-Small |
| 13490630 | 35S | ME04235-10 | YES | J13 | [NULL] | 6.50 | WHOLE PLANT-Site-Small |
| 13490630 | 35S | ME04235-10 | YES | P04 | [NULL] | 6.50 | FERTILITY-Fertility-Reduced |
| 13490821 | 35S | ME01528-01 | NO | [NULL] | [NULL] | [NULL] | [NULL] |
| 13490821 | 35S | ME01528-02 | QUESTIONABLE | I22 | [NULL] | 1.08 | ROSETTE LEAVES-Shape-Serrate |
| 13490821 | 35S | ME01528-03 | QUESTIONABLE | J12 | [NULL] | 5.10 | WHOLE PLANT-Size-Large |
| 13490821 | 35S | ME01528-03 | QUESTIONABLE | M19 | [NULL] | 6.30 | INFLORESCENCE-Strength-Strong |
| 13490821 | 35S | ME01528-04 | NO | [NULL] | [NULL] | [NULL] | [NULL] |
| 13490821 | 35S | ME01528-05 | NO | [NULL] | [NULL] | [NULL] | [NULL] |
| 13490821 | 35S | ME01528-06 | NO | [NULL] | [NULL] | [NULL] | [NULL] |
| 13490821 | 35S | ME02020-01 | YES | M14 | [NULL] | 6.50 | INFLORESCENCE-Height-Short |
| 13490821 | 35S | ME02020-01 | YES | P04 | [NULL] | 6.50 | FERTILITY-Fertility-Reduced |
| 13490821 | 35S | ME02020-02 | NO | [NULL] | [NULL] | [NULL] | [NULL] |
| 13490821 | 35S | ME02020-03 | NO | [NULL] | [NULL] | [NULL] | [NULL] |
| 13490821 | 35S | ME02020-04 | NO | [NULL] | [NULL] | [NULL] | [NULL] |
| 13490821 | 35S | ME02020-05 | YES | M14 | [NULL] | 6.50 | INFLORESCENCE-Height-Short |
| 13490862 | 35S | ME05616-01 | YES | J01 | [NULL] | 1.05 | WHOLE PLANT-Color-Dark Green |
| 13490862 | 35S | ME05616-01 | YES | J13 | [NULL] | 1.05 | WHOLE PLANT-Size-Small |
| 13490862 | 35S | ME05616-02 | YES | J01 | [NULL] | 1.06 | WHOLE PLANT-Color-Dark Green |
| 13490862 | 35S | ME05616-02 | YES | J13 | [NULL] | 1.06 | WHOLE PLANT-Size-Small |
| 13490862 | 35S | ME05616-03 | YES | J01 | [NULL] | 1.05 | WHOLE PLANT-Color-Dark Green |
| 13490862 | 35S | ME05616-03 | YES | J13 | [NULL] | 1.05 | WHOLE PLANT-Size-Small |
| 13490862 | 35S | ME05616-03 | YES | P04 | [NULL] | 6.30 | FERTILITY-Fertility-Reduced |
| 13490862 | 35S | ME05616-04 | YES | J13 | [NULL] | 1.05 | WHOLE PLANT-Size-Small |
| 13490862 | 35S | ME05616-04 | YES | P04 | [NULL] | 6.30 | FERTILITY-Fertility-Reduced |
| 13490862 | 35S | ME05616-05 | NO | [NULL] | [NULL] | [NULL] | [NULL] |
| 13490862 | 35S | ME05616-06 | YES | J01 | [NULL] | 1.05 | WHOLE PLANT-Color-Dark Green |
| 13490862 | 35S | ME05616-06 | YES | J13 | [NULL] | 1.05 | WHOLE PLANT-Size-Small |
| 13490862 | 35S | ME05616-07 | YES | J01 | [NULL] | 1.06 | WHOLE PLANT-Color-Dark Green |
| 13490862 | 35S | ME05616-07 | YES | J13 | [NULL] | 1.06 | WHOLE PLANT-Size-Small |
| 13490862 | 35S | ME05616-07 | YES | P04 | [NULL] | 6.30 | FERTILITY-Fertility-Reduced |
| 13490862 | 35S | ME05616-08 | YES | J13 | [NULL] | 1.06 | WHOLE PLANT-Size-Small |
| 13490862 | 35S | ME05616-08 | YES | P04 | [NULL] | 6.30 | FERTILITY-Fertility-Reduced |
| 13490862 | 35S | ME05616-09 | NO | [NULL] | [NULL] | [NULL] | [NULL] |
| 13490862 | 35S | ME05616-10 | NO | [NULL] | [NULL] | [NULL] | [NULL] |
| 13491243 | 35S | ME03249-01 | YES | I05 | [NULL] | 6.50 | ROSETTE LEAVES-Curled-Curled 3 |
| 13491243 | 35S | ME03249-02 | YES | I05 | [NULL] | 6.50 | ROSETTE LEAVES-Curled-Curled 3 |
| 13491243 | 35S | ME03249-03 | YES | I05 | [NULL] | 6.50 | ROSETTE LEAVES-Curled-Curled 3 |
| 13491243 | 35S | ME03249-03 | YES | J13 | [NULL] | 6.50 | WHOLE PLANT-Size-Small |
| 13491243 | 35S | ME03249-04 | YES | I05 | [NULL] | 6.50 | ROSETTE LEAVES-Curled-Curled 3 |
| 13491243 | 35S | ME03249-04 | YES | J13 | [NULL] | 6.50 | WHOLE PLANT-Size-Small |
| 13491243 | 35S | ME03249-05 | YES | I05 | [NULL] | 6.50 | ROSETTE LEAVES-Curled-Curled 3 |
| 13491243 | 35S | ME03249-05 | YES | J13 | [NULL] | 6.50 | WHOLE PLANT-Size-Small |
| 13491243 | 35S | ME03249-06 | NO | [NULL] | [NULL] | [NULL] | [NULL] |
| 13491243 | 35S | ME03249-07 | NO | [NULL] | [NULL] | [NULL] | [NULL] |
| 13491243 | 35S | ME03249-08 | NO | [NULL] | [NULL] | [NULL] | [NULL] |
| 13491243 | 35S | ME03249-09 | YES | I05 | [NULL] | 6.50 | ROSETTE LEAVES-Curled-Curled 3 |
| 13491243 | 35S | ME03249-09 | YES | J13 | [NULL] | 6.50 | WHOLE PLANT-Size-Small |
| 13491243 | 35S | ME03249-10 | NO | [NULL] | [NULL] | [NULL] | [NULL] |
| 13491338 | 35S | ME02424-01 | NO | [NULL] | [NULL] | [NULL] | [NULL] |
| 13491338 | 35S | ME02424-02 | NO | [NULL] | [NULL] | [NULL] | [NULL] |
| 13491338 | 35S | ME02424-03 | YES | P04 | [NULL] | 6.50 | FERTILITY-Fertility-Reduced |
| 13491338 | 35S | ME02424-04 | NO | [NULL] | [NULL] | [NULL] | [NULL] |
| 13491338 | 35S | ME02424-05 | YES | J01 | [NULL] | 5.10 | WHOLE PLANT-Color-Dark Green |
| 13491338 | 35S | ME02424-05 | YES | J13 | [NULL] | 5.10 | WHOLE PLANT-Size-Small |
| 13491338 | 35S | ME02424-06 | NO | [NULL] | [NULL] | [NULL] | [NULL] |
| 13491338 | 35S | ME02424-07 | YES | I04 | [NULL] | 6.30 | ROSETTE LEAVES-Curled-Curled 2 |
| 13491338 | 35S | ME02424-07 | YES | I08 | [NULL] | 6.30 | ROSETTE LEAVES-Disorganized Rosette- |
| | | | | | | | Disorganized Rosette |
| 13491338 | 35S | ME02424-07 | YES | J01 | [NULL] | 6.30 | WHOLE PLANT-Color-Dark Green |
| 13491338 | 35S | ME02424-07 | YES | J13 | [NULL] | 6.30 | WHOLE PLANT-Size-Small |
| 13491338 | 35S | ME02424-07 | YES | P04 | [NULL] | 6.50 | FERTILITY-Fertility-Reduced |
| 13491338 | 35S | ME02424-08 | NO | [NULL] | [NULL] | [NULL] | [NULL] |
| 13491911 | 35S | ME03976-01 | NO | [NULL] | [NULL] | [NULL] | [NULL] |
| 13491911 | 35S | ME03976-02 | NO | [NULL] | [NULL] | [NULL] | [NULL] |
| 13491911 | 35S | ME03976-03 | YES | I05 | [NULL] | 5.10 | ROSETTE LEAVES-Curled-Curled 3 |
| 13491911 | 35S | ME03976-03 | YES | I31 | [NULL] | 5.10 | ROSETTE LEAVES-Other |
| 13491911 | 35S | ME03976-03 | YES | M14 | [NULL] | 5.10 | INFLORESCENCE-Height-Short |
| 13491911 | 35S | ME03976-04 | NO | [NULL] | [NULL] | [NULL] | [NULL] |
| 13491911 | 35S | ME03976-05 | NO | [NULL] | [NULL] | [NULL] | [NULL] |
| 13491911 | 35S | ME03976-06 | YES | I08 | [NULL] | 6.50 | ROSETTE LEAVES-Disorganized Rosette- |
| | | | | | | | Disorganized Rosette |
| 13491911 | 35S | ME03976-06 | YES | J13 | [NULL] | 6.50 | WHOLE PLANT-Size-Small |
| 13491911 | 35S | ME03976-07 | YES | I08 | [NULL] | 6.50 | ROSETTE LEAVES-Disorganized Rosette- |
| | | | | | | | Disorganized Rosette |
| 13491911 | 35S | ME03976-07 | YES | I09 | [NULL] | 6.50 | ROSETTE LEAVES-Fused-Leaf to Inflorescence |
| 13491911 | 35S | ME03976-07 | YES | M14 | [NULL] | 6.50 | INFLORESCENCE-Height-Short |
| 13491911 | 35S | ME03976-07 | YES | M25 | [NULL] | 6.50 | INFLORESCENCE-Other |
| 13491911 | 35S | ME03976-08 | NO | [NULL] | [NULL] | [NULL] | [NULL] |
| 13492937 | 326D | ME09199-01 | [NULL] | [NULL] | [NULL] | [NULL] | [NULL] |
| 13492937 | 326D | ME09199-02 | [NULL] | [NULL] | [NULL] | [NULL] | [NULL] |
| 13492937 | 326D | ME09199-03 | [NULL] | [NULL] | [NULL] | [NULL] | [NULL] |
| 13492937 | 326D | ME09199-04 | [NULL] | [NULL] | [NULL] | [NULL] | [NULL] |
| 13492937 | 326D | ME09199-05 | [NULL] | [NULL] | [NULL] | [NULL] | [NULL] |
| 13492937 | 34414F | ME09357-01 | YES | M13 | [NULL] | 1.13 | INFLORESCENCE-Flowering Time-Late |
| | | | | | | | Flowering |
| 13492937 | 34414F | ME09357-02 | YES | I14 | [NULL] | 1.08 | ROSETTE LEAVES-Petiole Length-Short |
| | | | | | | | Petioles |
| 13492937 | 34414F | ME09357-02 | YES | I20 | [NULL] | 1.08 | ROSETTE LEAVES-Shape-Oval |
| 13492937 | 34414F | ME09357-02 | YES | J01 | [NULL] | 1.08 | WHOLE PLANT-Color-Dark Green |
| 13492937 | 34414F | ME09357-02 | YES | J13 | [NULL] | 1.08 | WHOLE PLANT-Size-Small |
| 13492937 | 34414F | ME09357-02 | YES | M13 | [NULL] | 1.08 | INFLORESCENCE-Flowering Time-Late |
| | | | | | | | Flowering |
| 13492937 | 34414F | ME09357-03 | YES | M13 | [NULL] | 1.11 | INFLORESCENCE-Flowering Time-Late |
| | | | | | | | Flowering |
| 13492937 | 34414F | ME09357-04 | NO | [NULL] | [NULL] | [NULL] | [NULL] |
| 13492937 | 34414F | ME09357-05 | NO | [NULL] | [NULL] | [NULL] | [NULL] |
| 13492937 | 34414F | ME09357-06 | YES | M13 | [NULL] | 1.10 | INFLORESCENCE-Flowering Time-Late |
| | | | | | | | Flowering |
| 13492937 | 34414F | ME09357-07 | NO | [NULL] | [NULL] | [NULL] | [NULL] |
| 13492937 | 34414F | ME09357-08 | NO | [NULL] | [NULL] | [NULL] | [NULL] |
| 13492937 | 34414F | ME09357-09 | NO | [NULL] | [NULL] | [NULL] | [NULL] |
| 13492937 | 34414F | ME09357-10 | YES | J01 | [NULL] | 1.11 | WHOLE PLANT-Color-Dark Green |
| 13492937 | 34414F | ME09357-10 | YES | J13 | [NULL] | 1.11 | WHOLE PLANT-Size-Small |
| 13492937 | 34414F | ME09357-10 | YES | M13 | [NULL] | 1.11 | INFLORESCENCE-Flowering Time-Late |
| | | | | | | | Flowering |
| 13492937 | 35S | ME01731-01 | YES | J13 | [NULL] | 5.10 | WHOLE PLANT-Size-Small |
| 13492937 | 35S | ME01731-01 | YES | J14 | [NULL] | 6.50 | WHOLE PLANT-Other |
| 13492937 | 35S | ME01731-02 | NO | [NULL] | [NULL] | [NULL] | [NULL] |
| 13492937 | 35S | ME01731-03 | YES | J13 | [NULL] | 5.10 | WHOLE PLANT-Size-Small |
| 13492937 | 35S | ME01731-03 | YES | J14 | [NULL] | 6.50 | WHOLE PLANT-Other |
| 13492937 | 35S | ME01731-04 | NO | [NULL] | [NULL] | [NULL] | [NULL] |
| 13492937 | 35S | ME01731-05 | YES | J13 | [NULL] | 5.10 | WHOLE PLANT-Size-Small |
| 13492937 | 35S | ME01731-05 | YES | J14 | [NULL] | 6.50 | WHOLE PLANT-Other |
| 13492937 | 35S | ME01731-06 | NO | [NULL] | [NULL] | [NULL] | [NULL] |
| 13493832 | 35S | ME03659-01 | NO | [NULL] | [NULL] | [NULL] | [NULL] |
| 13493832 | 35S | ME03659-02 | YES | M13 | [NULL] | 5.10 | INFLORESCENCE-Flowering Time-Late Flowering |
| 13493832 | 35S | ME03659-03 | YES | M13 | [NULL] | 5.10 | INFLORESCENCE-Flowering Time-Late Flowering |
| 13494027 | 35S | ME05699-01 | YES | P04 | [NULL] | 6.30 | FERTILITY-Fertility-Reduced |
| 13494027 | 35S | ME05699-02 | NO | [NULL] | [NULL] | [NULL] | [NULL] |
| 13494027 | 35S | ME05699-03 | YES | P04 | [NULL] | 6.30 | FERTILITY-Fertility-Reduced |
| 13494027 | 35S | ME05699-04 | NO | [NULL] | [NULL] | [NULL] | [NULL] |
| 13494027 | 35S | ME05699-05 | NO | [NULL] | [NULL] | [NULL] | [NULL] |
| 13494027 | 35S | ME05699-06 | NO | [NULL] | [NULL] | [NULL] | [NULL] |
| 13494027 | 35S | ME05699-07 | YES | P04 | [NULL] | 6.30 | FERTILITY-Fertility-Reduced |
| 13494027 | 35S | ME05699-08 | NO | [NULL] | [NULL] | [NULL] | [NULL] |
| 13494027 | 35S | ME05699-09 | NO | [NULL] | [NULL] | [NULL] | [NULL] |
| 13494027 | 35S | ME05699-10 | YES | I18 | [NULL] | 1.08 | ROSETTE LEAVES-Shape-Lanceolate |
| 13494027 | 35S | ME05699-10 | YES | J13 | [NULL] | 1.08 | WHOLE PLANT-Size-Small |
| 13494027 | 35S | ME05699-10 | YES | P04 | [NULL] | 6.30 | FERTILITY-Fertility-Reduced |
| 13494229 | 35S | ME05650-01 | NO | [NULL] | [NULL] | [NULL] | [NULL] |
| 13494229 | 35S | ME05650-02 | NO | [NULL] | [NULL] | [NULL] | [NULL] |
| 13494229 | 35S | ME05650-03 | NO | [NULL] | [NULL] | [NULL] | [NULL] |
| 13494229 | 35S | ME05650-04 | YES | I08 | [NULL] | 5.10 | ROSETTE LEAVES-Disorganized Rosette- |
| | | | | | | | Disorganized Rosette |
| 13494229 | 35S | ME05650-04 | YES | I14 | [NULL] | 5.10 | ROSETTE LEAVES-Petiole Length-Short Petioles |
| 13494229 | 35S | ME05650-04 | YES | J13 | [NULL] | 5.10 | WHOLE PLANT-Size-Small |
| 13494229 | 35S | ME05650-05 | YES | I04 | [NULL] | 5.10 | ROSETTE LEAVES-Curled-Curled 2 |
| 13494229 | 35S | ME05650-05 | YES | J01 | [NULL] | 5.10 | WHOLE PLANT-Color-Dark Green |
| 13494229 | 35S | ME05650-05 | YES | J13 | [NULL] | 5.10 | WHOLE PLANT-Size-Small |
| 13494229 | 35S | ME05650-06 | YES | I14 | [NULL] | 1.07 | ROSETTE LEAVES-Petiole Length-Short Petioles |
| 13494229 | 35S | ME05650-06 | YES | J08 | [NULL] | 1.07 | WHOLE PLANT-Dwarf-Misc. Dwarf |
| 13494229 | 35S | ME05650-06 | YES | J13 | [NULL] | 1.07 | WHOLE PLANT-Size-Small |
| 13494229 | 35S | ME05650-06 | YES | M13 | [NULL] | 1.07 | INFLORESCENCE-Flowering Time-Late Flowering |
| 13494229 | 35S | ME05650-07 | YES | I14 | [NULL] | 5.10 | ROSETTE LEAVES-Petiole Length-Short Petioles |
| 13494229 | 35S | ME05650-07 | YES | J08 | [NULL] | 5.10 | WHOLE PLANT-Dwarf-Misc. Dwarf |
| 13494229 | 35S | ME05650-07 | YES | J13 | [NULL] | 5.10 | WHOLE PLANT-Size-Small |
| 13494229 | 35S | ME05650-07 | YES | M13 | [NULL] | 5.10 | INFLORESCENCE-Flowering Time-Late Flowering |
| 13494229 | 35S | ME05650-08 | YES | I04 | [NULL] | 5.10 | ROSETTE LEAVES-Curled-Curled 2 |
| 13494229 | 35S | ME05650-08 | YES | J01 | [NULL] | 5.10 | WHOLE PLANT-Color-Dark Green |
| 13494229 | 35S | ME05650-08 | YES | J13 | [NULL] | 1.04 | WHOLE PLANT-Size-Small |
| 13494229 | 35S | ME05650-08 | YES | J13 | [NULL] | 5.10 | WHOLE PLANT-Size-Small |
| 13494229 | 35S | ME05650-08 | YES | M13 | [NULL] | 1.04 | INFLORESCENCE-Flowering Time-Late Flowering |
| 13494229 | 35S | ME05650-09 | YES | I08 | [NULL] | 5.10 | ROSETTE LEAVES-Disorganized Rosette- |
| | | | | | | | Disorganized Rosette |
| 13494229 | 35S | ME05650-09 | YES | I14 | [NULL] | 5.10 | ROSETTE LEAVES-Petiole Length-Short Petioles |
| 13494229 | 35S | ME05650-09 | YES | J13 | [NULL] | 5.10 | WHOLE PLANT-Size-Small |
| 13494229 | 35S | ME05650-10 | NO | [NULL] | [NULL] | [NULL] | [NULL] |
| 13494457 | 35S | ME08426-01 | NO | [NULL] | [NULL] | [NULL] | [NULL] |
| 13494457 | 35S | ME08426-02 | YES | I05 | [NULL] | 1.06 | ROSETTE LEAVES-Curled-Curled 3 |
| 13494457 | 35S | ME08426-03 | YES | I07 | [NULL] | 1.06 | ROSETTE LEAVES-Curled-Curled 5 |
| 13494457 | 35S | ME08426-04 | YES | I05 | [NULL] | 1.06 | ROSETTE LEAVES-Curled-Curled 3 |
| 13494457 | 35S | ME08426-05 | NO | [NULL] | [NULL] | [NULL] | [NULL] |
| 13494457 | 35S | ME08426-06 | YES | I06 | [NULL] | 1.07 | ROSETTE LEAVES-Curled-Curled 4 |
| 13494457 | 35S | ME08426-07 | NO | [NULL] | [NULL] | [NULL] | [NULL] |
| 13494457 | 35S | ME08426-08 | NO | [NULL] | [NULL] | [NULL] | [NULL] |
| 13494457 | 35S | ME08426-09 | YES | I05 | [NULL] | 1.06 | ROSETTE LEAVES-Curled-Curled 3 |
| 13494457 | 35S | ME08426-10 | YES | I07 | [NULL] | 1.05 | ROSETTE LEAVES-Curled-Curled 5 |
| 13495746 | 35S | ME04249-01 | QUESTIONABLE | J13 | [NULL] | 6.50 | WHOLE PLANT-Size-Small |
| 13495746 | 35S | ME04249-02 | QUESTIONABLE | J13 | [NULL] | 6.50 | WHOLE PLANT-Size-Small |
| 13495746 | 35S | ME04249-03 | YES | I14 | [NULL] | 6.10 | ROSETTE LEAVES-Petiole Length-Short Petioles |
| 13495746 | 35S | ME04249-03 | YES | I22 | [NULL] | 6.10 | ROSETTE LEAVES-Shape-Serrate |
| 13495746 | 35S | ME04249-03 | YES | I31 | [NULL] | 6.10 | ROSETTE LEAVES-Other |
| 13495746 | 35S | ME04249-03 | YES | J01 | [NULL] | 6.10 | WHOLE PLANT-Color-Dark Green |
| 13495746 | 35S | ME04249-03 | YES | M14 | [NULL] | 6.10 | INFLORESCENCE-Height-Short |
| 13495746 | 35S | ME04249-03 | YES | M19 | [NULL] | 6.10 | INFLORESCENCE-Strength-Strong |
| 13495746 | 35S | ME04249-04 | YES | I14 | [NULL] | 1.14 | ROSETTE LEAVES-Petiole Length-Short Petioles |
| 13495746 | 35S | ME04249-04 | YES | I22 | [NULL] | 1.14 | ROSETTE LEAVES-Shape-Serrate |
| 13495746 | 35S | ME04249-04 | YES | I22 | [NULL] | 6.10 | ROSETTE LEAVES-Shape-Serrate |
| 13495746 | 35S | ME04249-04 | YES | I22 | [NULL] | 6.30 | ROSETTE LEAVES-Shape-Serrate |
| 13495746 | 35S | ME04249-04 | YES | I31 | [NULL] | 6.10 | ROSETTE LEAVES-Other |
| 13495746 | 35S | ME04249-04 | YES | J01 | [NULL] | 1.14 | WHOLE PLANT-Color-Dark Green |
| 13495746 | 35S | ME04249-04 | YES | J01 | [NULL] | 6.10 | WHOLE PLANT-Color-Dark Green |
| 13495746 | 35S | ME04249-04 | YES | J01 | [NULL] | 6.30 | WHOLE PLANT-Color-Dark Green |
| 13495746 | 35S | ME04249-04 | YES | J12 | [NULL] | 6.10 | WHOLE PLANT-Size-Large |
| 13495746 | 35S | ME04249-04 | YES | J12 | [NULL] | 6.30 | WHOLE PLANT-Size-Large |
| 13495746 | 35S | ME04249-04 | YES | K31 | [NULL] | 6.30 | CAULINE LEAVES-Other |
| 13495746 | 35S | ME04249-04 | YES | M13 | [NULL] | 1.14 | INFLORESCENCE-Flowering Time-Late Flowering |
| 13495746 | 35S | ME04249-04 | YES | M13 | [NULL] | 6.10 | INFLORESCENCE-Flowering Time-Late Flowering |
| 13495746 | 35S | ME04249-04 | YES | M13 | [NULL] | 6.30 | INFLORESCENCE-Flowering Time-Late Flowering |
| 13495746 | 35S | ME04249-04 | YES | M19 | [NULL] | 6.10 | INFLORESCENCE-Strength-Strong |
| 13495746 | 35S | ME04249-04 | YES | M25 | [NULL] | 6.30 | INFLORESCENCE-Other |
| 13495746 | 35S | ME04249-05 | YES | I14 | [NULL] | 5.10 | ROSETTE LEAVES-Petiole Length-Short Petioles |
| 13495746 | 35S | ME04249-05 | YES | I22 | [NULL] | 5.10 | ROSETTE LEAVES-Shape-Serrate |
| 13495746 | 35S | ME04249-05 | YES | I22 | [NULL] | 6.50 | ROSETTE LEAVES-Shape-Serrate |
| 13495746 | 35S | ME04249-05 | YES | I31 | [NULL] | 5.10 | ROSETTE LEAVES-Other |
| 13495746 | 35S | ME04249-05 | YES | I31 | [NULL] | 6.50 | ROSETTE LEAVES-Other |
| 13495746 | 35S | ME04249-05 | YES | J01 | [NULL] | 5.10 | WHOLE PLANT-Color-Dark Green |
| 13495746 | 35S | ME04249-05 | YES | J01 | [NULL] | 6.50 | WHOLE PLANT-Color-Dark Green |
| 13495746 | 35S | ME04249-05 | YES | J12 | [NULL] | 5.10 | WHOLE PLANT-Size-Large |
| 13495746 | 35S | ME04249-05 | YES | J12 | [NULL] | 6.50 | WHOLE PLANT-Size-Large |
| 13495746 | 35S | ME04249-05 | YES | K31 | [NULL] | 6.50 | CAULINE LEAVES-Other |
| 13495746 | 35S | ME04249-05 | YES | M13 | [NULL] | 5.10 | INFLORESCENCE-Flowering Time-Late Flowering |
| 13495746 | 35S | ME04249-05 | YES | M14 | [NULL] | 6.50 | INFLORESCENCE-Height-Short |
| 13495746 | 35S | ME04249-05 | YES | M19 | [NULL] | 6.50 | INFLORESCENCE-Strength-Strong |
| 13495746 | 35S | ME04249-05 | YES | M25 | [NULL] | 6.50 | INFLORESCENCE-Other |
| 13495746 | 35S | ME04249-06 | YES | I14 | [NULL] | 5.10 | ROSETTE LEAVES-Petiole Length-Short Petioles |
| 13495746 | 35S | ME04249-06 | YES | I22 | [NULL] | 5.10 | ROSETTE LEAVES-Shape-Serrate |
| 13495746 | 35S | ME04249-06 | YES | I22 | [NULL] | 6.50 | ROSETTE LEAVES-Shape-Serrate |
| 13495746 | 35S | ME04249-06 | YES | I31 | [NULL] | 5.10 | ROSETTE LEAVES-Other |
| 13495746 | 35S | ME04249-06 | YES | I31 | [NULL] | 6.50 | ROSETTE LEAVES-Other |
| 13495746 | 35S | ME04249-06 | YES | J01 | [NULL] | 5.10 | WHOLE PLANT-Color-Dark Green |
| 13495746 | 35S | ME04249-06 | YES | J01 | [NULL] | 6.50 | WHOLE PLANT-Color-Dark Green |
| 13495746 | 35S | ME04249-06 | YES | J12 | [NULL] | 5.10 | WHOLE PLANT-Size-Large |
| 13495746 | 35S | ME04249-06 | YES | K31 | [NULL] | 6.50 | CAULINE LEAVES-Other |
| 13495746 | 35S | ME04249-06 | YES | M13 | [NULL] | 5.10 | INFLORESCENCE-Flowering Time-Late Flowering |
| 13495746 | 35S | ME04249-06 | YES | M14 | [NULL] | 6.50 | INFLORESCENCE-Height-Short |
| 13495746 | 35S | ME04249-06 | YES | M19 | [NULL] | 6.50 | INFLORESCENCE-Strength-Strong |
| 13495746 | 35S | ME04249-06 | YES | M25 | [NULL] | 6.50 | INFLORESCENCE-Other |
| 13495746 | 35S | ME04249-07 | YES | I14 | [NULL] | 5.10 | ROSETTE LEAVES-Petiole Length-Short Petioles |
| 13495746 | 35S | ME04249-07 | YES | I22 | [NULL] | 5.10 | ROSETTE LEAVES-Shape-Serrate |
| 13495746 | 35S | ME04249-07 | YES | I22 | [NULL] | 6.50 | ROSETTE LEAVES-Shape-Serrate |
| 13495746 | 35S | ME04249-07 | YES | I31 | [NULL] | 5.10 | ROSETTE LEAVES-Other |
| 13495746 | 35S | ME04249-07 | YES | I31 | [NULL] | 6.50 | ROSETTE LEAVES-Other |
| 13495746 | 35S | ME04249-07 | YES | J01 | [NULL] | 5.10 | WHOLE PLANT-Color-Dark Green |
| 13495746 | 35S | ME04249-07 | YES | J01 | [NULL] | 6.50 | WHOLE PLANT-Color-Dark Green |
| 13495746 | 35S | ME04249-07 | YES | J12 | [NULL] | 5.10 | WHOLE PLANT-Size-Large |
| 13495746 | 35S | ME04249-07 | YES | K31 | [NULL] | 6.50 | CAULINE LEAVES-Other |
| 13495746 | 35S | ME04249-07 | YES | M13 | [NULL] | 5.10 | INFLORESCENCE-Flowering Time-Late Flowering |
| 13495746 | 35S | ME04249-07 | YES | M14 | [NULL] | 6.50 | INFLORESCENCE-Height-Short |
| 13495746 | 35S | ME04249-07 | YES | M19 | [NULL] | 6.50 | INFLORESCENCE-Strength-Strong |
| 13495746 | 35S | ME04249-07 | YES | M25 | [NULL] | 6.50 | INFLORESCENCE-Other |
| 13495746 | 35S | ME04249-08 | YES | I14 | [NULL] | 5.10 | ROSETTE LEAVES-Petiole Length-Short Petioles |
| 13495746 | 35S | ME04249-08 | YES | I22 | [NULL] | 5.10 | ROSETTE LEAVES-Shape-Serrate |
| 13495746 | 35S | ME04249-08 | YES | I31 | [NULL] | 5.10 | ROSETTE LEAVES-Other |
| 13495746 | 35S | ME04249-08 | YES | J01 | [NULL] | 5.10 | WHOLE PLANT-Color-Dark Green |
| 13495746 | 35S | ME04249-08 | YES | J01 | [NULL] | 6.50 | WHOLE PLANT-Color-Dark Green |
| 13495746 | 35S | ME04249-08 | YES | J12 | [NULL] | 5.10 | WHOLE PLANT-Size-Large |
| 13495746 | 35S | ME04249-08 | YES | M13 | [NULL] | 5.10 | INFLORESCENCE-Flowering Time-Late Flowering |
| 13495746 | 35S | ME04249-08 | YES | M14 | [NULL] | 6.50 | INFLORESCENCE-Height-Short |
| 13495746 | 35S | ME04249-08 | YES | M19 | [NULL] | 6.50 | INFLORESCENCE-Strength-Strong |
| 13495746 | 35S | ME04249-08 | YES | M25 | [NULL] | 6.50 | INFLORESCENCE-Other |
| 13495746 | 35S | ME04249-08 | YES | P04 | [NULL] | 6.50 | FERTILITY-Fertility-Reduced |
| 13495746 | 35S | ME04249-09 | YES | I14 | [NULL] | 5.10 | ROSETTE LEAVES-Petiole Length-Short Petioles |
| 13495746 | 35S | ME04249-09 | YES | I22 | [NULL] | 5.10 | ROSETTE LEAVES-Shape-Serrate |
| 13495746 | 35S | ME04249-09 | YES | I22 | [NULL] | 6.50 | ROSETTE LEAVES-Shape-Serrate |
| 13495746 | 35S | ME04249-09 | YES | I31 | [NULL] | 5.10 | ROSETTE LEAVES-Other |
| 13495746 | 35S | ME04249-09 | YES | I31 | [NULL] | 6.50 | ROSETTE LEAVES-Other |
| 13495746 | 35S | ME04249-09 | YES | J01 | [NULL] | 5.10 | WHOLE PLANT-Color-Dark Green |
| 13495746 | 35S | ME04249-09 | YES | J01 | [NULL] | 6.50 | WHOLE PLANT-Color-Dark Green |
| 13495746 | 35S | ME04249-09 | YES | J12 | [NULL] | 5.10 | WHOLE PLANT-Size-Large |
| 13495746 | 35S | ME04249-09 | YES | J12 | [NULL] | 6.50 | WHOLE PLANT-Size-Large |
| 13495746 | 35S | ME04249-09 | YES | K31 | [NULL] | 6.50 | CAULINE LEAVES-Other |
| 13495746 | 35S | ME04249-09 | YES | M13 | [NULL] | 5.10 | INFLORESCENCE-Flowering Time-Late Flowering |
| 13495746 | 35S | ME04249-09 | YES | M14 | [NULL] | 6.50 | INFLORESCENCE-Height-Short |
| 13495746 | 35S | ME04249-09 | YES | M19 | [NULL] | 6.50 | INFLORESCENCE-Strength-Strong |
| 13495746 | 35S | ME04249-09 | YES | M25 | [NULL] | 6.50 | INFLORESCENCE-Other |
| 13495746 | 35S | ME04249-10 | QUESTIONABLE | M25 | [NULL] | 6.50 | INFLORESCENCE-Other |
| 13495872 | 35S | ME04115-01 | NO | [NULL] | [NULL] | [NULL] | [NULL] |
| 13495872 | 35S | ME04115-02 | YES | J01 | [NULL] | 6.50 | WHOLE PLANT-Color-Dark Green |
| 13495872 | 35S | ME04115-02 | YES | L11 | [NULL] | 6.50 | FLOWERS-Other |
| 13495872 | 35S | ME04115-02 | YES | P04 | [NULL] | 6.50 | FERTILITY-Fertility-Reduced |
| 13495872 | 35S | ME04115-03 | NO | [NULL] | [NULL] | [NULL] | [NULL] |
| 13495872 | 35S | ME04115-04 | NO | [NULL] | [NULL] | [NULL] | [NULL] |
| 13495872 | 35S | ME04115-05 | YES | I18 | [NULL] | 6.50 | ROSETTE LEAVES-Shape-Lanceolate |
| 13495872 | 35S | ME04115-05 | YES | J01 | [NULL] | 6.50 | WHOLE PLANT-Color-Dark Green |
| 13495872 | 35S | ME04115-05 | YES | J01 | [NULL] | 6.90 | WHOLE PLANT-Color-Dark Green |
| 13495872 | 35S | ME04115-05 | YES | J13 | [NULL] | 6.90 | WHOLE PLANT-Size-Small |
| 13495872 | 35S | ME04115-05 | YES | M20 | [NULL] | 6.90 | INFLORESCENCE-Strength-Weak |
| 13495872 | 35S | ME04115-05 | YES | P04 | [NULL] | 6.90 | FERTILITY-Fertility-Reduced |
| 13495872 | 35S | ME04115-06 | YES | J01 | [NULL] | 6.50 | WHOLE PLANT-Color-Dark Green |
| 13495872 | 35S | ME04115-07 | NO | [NULL] | [NULL] | [NULL] | [NULL] |
| 13495872 | 35S | ME04115-08 | NO | [NULL] | [NULL] | [NULL] | [NULL] |
| 13495872 | 35S | ME04115-09 | NO | [NULL] | [NULL] | [NULL] | [NULL] |
| 13495872 | 35S | ME04115-10 | YES | J01 | [NULL] | 6.50 | WHOLE PLANT-Color-Dark Green |
| 13495872 | 35S | ME04115-10 | YES | J13 | [NULL] | 6.90 | WHOLE PLANT-Size-Small |
| 13496315 | 32449 | ME00056-01 | NO | [NULL] | [NULL] | [NULL] | [NULL] |
| 13496315 | 32449 | ME00056-02 | NO | [NULL] | [NULL] | [NULL] | [NULL] |
| 13496315 | 32449 | ME00056-03 | NO | [NULL] | [NULL] | [NULL] | [NULL] |
| 13496315 | 32449 | ME00056-04 | NO | [NULL] | [NULL] | [NULL] | [NULL] |
| 13496315 | 32449 | ME00056-05 | NO | [NULL] | [NULL] | [NULL] | [NULL] |
| 13496315 | 32449 | ME00056-06 | NO | [NULL] | [NULL] | [NULL] | [NULL] |
| 13496315 | 32449 | ME00056-07 | NO | [NULL] | [NULL] | [NULL] | [NULL] |
| 13496315 | 32449 | ME00056-08 | NO | [NULL] | [NULL] | [NULL] | [NULL] |
| 13496315 | 32449 | ME00056-09 | NO | [NULL] | [NULL] | [NULL] | [NULL] |
| 13496315 | 35S | ME03102-01 | YES | M14 | [NULL] | 6.50 | INFLORESCENCE-Height-Short |
| 13496315 | 35S | ME03102-02 | YES | M14 | [NULL] | 5.10 | INFLORESCENCE-Height-Short |
| 13496315 | 35S | ME03102-03 | YES | M10 | [NULL] | 6.50 | INFLORESCENCE-Branching-Reduced Apical |
| | | | | | | | Dominance |
| 13496315 | 35S | ME03102-03 | YES | M14 | [NULL] | 6.50 | INFLORESCENCE-Height-Short |
| 13496315 | 35S | ME03102-04 | NO | [NULL] | [NULL] | [NULL] | [NULL] |
| 13496315 | 35S | ME03102-05 | NO | [NULL] | [NULL] | [NULL] | [NULL] |
| 13496315 | 35S | ME03102-06 | NO | [NULL] | [NULL] | [NULL] | [NULL] |
| 13496315 | 35S | ME03102-07 | NO | [NULL] | [NULL] | [NULL] | [NULL] |
| 13496315 | 35S | ME03102-08 | YES | M14 | [NULL] | 6.50 | INFLORESCENCE-Height-Short |
| 13496771 | 35S | ME02571-01 | NO | [NULL] | [NULL] | [NULL] | [NULL] |
| 13496771 | 35S | ME02571-02 | YES | M13 | [NULL] | 1.10 | INFLORESCENCE-Flowering Time-Late Flowering |
| 13496771 | 35S | ME02571-02 | YES | M13 | [NULL] | 6.10 | INFLORESCENCE-Flowering Time-Late Flowering |
| 13496771 | 35S | ME02571-03 | NO | [NULL] | [NULL] | [NULL] | [NULL] |
| 13496771 | 35S | ME02571-04 | NO | [NULL] | [NULL] | [NULL] | [NULL] |
| 13496771 | 35S | ME02571-05 | NO | [NULL] | [NULL] | [NULL] | [NULL] |
| 13496771 | 35S | ME02571-06 | YES | N07 | [NULL] | 6.30 | SILIQUES-Other |
| 13496771 | 35S | ME02571-06 | YES | P04 | [NULL] | 6.30 | FERTILITY-Fertility-Reduced |
| 13496771 | 35S | ME02571-07 | YES | J13 | [NULL] | 1.06 | WHOLE PLANT-Size-Small |
| 13496771 | 35S | ME02571-07 | YES | J13 | [NULL] | 6.10 | WHOLE PLANT-Size-Small |
| 13496771 | 35S | ME02571-07 | YES | M13 | [NULL] | 1.06 | INFLORESCENCE-Flowering Time-Late Flowering |
| 13496771 | 35S | ME02571-07 | YES | M13 | [NULL] | 6.10 | INFLORESCENCE-Flowering Time-Late Flowering |
| 13496771 | 35S | ME02571-08 | YES | J13 | [NULL] | 1.06 | WHOLE PLANT-Size-Small |
| 13496771 | 35S | ME02571-08 | YES | J13 | [NULL] | 6.10 | WHOLE PLANT-Size-Small |
| 13496771 | 35S | ME02571-08 | YES | M13 | [NULL] | 1.06 | INFLORESCENCE-Flowering Time-Late Flowering |
| 13496771 | 35S | ME02571-08 | YES | M13 | [NULL] | 6.10 | INFLORESCENCE-Flowering Time-Late Flowering |
| 13496771 | 35S | ME02571-09 | NO | [NULL] | [NULL] | [NULL] | [NULL] |
| 13496771 | 35S | ME02571-10 | NO | [NULL] | [NULL] | [NULL] | [NULL] |
| 13496922 | 35S | ME06932-01 | NO | [NULL] | [NULL] | [NULL] | [NULL] |
| 13496922 | 35S | ME06932-02 | YES | I14 | [NULL] | 1.06 | ROSETTE LEAVES-Petiole Length-Short Petioles |
| 13496922 | 35S | ME06932-02 | YES | J13 | [NULL] | 1.06 | WHOLE PLANT-Size-Small |
| 13496922 | 35S | ME06932-02 | YES | J14 | [NULL] | 1.06 | WHOLE PLANT-Other |
| 13496922 | 35S | ME06932-02 | YES | M14 | [NULL] | 6.50 | INFLORESCENCE-Height-Short |
| 13496922 | 35S | ME06932-03 | NO | [NULL] | [NULL] | [NULL] | [NULL] |
| 13496922 | 35S | ME06932-04 | YES | M14 | [NULL] | 6.50 | INFLORESCENCE-Height-Short |
| 13496922 | 35S | ME06932-05 | YES | I14 | [NULL] | 1.07 | ROSETTE LEAVES-Petiole Length-Short Petioles |
| 13496922 | 35S | ME06932-05 | YES | J14 | [NULL] | 1.07 | WHOLE PLANT-Other |
| 13496922 | 35S | ME06932-05 | YES | M13 | [NULL] | 1.07 | INFLORESCENCE-Flowering Time-Late Flowering |
| 13496922 | 35S | ME06932-05 | YES | M14 | [NULL] | 6.50 | INFLORESCENCE-Height-Short |
| 13496922 | 35S | ME06932-06 | NO | [NULL] | [NULL] | [NULL] | [NULL] |
| 13496922 | 35S | ME06932-07 | NO | [NULL] | [NULL] | [NULL] | [NULL] |
| 13496922 | 35S | ME06932-08 | NO | [NULL] | [NULL] | [NULL] | [NULL] |
| 13496922 | 35S | ME06932-09 | NO | [NULL] | [NULL] | [NULL] | [NULL] |
| 13496922 | 35S | ME06932-10 | NO | [NULL] | [NULL] | [NULL] | [NULL] |
| 13497142 | 35S | ME05721-01 | YES | J03 | [NULL] | 5.10 | WHOLE PLANT-Color-Yellow-Green Viable 1 |
| 13497142 | 35S | ME05721-01 | YES | J13 | [NULL] | 5.10 | WHOLE PLANT-Size-Small |
| 13497142 | 35S | ME05721-02 | NO | [NULL] | [NULL] | [NULL] | [NULL] |
| 13497142 | 35S | ME05721-03 | YES | J03 | [NULL] | 5.10 | WHOLE PLANT-Color-Yellow-Green Viable 1 |
| 13497142 | 35S | ME05721-03 | YES | J13 | [NULL] | 5.10 | WHOLE PLANT-Size-Small |
| 13497142 | 35S | ME05721-04 | YES | J03 | [NULL] | 5.10 | WHOLE PLANT-Color-Yellow-Green Viable 1 |
| 13497142 | 35S | ME05721-04 | YES | J13 | [NULL] | 5.10 | WHOLE PLANT-Size-Small |
| 13497142 | 35S | ME05721-05 | YES | J03 | [NULL] | 5.10 | WHOLE PLANT-Color-Yellow-Green Viable 1 |
| 13497142 | 35S | ME05721-05 | YES | J13 | [NULL] | 5.10 | WHOLE PLANT-Size-Small |
| 13497142 | 35S | ME05721-06 | NO | [NULL] | [NULL] | [NULL] | [NULL] |
| 13497142 | 35S | ME05721-07 | YES | J03 | [NULL] | 5.10 | WHOLE PLANT-Color-Yellow-Green Viable 1 |
| 13497142 | 35S | ME05721-07 | YES | J13 | [NULL] | 5.10 | WHOLE PLANT-Size-Small |
| 13497142 | 35S | ME05721-08 | YES | J03 | [NULL] | 5.10 | WHOLE PLANT-Color-Yellow-Green Viable 1 |
| 13497142 | 35S | ME05721-08 | YES | J13 | [NULL] | 5.10 | WHOLE PLANT-Size-Small |
| 13497142 | 35S | ME05721-09 | NO | [NULL] | [NULL] | [NULL] | [NULL] |
| 13497142 | 35S | ME05721-10 | YES | J03 | [NULL] | 5.10 | WHOLE PLANT-Color-Yellow-Green Viable 1 |
| 13497142 | 35S | ME05721-10 | YES | J13 | [NULL] | 5.10 | WHOLE PLANT-Size-Small |
| 13497142 | 35S | ME05721-10 | YES | M14 | [NULL] | 6.30 | INFLORESCENCE-Height-Short |
| 13497314 | 35S | ME07344-01 | YES | I31 | [NULL] | 1.05 | ROSETTE LEAVES-Other |
| 13497314 | 35S | ME07344-01 | YES | J01 | [NULL] | 1.05 | WHOLE PLANT-Color-Dark Green |
| 13497314 | 35S | ME07344-02 | NO | [NULL] | [NULL] | [NULL] | [NULL] |
| 13497314 | 35S | ME07344-03 | NO | [NULL] | [NULL] | [NULL] | [NULL] |
| 13497314 | 35S | ME07344-04 | YES | I31 | [NULL] | 1.06 | ROSETTE LEAVES-Other |
| 13497314 | 35S | ME07344-04 | YES | J01 | [NULL] | 1.06 | WHOLE PLANT-Color-Dark Green |
| 13497314 | 35S | ME07344-05 | NO | [NULL] | [NULL] | [NULL] | [NULL] |
| 13497314 | 35S | ME07344-06 | NO | [NULL] | [NULL] | [NULL] | [NULL] |
| 13497314 | 35S | ME07344-07 | NO | [NULL] | [NULL] | [NULL] | [NULL] |
| 13497314 | 35S | ME07344-08 | NO | [NULL] | [NULL] | [NULL] | [NULL] |
| 13497314 | 35S | ME07344-09 | NO | [NULL] | [NULL] | [NULL] | [NULL] |
| 13497314 | 35S | ME07344-10 | YES | J01 | [NULL] | 1.06 | WHOLE PLANT-Color-Dark Green |
| 13497443 | 35S | ME03036-01 | YES | J03 | [NULL] | 6.10 | WHOLE PLANT-Color-Yellow-Green Viable 1 |
| 13497443 | 35S | ME03036-01 | YES | J13 | [NULL] | 6.10 | WHOLE PLANT-Size-Small |
| 13497443 | 35S | ME03036-02 | QUESTIONABLE | I22 | [NULL] | 6.50 | ROSETTE LEAVES-Shape-Serrate |
| 13497443 | 35S | ME03036-03 | YES | I31 | [NULL] | 6.50 | ROSETTE LEAVES-Other |
| 13497443 | 35S | ME03036-03 | YES | J03 | [NULL] | 6.50 | WHOLE PLANT-Color-Yellow-Green Viable 1 |
| 13497443 | 35S | ME03036-04 | NO | [NULL] | [NULL] | [NULL] | [NULL] |
| 13497443 | 35S | ME03036-05 | NO | [NULL] | [NULL] | [NULL] | [NULL] |
| 13497443 | 35S | ME03036-06 | NO | [NULL] | [NULL] | [NULL] | [NULL] |
| 13497443 | 35S | ME03036-07 | NO | [NULL] | [NULL] | [NULL] | [NULL] |
| 13497443 | 35S | ME03036-08 | NO | [NULL] | [NULL] | [NULL] | [NULL] |
| 13497443 | 35S | ME03036-09 | NO | [NULL] | [NULL] | [NULL] | [NULL] |
| 13497443 | 35S | ME03036-10 | YES | J01 | [NULL] | 6.00 | WHOLE PLANT-Color-Dark Green |
| 13497443 | 35S | ME03036-10 | YES | M13 | [NULL] | 6.00 | INFLORESCENCE-Flowering Time-Late Flowering |
| 13497451 | 32449 | ME00076-02 | NO | [NULL] | [NULL] | [NULL] | [NULL] |
| 13497451 | 32449 | ME00076-03 | NO | [NULL] | [NULL] | [NULL] | [NULL] |
| 13497451 | 32449 | ME00076-04 | NO | [NULL] | [NULL] | [NULL] | [NULL] |
| 13497451 | 32449 | ME00076-05 | NO | [NULL] | [NULL] | [NULL] | [NULL] |
| 13497451 | 32449 | ME00076-06 | NO | [NULL] | [NULL] | [NULL] | [NULL] |
| 13497451 | 32449 | ME00076-07 | NO | [NULL] | [NULL] | [NULL] | [NULL] |
| 13497451 | 32449 | ME00076-08 | NO | [NULL] | [NULL] | [NULL] | [NULL] |
| 13497451 | 32449 | ME00076-09 | NO | [NULL] | [NULL] | [NULL] | [NULL] |
| 13497451 | 35S | ME05396-01 | NO | [NULL] | [NULL] | [NULL] | [NULL] |
| 13497451 | 35S | ME05396-02 | NO | [NULL] | [NULL] | [NULL] | [NULL] |
| 13497451 | 35S | ME05396-03 | YES | J13 | [NULL] | 6.50 | WHOLE PLANT-Size-Small |
| 13497451 | 35S | ME05396-03 | YES | P04 | [NULL] | 6.50 | FERTILITY-Fertility-Reduced |
| 13497451 | 35S | ME05396-04 | NO | [NULL] | [NULL] | [NULL] | [NULL] |
| 13497451 | 35S | ME05396-05 | NO | [NULL] | [NULL] | [NULL] | [NULL] |
| 13497451 | 35S | ME05396-06 | YES | P04 | [NULL] | 6.50 | FERTILITY-Fertility-Reduced |
| 13497451 | 35S | ME05396-07 | YES | P04 | [NULL] | 6.50 | FERTILITY-Fertility-Reduced |
| 13497451 | 35S | ME05396-08 | NO | [NULL] | [NULL] | [NULL] | [NULL] |
| 13497451 | 35S | ME05396-09 | NO | [NULL] | [NULL] | [NULL] | [NULL] |
| 13497451 | 35S | ME05396-10 | NO | [NULL] | [NULL] | [NULL] | [NULL] |
| 13498849 | 35S | ME01342-01 | NO | [NULL] | [NULL] | [NULL] | [NULL] |
| 13498849 | 35S | ME01342-02 | QUESTIONABLE | M20 | [NULL] | 6.50 | INFLORESCENCE-Strength-Weak |
| 13498849 | 35S | ME01342-02 | QUESTIONABLE | P05 | [NULL] | 6.50 | FERTILITY-Fertility-Sterile |
| 13498849 | 35S | ME01342-03 | QUESTIONABLE | P05 | [NULL] | 6.50 | FERTILITY-Fertility-Sterile |
| 13498849 | 35S | ME01342-04 | NO | [NULL] | [NULL] | [NULL] | [NULL] |
| 13498849 | 35S | ME01342-05 | NO | [NULL] | [NULL] | [NULL] | [NULL] |
| 13498849 | 35S | ME01342-06 | NO | [NULL] | [NULL] | [NULL] | [NULL] |
| 13498849 | 35S | ME01342-07 | NO | [NULL] | [NULL] | [NULL] | [NULL] |
| 13498849 | 35S | ME01342-08 | NO | [NULL] | [NULL] | [NULL] | [NULL] |
| 13498849 | 35S | ME01342-09 | NO | [NULL] | [NULL] | [NULL] | [NULL] |
| 13498849 | 35S | ME01342-10 | NO | [NULL] | [NULL] | [NULL] | [NULL] |
| 13498849 | 35S | ME02067-01 | NO | [NULL] | [NULL] | [NULL] | [NULL] |
| 13498849 | 35S | ME02067-02 | NO | [NULL] | [NULL] | [NULL] | [NULL] |
| 13498849 | 35S | ME02067-03 | NO | [NULL] | [NULL] | [NULL] | [NULL] |
| 13498849 | 35S | ME02067-04 | NO | [NULL] | [NULL] | [NULL] | [NULL] |
| 13498849 | 35S | ME02067-05 | NO | [NULL] | [NULL] | [NULL] | [NULL] |
| 13498849 | 35S | ME02067-06 | NO | [NULL] | [NULL] | [NULL] | [NULL] |
| 13498849 | 35S | ME02067-07 | NO | [NULL] | [NULL] | [NULL] | [NULL] |
| 13498849 | 35S | ME02067-08 | NO | [NULL] | [NULL] | [NULL] | [NULL] |
| 13498849 | 35S | ME02067-09 | NO | [NULL] | [NULL] | [NULL] | [NULL] |
| 13498849 | 35S | ME02067-10 | NO | [NULL] | [NULL] | [NULL] | [NULL] |
| 13498849 | 35S | ME03153-01 | NO | [NULL] | [NULL] | [NULL] | [NULL] |
| 13498849 | 35S | ME03153-02 | YES | I08 | [NULL] | 6.50 | ROSETTE LEAVES-Disorganized Rosette- |
| | | | | | | | Disorganized Rosette |
| 13498849 | 35S | ME03153-03 | YES | I24 | [NULL] | 6.00 | ROSETTE LEAVES-Shape-Undulate |
| 13498849 | 35S | ME03153-03 | YES | J13 | [NULL] | 6.00 | WHOLE PLANT-Size-Small |
| 13498849 | 35S | ME03153-03 | YES | J14 | [NULL] | 6.00 | WHOLE PLANT-Other |
| 13498849 | 35S | ME03153-04 | YES | I08 | [NULL] | 6.50 | ROSETTE LEAVES-Disorganized Rosette- |
| | | | | | | | Disorganized Rosette |
| 13498849 | 35S | ME03153-05 | NO | [NULL] | [NULL] | [NULL] | [NULL] |
| 13498849 | 35S | ME03153-06 | NO | [NULL] | [NULL] | [NULL] | [NULL] |
| 13498849 | 35S | ME03153-07 | NO | [NULL] | [NULL] | [NULL] | [NULL] |
| 13498849 | 35S | ME03153-08 | NO | [NULL] | [NULL] | [NULL] | [NULL] |
| 13498849 | 35S | ME03153-09 | NO | [NULL] | [NULL] | [NULL] | [NULL] |
| 13498849 | 35S | ME03153-10 | NO | [NULL] | [NULL] | [NULL] | [NULL] |
| 13499487 | 35S | ME01646-01 | YES | P05 | [NULL] | 6.50 | FERTILITY-Fertility-Sterile |
| 13499487 | 35S | ME01646-02 | NO | [NULL] | [NULL] | [NULL] | [NULL] |
| 13499487 | 35S | ME01646-03 | NO | [NULL] | [NULL] | [NULL] | [NULL] |
| 13499487 | 35S | ME01646-04 | YES | P05 | [NULL] | 6.50 | FERTILITY-Fertility-Sterile |
| 13499487 | 35S | ME01646-05 | NO | [NULL] | [NULL] | [NULL] | [NULL] |
| 13499487 | 35S | ME01646-06 | YES | J08 | [NULL] | 6.50 | WHOLE PLANT-Dwarf-Misc. Dwarf |
| 13499487 | 35S | ME02001-01 | NO | [NULL] | [NULL] | [NULL] | [NULL] |
| 13499487 | 35S | ME02001-02 | QUESTIONABLE | P04 | [NULL] | 6.50 | FERTILITY-Fertility-Reduced |
| 13499487 | 35S | ME02001-02 | QUESTIONABLE | P05 | [NULL] | 9.70 | FERTILITY-Fertility-Sterile |
| 13499487 | 35S | ME02001-03 | NO | [NULL] | [NULL] | [NULL] | [NULL] |
| 13499487 | 35S | ME02001-04 | NO | [NULL] | [NULL] | [NULL] | [NULL] |
| 13499487 | 35S | ME02001-05 | NO | [NULL] | [NULL] | [NULL] | [NULL] |
| 13499487 | 35S | ME02001-06 | NO | [NULL] | [NULL] | [NULL] | [NULL] |
| 13499487 | 35S | ME02001-07 | NO | [NULL] | [NULL] | [NULL] | [NULL] |
| 13499487 | 35S | ME02001-08 | NO | [NULL] | [NULL] | [NULL] | [NULL] |
| 13499596 | 32449 | ME00171-01 | NO | [NULL] | [NULL] | [NULL] | [NULL] |
| 13499596 | 32449 | ME00171-02 | NO | [NULL] | [NULL] | [NULL] | [NULL] |
| 13499596 | 32449 | ME00171-03 | NO | [NULL] | [NULL] | [NULL] | [NULL] |
| 13499596 | 35S | ME05863-01 | YES | I31 | [NULL] | 1.04 | ROSETTE LEAVES-Other |
| 13499596 | 35S | ME05863-01 | YES | J01 | [NULL] | 1.04 | WHOLE PLANT-Color-Dark Green |
| 13499596 | 35S | ME05863-01 | YES | M10 | [NULL] | 6.50 | INFLORESCENCE-Branching-Reduced Apical |
| | | | | | | | Dominance |
| 13499596 | 35S | ME05863-01 | YES | M13 | [NULL] | 1.04 | INFLORESCENCE-Flowering Time-Late Flowering |
| 13499596 | 35S | ME05863-01 | YES | M25 | [NULL] | 6.50 | INFLORESCENCE-Other |
| 13499596 | 35S | ME05863-02 | YES | J01 | [NULL] | 1.06 | WHOLE PLANT-Color-Dark Green |
| 13499596 | 35S | ME05863-02 | YES | J13 | [NULL] | 1.06 | WHOLE PLANT-Size-Small |
| 13499596 | 35S | ME05863-02 | YES | M10 | [NULL] | 6.50 | INFLORESCENCE-Branching-Reduced Apical |
| | | | | | | | Dominance |
| 13499596 | 35S | ME05863-02 | YES | M13 | [NULL] | 1.06 | INFLORESCENCE-Flowering Time-Late Flowering |
| 13499596 | 35S | ME05863-02 | YES | M25 | [NULL] | 6.50 | INFLORESCENCE-Other |
| 13499596 | 35S | ME05863-02 | YES | P04 | [NULL] | 6.50 | FERTILITY-Fertility-Reduced |
| 13499596 | 35S | ME05863-03 | YES | M10 | [NULL] | 6.50 | INFLORESCENCE-Branching-Reduced Apical |
| | | | | | | | Dominance |
| 13499596 | 35S | ME05863-03 | YES | M25 | [NULL] | 6.50 | INFLORESCENCE-Other |
| 13499596 | 35S | ME05863-03 | YES | P04 | [NULL] | 6.50 | FERTILITY-Fertility-Reduced |
| 13499596 | 35S | ME05863-04 | NO | [NULL] | [NULL] | [NULL] | [NULL] |
| 13499596 | 35S | ME05863-05 | YES | I31 | [NULL] | 1.04 | ROSETTE LEAVES-Other |
| 13499596 | 35S | ME05863-05 | YES | J01 | [NULL] | 1.04 | WHOLE PLANT-Color-Dark Green |
| 13499596 | 35S | ME05863-05 | YES | M13 | [NULL] | 1.04 | INFLORESCENCE-Flowering Time-Late Flowering |
| 13499596 | 35S | ME05863-06 | YES | I20 | [NULL] | 1.06 | ROSETTE LEAVES-Shape-Oval |
| 13499596 | 35S | ME05863-06 | YES | I31 | [NULL] | 1.06 | ROSETTE LEAVES-Other |
| 13499596 | 35S | ME05863-06 | YES | J01 | [NULL] | 1.06 | WHOLE PLANT-Color-Dark Green |
| 13499596 | 35S | ME05863-06 | YES | M10 | [NULL] | 6.50 | INFLORESCENCE-Branching-Reduced Apical |
| | | | | | | | Dominance |
| 13499596 | 35S | ME05863-06 | YES | M25 | [NULL] | 6.50 | INFLORESCENCE-Other |
| 13499596 | 35S | ME05863-06 | YES | P04 | [NULL] | 6.50 | FERTILITY-Fertility-Reduced |
| 13499596 | 35S | ME05863-07 | YES | M10 | [NULL] | 6.50 | INFLORESCENCE-Branching-Reduced Apical |
| | | | | | | | Dominance |
| 13499596 | 35S | ME05863-07 | YES | M25 | [NULL] | 6.50 | INFLORESCENCE-Other |
| 13499596 | 35S | ME05863-07 | YES | P04 | [NULL] | 6.50 | FERTILITY-Fertility-Reduced |
| 13499596 | 35S | ME05863-08 | YES | I20 | [NULL] | 1.06 | ROSETTE LEAVES-Shape-Oval |
| 13499596 | 35S | ME05863-08 | YES | I31 | [NULL] | 1.06 | ROSETTE LEAVES-Other |
| 13499596 | 35S | ME05863-08 | YES | J01 | [NULL] | 1.06 | WHOLE PLANT-Color-Dark Green |
| 13499596 | 35S | ME05863-08 | YES | M10 | [NULL] | 6.50 | INFLORESCENCE-Branching-Reduced Apical |
| | | | | | | | Dominance |
| 13499596 | 35S | ME05863-08 | YES | M25 | [NULL] | 6.50 | INFLORESCENCE-Other |
| 13499596 | 35S | ME05863-08 | YES | P04 | [NULL] | 6.50 | FERTILITY-Fertility-Reduced |
| 13499596 | 35S | ME05863-09 | YES | I20 | [NULL] | 1.07 | ROSETTE LEAVES-Shape-Oval |
| 13499596 | 35S | ME05863-09 | YES | J13 | [NULL] | 1.07 | WHOLE PLANT-Size-Small |
| 13499596 | 35S | ME05863-09 | YES | M10 | [NULL] | 6.50 | INFLORESCENCE-Branching-Reduced Apical |
| | | | | | | | Dominance |
| 13499596 | 35S | ME05863-09 | YES | M25 | [NULL] | 6.50 | INFLORESCENCE-Other |
| 13499596 | 35S | ME05863-09 | YES | P04 | [NULL] | 6.50 | FERTILITY-Fertility-Reduced |
| 13499596 | 35S | ME05863-10 | YES | I14 | [NULL] | 1.04 | ROSETTE LEAVES-Petiole Length-Short Petioles |
| 13499596 | 35S | ME05863-10 | YES | I22 | [NULL] | 6.00 | ROSETTE LEAVES-Shape-Serrate |
| 13499596 | 35S | ME05863-10 | YES | I31 | [NULL] | 6.00 | ROSETTE LEAVES-Other |
| 13499596 | 35S | ME05863-10 | YES | J01 | [NULL] | 1.04 | WHOLE PLANT-Color-Dark Green |
| 13499596 | 35S | ME05863-10 | YES | J13 | [NULL] | 1.04 | WHOLE PLANT-Size-Small |
| 13499596 | 35S | ME05863-10 | YES | J13 | [NULL] | 6.00 | WHOLE PLANT-Size-Small |
| 13499672 | 35S | ME04179-01 | NO | [NULL] | [NULL] | [NULL] | [NULL] |
| 13499672 | 35S | ME04179-02 | NO | [NULL] | [NULL] | [NULL] | [NULL] |
| 13499672 | 35S | ME04179-03 | YES | J13 | [NULL] | 6.10 | WHOLE PLANT-Size-Small |
| 13499672 | 35S | ME04179-03 | YES | J13 | [NULL] | 6.50 | WHOLE PLANT-Size-Small |
| 13499672 | 35S | ME04179-03 | YES | P04 | [NULL] | 6.50 | FERTILITY-Fertility-Reduced |
| 13499672 | 35S | ME04179-04 | NO | [NULL] | [NULL] | [NULL] | [NULL] |
| 13499672 | 35S | ME04179-05 | YES | I31 | [NULL] | 5.10 | ROSETTE LEAVES-Other |
| 13499672 | 35S | ME04179-05 | YES | J13 | [NULL] | 5.10 | WHOLE PLANT-Size-Small |
| 13499672 | 35S | ME04179-05 | YES | J13 | [NULL] | 6.50 | WHOLE PLANT-Size-Small |
| 13499672 | 35S | ME04179-05 | YES | P04 | [NULL] | 6.50 | FERTILITY-Fertility-Reduced |
| 13499672 | 35S | ME04179-06 | YES | J13 | [NULL] | 5.10 | WHOLE PLANT-Size-Small |
| 13499672 | 35S | ME04179-06 | YES | J13 | [NULL] | 6.50 | WHOLE PLANT-Size-Small |
| 13499672 | 35S | ME04179-06 | YES | M14 | [NULL] | 5.10 | INFLORESCENCE-Height-Short |
| 13499672 | 35S | ME04179-06 | YES | M19 | [NULL] | 5.10 | INFLORESCENCE-Strength-Strong |
| 13499672 | 35S | ME04179-06 | YES | P05 | [NULL] | 6.50 | FERTILITY-Fertility-Sterile |
| 13499672 | 35S | ME04179-07 | YES | J01 | [NULL] | 6.10 | WHOLE PLANT-Color-Dark Green |
| 13499672 | 35S | ME04179-07 | YES | J01 | [NULL] | 6.50 | WHOLE PLANT-Color-Dark Green |
| 13499672 | 35S | ME04179-07 | YES | M14 | [NULL] | 6.10 | INFLORESCENCE-Height-Short |
| 13499672 | 35S | ME04179-07 | YES | M19 | [NULL] | 6.10 | INFLORESCENCE-Strength-Strong |
| 13499672 | 35S | ME04179-07 | YES | M19 | [NULL] | 6.50 | INFLORESCENCE-Strength-Strong |
| 13499672 | 35S | ME04179-08 | YES | J01 | [NULL] | 6.50 | WHOLE PLANT-Color-Dark Green |
| 13499672 | 35S | ME04179-08 | YES | M14 | [NULL] | 6.00 | INFLORESCENCE-Height-Short |
| 13499672 | 35S | ME04179-08 | YES | M19 | [NULL] | 6.00 | INFLORESCENCE-Strength-Strong |
| 13499672 | 35S | ME04179-08 | YES | M19 | [NULL] | 6.50 | INFLORESCENCE-Strength-Strong |
| 13499672 | 35S | ME04179-09 | YES | J01 | [NULL] | 6.50 | WHOLE PLANT-Color-Dark Green |
| 13499672 | 35S | ME04179-09 | YES | M14 | [NULL] | 6.10 | INFLORESCENCE-Height-Short |
| 13499672 | 35S | ME04179-09 | YES | M19 | [NULL] | 6.10 | INFLORESCENCE-Strength-Strong |
| 13499672 | 35S | ME04179-09 | YES | M19 | [NULL] | 6.50 | INFLORESCENCE-Strength-Strong |
| 13499732 | 35S | ME02925-01 | YES | I05 | [NULL] | 6.00 | ROSETTE LEAVES-Curled-Curled 3 |
| 13499732 | 35S | ME02925-01 | YES | I18 | [NULL] | 6.00 | ROSETTE LEAVES-Shape-Lanceolate |
| 13499732 | 35S | ME02925-01 | YES | I31 | [NULL] | 6.00 | ROSETTE LEAVES-Other |
| 13499732 | 35S | ME02925-02 | NO | [NULL] | [NULL] | [NULL] | [NULL] |
| 13499732 | 35S | ME02925-03 | NO | I03 | [NULL] | 6.10 | ROSETTE LEAVES-Curled-Curled 1 |
| 13499732 | 35S | ME02925-03 | NO | I18 | [NULL] | 6.10 | ROSETTE LEAVES-Shape-Lanceolate |
| 13499732 | 35S | ME02925-03 | NO | [NULL] | [NULL] | 6.10 | [NULL] |
| 13499732 | 35S | ME02925-04 | NO | [NULL] | [NULL] | [NULL] | [NULL] |
| 13499732 | 35S | ME02925-05 | NO | [NULL] | [NULL] | [NULL] | [NULL] |
| 13499732 | 35S | ME02925-06 | NO | [NULL] | [NULL] | [NULL] | [NULL] |
| 13499732 | 35S | ME02925-07 | YES | I18 | [NULL] | 6.30 | ROSETTE LEAVES-Shape-Lanceolate |
| 13499732 | 35S | ME02925-08 | YES | B01 | [NULL] | 6.10 | HYPOCOTYL-Length-Long |
| 13499732 | 35S | ME02925-08 | YES | I20 | [NULL] | 6.10 | ROSETTE LEAVES-Shape-Oval |
| 13499732 | 35S | ME02925-08 | YES | J01 | [NULL] | 6.10 | WHOLE PLANT-Color-Dark Green |
| 13499732 | 35S | ME02925-08 | YES | J11 | [NULL] | 6.10 | WHOLE PLANT-Rosette Shape-Standing |
| 13499732 | 35S | ME02925-08 | YES | J13 | [NULL] | 6.10 | WHOLE PLANT-Size-Small |
| 13499732 | 35S | ME02925-09 | NO | [NULL] | [NULL] | [NULL] | [NULL] |
| 13499732 | 35S | ME02925-10 | NO | [NULL] | [NULL] | [NULL] | [NULL] |
| 13499739 | 34414F | ME09369-01 | [NULL] | [NULL] | [NULL] | [NULL] | [NULL] |
| 13499739 | 34414F | ME09369-02 | [NULL] | [NULL] | [NULL] | [NULL] | [NULL] |
| 13499739 | 34414F | ME09369-03 | [NULL] | [NULL] | [NULL] | [NULL] | [NULL] |
| 13499739 | 34414F | ME09369-04 | [NULL] | [NULL] | [NULL] | [NULL] | [NULL] |
| 13499739 | 34414F | ME09369-05 | [NULL] | [NULL] | [NULL] | [NULL] | [NULL] |
| 13499739 | 34414F | ME09369-06 | [NULL] | [NULL] | [NULL] | [NULL] | [NULL] |
| 13499739 | 34414F | ME09369-07 | [NULL] | [NULL] | [NULL] | [NULL] | [NULL] |
| 13499739 | 34414F | ME09369-08 | [NULL] | [NULL] | [NULL] | [NULL] | [NULL] |
| 13499739 | 34414F | ME09369-09 | [NULL] | [NULL] | [NULL] | [NULL] | [NULL] |
| 13499739 | 34414F | ME09369-10 | [NULL] | [NULL] | [NULL] | [NULL] | [NULL] |
| 13499739 | 35S | ME02928-01 | YES | I12 | [NULL] | 6.50 | ROSETTE LEAVES-Interveinal Chlorosis- |
| | | | | | | | Interveinal Chlorosis |
| 13499739 | 35S | ME02928-01 | YES | J01 | [NULL] | 6.30 | WHOLE PLANT-Color-Dark Green |
| 13499739 | 35S | ME02928-01 | YES | J01 | [NULL] | 6.50 | WHOLE PLANT-Color-Dark Green |
| 13499739 | 35S | ME02928-01 | YES | J13 | [NULL] | 6.30 | WHOLE PLANT-Size-Small |
| 13499739 | 35S | ME02928-01 | YES | J13 | [NULL] | 6.50 | WHOLE PLANT-Size-Small |
| 13499739 | 35S | ME02928-01 | YES | J14 | [NULL] | 6.30 | WHOLE PLANT-Other |
| 13499739 | 35S | ME02928-02 | YES | I12 | [NULL] | 6.50 | ROSETTE LEAVES-Interveinal Chlorosis- |
| | | | | | | | Interveinal Chlorosis |
| 13499739 | 35S | ME02928-02 | YES | J01 | [NULL] | 6.30 | WHOLE PLANT-Color-Dark Green |
| 13499739 | 35S | ME02928-02 | YES | J01 | [NULL] | 6.50 | WHOLE PLANT-Color-Dark Green |
| 13499739 | 35S | ME02928-02 | YES | J13 | [NULL] | 6.30 | WHOLE PLANT-Size-Small |
| 13499739 | 35S | ME02928-02 | YES | J13 | [NULL] | 6.50 | WHOLE PLANT-Size-Small |
| 13499739 | 35S | ME02928-02 | YES | J14 | [NULL] | 6.30 | WHOLE PLANT-Other |
| 13499739 | 35S | ME02928-03 | YES | I12 | [NULL] | 6.50 | ROSETTE LEAVES-Interveinal Chlorosis- |
| | | | | | | | Interveinal Chlorosis |
| 13499739 | 35S | ME02928-03 | YES | J01 | [NULL] | 6.30 | WHOLE PLANT-Color-Dark Green |
| 13499739 | 35S | ME02928-03 | YES | J01 | [NULL] | 6.50 | WHOLE PLANT-Color-Dark Green |
| 13499739 | 35S | ME02928-03 | YES | J13 | [NULL] | 6.30 | WHOLE PLANT-Size-Small |
| 13499739 | 35S | ME02928-03 | YES | J13 | [NULL] | 6.50 | WHOLE PLANT-Size-Small |
| 13499739 | 35S | ME02928-03 | YES | J14 | [NULL] | 6.30 | WHOLE PLANT-Other |
| 13499739 | 35S | ME02928-04 | YES | I12 | [NULL] | 6.50 | ROSETTE LEAVES-Interveinal Chlorosis- |
| | | | | | | | Interveinal Chlorosis |
| 13499739 | 35S | ME02928-04 | YES | J01 | [NULL] | 6.30 | WHOLE PLANT-Color-Dark Green |
| 13499739 | 35S | ME02928-04 | YES | J01 | [NULL] | 6.50 | WHOLE PLANT-Color-Dark Green |
| 13499739 | 35S | ME02928-04 | YES | J13 | [NULL] | 6.30 | WHOLE PLANT-Size-Small |
| 13499739 | 35S | ME02928-04 | YES | J13 | [NULL] | 6.50 | WHOLE PLANT-Size-Small |
| 13499739 | 35S | ME02928-04 | YES | J14 | [NULL] | 6.30 | WHOLE PLANT-Other |
| 13499739 | 35S | ME02928-05 | YES | I12 | [NULL] | 6.50 | ROSETTE LEAVES-Interveinal Chlorosis- |
| | | | | | | | Interveinal Chlorosis |
| 13499739 | 35S | ME02928-05 | YES | J01 | [NULL] | 6.50 | WHOLE PLANT-Color-Dark Green |
| 13499739 | 35S | ME02928-05 | YES | J13 | [NULL] | 6.50 | WHOLE PLANT-Size-Small |
| 13499739 | 35S | ME02928-06 | YES | I12 | [NULL] | 6.50 | ROSETTE LEAVES-Interveinal Chlorosis- |
| | | | | | | | Interveinal Chlorosis |
| 13499739 | 35S | ME02928-06 | YES | J01 | [NULL] | 6.30 | WHOLE PLANT-Color-Dark Green |
| 13499739 | 35S | ME02928-06 | YES | J01 | [NULL] | 6.50 | WHOLE PLANT-Color-Dark Green |
| 13499739 | 35S | ME02928-06 | YES | J13 | [NULL] | 6.30 | WHOLE PLANT-Size-Small |
| 13499739 | 35S | ME02928-06 | YES | J13 | [NULL] | 6.50 | WHOLE PLANT-Size-Small |
| 13499739 | 35S | ME02928-06 | YES | J14 | [NULL] | 6.30 | WHOLE PLANT-Other |
| 13499739 | 35S | ME02928-07 | YES | I12 | [NULL] | 6.50 | ROSETTE LEAVES-Interveinal Chlorosis- |
| | | | | | | | Interveinal Chlorosis |
| 13499739 | 35S | ME02928-07 | YES | J01 | [NULL] | 6.30 | WHOLE PLANT-Color-Dark Green |
| 13499739 | 35S | ME02928-07 | YES | J01 | [NULL] | 6.50 | WHOLE PLANT-Color-Dark Green |
| 13499739 | 35S | ME02928-07 | YES | J13 | [NULL] | 6.30 | WHOLE PLANT-Size-Small |
| 13499739 | 35S | ME02928-07 | YES | J13 | [NULL] | 6.50 | WHOLE PLANT-Size-Small |
| 13499739 | 35S | ME02928-07 | YES | J14 | [NULL] | 6.30 | WHOLE PLANT-Other |
| 13499739 | 35S | ME02928-08 | NO | [NULL] | [NULL] | [NULL] | [NULL] |
| 13499739 | 35S | ME02928-09 | NO | [NULL] | [NULL] | [NULL] | [NULL] |
| 13499739 | 35S | ME02928-10 | NO | [NULL] | [NULL] | [NULL] | [NULL] |
| 13591405 | 35S | ME03797-01 | NO | [NULL] | [NULL] | [NULL] | [NULL] |
| 13591405 | 35S | ME03797-02 | NO | [NULL] | [NULL] | [NULL] | [NULL] |
| 13591405 | 35S | ME03797-03 | NO | [NULL] | [NULL] | [NULL] | [NULL] |
| 13591405 | 35S | ME03797-04 | NO | [NULL] | [NULL] | [NULL] | [NULL] |
| 13591405 | 35S | ME03797-05 | NO | [NULL] | [NULL] | [NULL] | [NULL] |
| 13591405 | 35S | ME03797-06 | QUESTIONABLE | I03 | [NULL] | 5.10 | ROSETTE LEAVES-Curled-Curled 1 |
| 13591405 | 35S | ME03797-06 | QUESTIONABLE | K07 | [NULL] | 5.10 | CAULINE LEAVES-Curled-Curled 5 |
| 13591405 | 35S | ME03797-07 | NO | [NULL] | [NULL] | [NULL] | [NULL] |
| 13591405 | 35S | ME03797-08 | NO | [NULL] | [NULL] | [NULL] | [NULL] |
| 13591405 | 35S | ME03797-09 | NO | [NULL] | [NULL] | [NULL] | [NULL] |
| 13591405 | 35S | ME04095-01 | NO | [NULL] | [NULL] | [NULL] | [NULL] |
| 13591405 | 35S | ME04095-02 | NO | [NULL] | [NULL] | [NULL] | [NULL] |
| 13591405 | 35S | ME04095-03 | NO | [NULL] | [NULL] | [NULL] | [NULL] |
| 13591405 | 35S | ME04095-04 | NO | [NULL] | [NULL] | [NULL] | [NULL] |
| 13591405 | 35S | ME04095-05 | NO | [NULL] | [NULL] | [NULL] | [NULL] |
| 13591405 | 35S | ME04095-06 | NO | [NULL] | [NULL] | [NULL] | [NULL] |
| 13591405 | 35S | ME04095-07 | YES | J01 | [NULL] | 6.10 | WHOLE PLANT-Color-Dark Green |
| 13591405 | 35S | ME04095-07 | YES | M13 | [NULL] | 6.10 | INFLORESCENCE-Flowering Time-Late Flowering |
| 13591405 | 35S | ME04095-07 | YES | M14 | [NULL] | 6.10 | INFLORESCENCE-Height-Short |
| 13591405 | 35S | ME04095-07 | YES | M19 | [NULL] | 6.50 | INFLORESCENCE-Strength-Strong |
| 13591405 | 35S | ME04095-07 | YES | M25 | [NULL] | 6.50 | INFLORESCENCE-Other |
| 13591405 | 35S | ME04095-08 | YES | I31 | [NULL] | 6.50 | ROSETTE LEAVES-Other |
| 13591405 | 35S | ME04095-08 | YES | J01 | [NULL] | 6.50 | WHOLE PLANT-Color-Dark Green |
| 13591405 | 35S | ME04095-08 | YES | M13 | [NULL] | 6.10 | INFLORESCENCE-Flowering Time-Late Flowering |
| 13591405 | 35S | ME04095-08 | YES | M14 | [NULL] | 6.10 | INFLORESCENCE-Height-Short |
| 13591405 | 35S | ME04095-08 | YES | M14 | [NULL] | 6.50 | INFLORESCENCE-Height-Short |
| 13591405 | 35S | ME04095-08 | YES | M19 | [NULL] | 6.50 | INFLORESCENCE-Strength-Strong |
| 13591405 | 35S | ME04095-08 | YES | M25 | [NULL] | 6.50 | INFLORESCENCE-Other |
| 13591405 | 35S | ME04095-09 | NO | [NULL] | [NULL] | [NULL] | [NULL] |
| 13591405 | 35S | ME04095-10 | YES | I07 | [NULL] | 6.90 | ROSETTE LEAVES-Curled-Curled 5 |
| 13591405 | 35S | ME04095-10 | YES | J13 | [NULL] | 6.90 | WHOLE PLANT-Size-Small |
| 13591613 | 35S | ME07502-01 | YES | I30 | [NULL] | 6.10 | ROSETTE LEAVES-Wax-Glossy |
| 13591613 | 35S | ME07502-01 | YES | J01 | [NULL] | 6.10 | WHOLE PLANT-Color-Dark Green |
| 13591613 | 35S | ME07502-01 | YES | J13 | [NULL] | 6.10 | WHOLE PLANT-Size-Small |
| 13591613 | 35S | ME07502-02 | NO | [NULL] | [NULL] | [NULL] | [NULL] |
| 13591613 | 35S | ME07502-03 | YES | J13 | [NULL] | 6.10 | WHOLE PLANT-Size-Small |
| 13591613 | 35S | ME07502-04 | YES | J13 | [NULL] | 6.10 | WHOLE PLANT-Size-Small |
| 13591613 | 35S | ME07502-05 | NO | [NULL] | [NULL] | [NULL] | [NULL] |
| 13591613 | 35S | ME07502-06 | NO | [NULL] | [NULL] | [NULL] | [NULL] |
| 13591613 | 35S | ME07502-07 | YES | J13 | [NULL] | 6.10 | WHOLE PLANT-Size-Small |
| 13591613 | 35S | ME07502-08 | NO | [NULL] | [NULL] | [NULL] | [NULL] |
| 13591613 | 35S | ME07502-09 | NO | [NULL] | [NULL] | [NULL] | [NULL] |
| 13593739 | 35S | ME01506-01 | NO | [NULL] | [NULL] | [NULL] | [NULL] |
| 13593739 | 35S | ME01506-02 | NO | [NULL] | [NULL] | [NULL] | [NULL] |
| 13593739 | 35S | ME01506-03 | NO | [NULL] | [NULL] | [NULL] | [NULL] |
| 13593739 | 35S | ME01506-04 | NO | [NULL] | [NULL] | [NULL] | [NULL] |
| 13593739 | 35S | ME01506-05 | YES | P04 | [NULL] | 6.50 | FERTILITY-Fertility-Reduced |
| 13593739 | 35S | ME01506-06 | NO | [NULL] | [NULL] | [NULL] | [NULL] |
| 13593739 | 35S | ME01506-07 | NO | [NULL] | [NULL] | [NULL] | [NULL] |
| 13593739 | 35S | ME01506-08 | NO | [NULL] | [NULL] | [NULL] | [NULL] |
| 13593739 | 35S | ME01506-09 | YES | J13 | [NULL] | 6.50 | WHOLE PLANT-Size-Small |
| 13593739 | 35S | ME01506-09 | YES | P04 | [NULL] | 6.50 | FERTILITY-Fertility-Reduced |
| 13593739 | 35S | ME01506-10 | YES | J13 | [NULL] | 6.50 | WHOLE PLANT-Size-Small |
| 13593739 | 35S | ME01506-10 | YES | P04 | [NULL] | 6.50 | FERTILITY-Fertility-Reduced |
| 13593739 | 35S | ME01506-10 | YES | P05 | [NULL] | 9.70 | FERTILITY-Fertility-Sterile |
| 13610669 | 35S | ME01681-01 | NO | [NULL] | [NULL] | [NULL] | [NULL] |
| 13610669 | 35S | ME01681-02 | NO | [NULL] | [NULL] | [NULL] | [NULL] |
| 13610669 | 35S | ME01681-03 | NO | [NULL] | [NULL] | [NULL] | [NULL] |
| 13610669 | 35S | ME01681-04 | NO | [NULL] | [NULL] | [NULL] | [NULL] |
| 13610669 | 35S | ME01681-05 | YES | P04 | [NULL] | 6.50 | FERTILITY-Fertility-Reduced |
| 13610669 | 35S | ME01681-06 | NO | [NULL] | [NULL] | [NULL] | [NULL] |
| 13610669 | 35S | ME01681-07 | YES | P04 | [NULL] | 6.90 | FERTILITY-Fertility-Reduced |
| 13610669 | 35S | ME01681-08 | YES | P04 | [NULL] | 6.90 | FERTILITY-Fertility-Reduced |
| 13610669 | 35S | ME01681-09 | NO | [NULL] | [NULL] | [NULL] | [NULL] |
| 13610669 | 35S | ME01681-10 | NO | [NULL] | [NULL] | [NULL] | [NULL] |
| 13621980 | 15529F | ME05070-01 | NO | [NULL] | [NULL] | [NULL] | [NULL] |
| 13621980 | 15529F | ME05070-02 | NO | [NULL] | [NULL] | [NULL] | [NULL] |
| 13621980 | 15529F | ME05070-03 | NO | [NULL] | [NULL] | [NULL] | [NULL] |
| 13621980 | 15529F | ME05070-04 | NO | [NULL] | [NULL] | [NULL] | [NULL] |
| 13621980 | 15529F | ME05070-05 | NO | [NULL] | [NULL] | [NULL] | [NULL] |
| 13621980 | 15529F | ME05070-06 | NO | [NULL] | [NULL] | [NULL] | [NULL] |
| 13621980 | 15529F | ME05070-07 | NO | [NULL] | [NULL] | [NULL] | [NULL] |
| 13621980 | 15529F | ME05070-08 | NO | [NULL] | [NULL] | [NULL] | [NULL] |
| 13621980 | 15529F | ME05070-09 | NO | [NULL] | [NULL] | [NULL] | [NULL] |
| 13621980 | 15529F | ME05070-10 | NO | [NULL] | [NULL] | [NULL] | [NULL] |
| 13621980 | 32449F | ME05082-01 | QUESTIONABLE | I05 | [NULL] | 6.10 | ROSETTE LEAVES-Curled-Curled 3 |
| 13621980 | 32449F | ME05082-01 | QUESTIONABLE | I08 | [NULL] | 6.10 | ROSETTE LEAVES-Disorganized |
| | | | | | | | Rosette-Disorganized Rosette |
| 13621980 | 32449F | ME05082-01 | QUESTIONABLE | I31 | [NULL] | 6.10 | ROSETTE LEAVES-Other |
| 13621980 | 32449F | ME05082-01 | QUESTIONABLE | J01 | [NULL] | 6.30 | WHOLE PLANT-Color-Dark Green |
| 13621980 | 32449F | ME05082-01 | QUESTIONABLE | M25 | [NULL] | 6.10 | INFLORESCENCE-Other |
| 13621980 | 32449F | ME05082-02 | NO | [NULL] | [NULL] | [NULL] | [NULL] |
| 13621980 | 32449F | ME05082-03 | NO | [NULL] | [NULL] | [NULL] | [NULL] |
| 13621980 | 32449F | ME05082-04 | NO | [NULL] | [NULL] | [NULL] | [NULL] |
| 13621980 | 32449F | ME05082-05 | NO | [NULL] | [NULL] | [NULL] | [NULL] |
| 13621980 | 32449F | ME05082-06 | NO | [NULL] | [NULL] | [NULL] | [NULL] |
| 13621980 | 32449F | ME05082-07 | NO | [NULL] | [NULL] | [NULL] | [NULL] |
| 13621980 | 32449F | ME05082-08 | NO | [NULL] | [NULL] | [NULL] | [NULL] |
| 13621980 | 32449F | ME05082-09 | NO | [NULL] | [NULL] | [NULL] | [NULL] |
| 13621980 | 32449F | ME05082-10 | NO | [NULL] | [NULL] | [NULL] | [NULL] |
| 13621980 | 35S | ME02879-01 | YES | J01 | [NULL] | 6.30 | WHOLE PLANT-Color-Dark Green |
| 13621980 | 35S | ME02879-01 | YES | J13 | [NULL] | 6.30 | WHOLE PLANT-Size-Small |
| 13621980 | 35S | ME02879-01 | YES | M19 | [NULL] | 6.30 | INFLORESCENCE-Strength-Strong |
| 13621980 | 35S | ME02879-01 | YES | M25 | [NULL] | 6.30 | INFLORESCENCE-Other |
| 13621980 | 35S | ME02879-01 | YES | P04 | [NULL] | 6.30 | FERTILITY-Fertility-Reduced |
| 13621980 | 35S | ME02879-02 | NO | [NULL] | [NULL] | [NULL] | [NULL] |
| 13621980 | 35S | ME02879-03 | YES | J01 | [NULL] | 6.30 | WHOLE PLANT-Color-Dark Green |
| 13621980 | 35S | ME02879-03 | YES | J13 | [NULL] | 6.30 | WHOLE PLANT-Size-Small |
| 13621980 | 35S | ME02879-03 | YES | M19 | [NULL] | 6.30 | INFLORESCENCE-Strength-Strong |
| 13621980 | 35S | ME02879-03 | YES | M25 | [NULL] | 6.30 | INFLORESCENCE-Other |
| 13621980 | 35S | ME02879-03 | YES | P04 | [NULL] | 6.30 | FERTILITY-Fertility-Reduced |
| 13621980 | 35S | ME02879-04 | YES | J01 | [NULL] | 6.30 | WHOLE PLANT-Color-Dark Green |
| 13621980 | 35S | ME02879-04 | YES | J13 | [NULL] | 6.30 | WHOLE PLANT-Size-Small |
| 13621980 | 35S | ME02879-04 | YES | M19 | [NULL] | 6.30 | INFLORESCENCE-Strength-Strong |
| 13621980 | 35S | ME02879-04 | YES | M25 | [NULL] | 6.30 | INFLORESCENCE-Other |
| 13621980 | 35S | ME02879-04 | YES | P04 | [NULL] | 6.30 | FERTILITY-Fertility-Reduced |
| 13621980 | 35S | ME02879-05 | NO | [NULL] | [NULL] | [NULL] | [NULL] |
| 13621980 | 35S | ME02879-06 | NO | [NULL] | [NULL] | [NULL] | [NULL] |
| 13621980 | 35S | ME02879-07 | NO | [NULL] | [NULL] | [NULL] | [NULL] |
| 13621980 | 35S | ME02879-08 | NO | [NULL] | [NULL] | [NULL] | [NULL] |
| 13621980 | 35S | ME02879-09 | YES | J01 | [NULL] | 6.30 | WHOLE PLANT-Color-Dark Green |
| 13621980 | 35S | ME02879-09 | YES | J13 | [NULL] | 6.30 | WHOLE PLANT-Size-Small |
| 13621980 | 35S | ME02879-09 | YES | M19 | [NULL] | 6.30 | INFLORESCENCE-Strength-Strong |
| 13621980 | 35S | ME02879-09 | YES | M25 | [NULL] | 6.30 | INFLORESCENCE-Other |
| 13621980 | 35S | ME02879-09 | YES | P04 | [NULL] | 6.30 | FERTILITY-Fertility-Reduced |
| 13621980 | 35S | ME02879-10 | NO | [NULL] | [NULL] | [NULL] | [NULL] |
| 13648013 | 35S | ME05282-01 | YES | J03 | [NULL] | 6.00 | WHOLE PLANT-Color-Yellow-Green Viable 1 |
| 13648013 | 35S | ME05282-02 | NO | [NULL] | [NULL] | [NULL] | [NULL] |
| 13648013 | 35S | ME05282-03 | NO | [NULL] | [NULL] | [NULL] | [NULL] |
| 13648013 | 35S | ME05282-04 | YES | J03 | [NULL] | 6.00 | WHOLE PLANT-Color-Yellow-Green Viable 1 |
| 13648013 | 35S | ME05282-05 | NO | [NULL] | [NULL] | [NULL] | [NULL] |
| 13648013 | 35S | ME05282-06 | YES | J03 | [NULL] | 6.00 | WHOLE PLANT-Color-Yellow-Green Viable 1 |
| 13648013 | 35S | ME05282-07 | NO | [NULL] | [NULL] | [NULL] | [NULL] |
| 13648013 | 35S | ME05282-08 | NO | [NULL] | [NULL] | [NULL] | [NULL] |
| 13648013 | 35S | ME05282-09 | YES | J03 | [NULL] | 6.00 | WHOLE PLANT-Color-Yellow-Green Viable 1 |
| 13648013 | 35S | ME05282-10 | YES | J03 | [NULL] | 6.00 | WHOLE PLANT-Color-Yellow-Green Viable 1 |
| 14311211 | 35S | ME04211-01 | YES | J03 | [NULL] | 6.10 | WHOLE PLANT-Color-Yellow-Green Viable 1 |
| 14311211 | 35S | ME04211-01 | YES | J13 | [NULL] | 6.10 | WHOLE PLANT-Size-Small |
| 14311211 | 35S | ME04211-01 | YES | J13 | [NULL] | 6.50 | WHOLE PLANT-Size-Small |
| 14311211 | 35S | ME04211-01 | YES | P04 | [NULL] | 6.50 | FERTILITY-Fertility-Reduced |
| 14311211 | 35S | ME04211-02 | NO | [NULL] | [NULL] | [NULL] | [NULL] |
| 14311211 | 35S | ME04211-03 | YES | M14 | [NULL] | 6.10 | INFLORESCENCE-Height-Short |
| 14311211 | 35S | ME04211-03 | YES | M15 | [NULL] | 6.50 | INFLORESCENCE-Height-Tall |
| 14311211 | 35S | ME04211-03 | YES | P04 | [NULL] | 6.50 | FERTILITY-Fertility-Reduced |
| 14311211 | 35S | ME04211-04 | YES | J03 | [NULL] | 5.10 | WHOLE PLANT-Color-Yellow-Green Viable 1 |
| 14311211 | 35S | ME04211-04 | YES | J13 | [NULL] | 5.10 | WHOLE PLANT-Size-Small |
| 14311211 | 35S | ME04211-04 | YES | J13 | [NULL] | 6.50 | WHOLE PLANT-Size-Small |
| 14311211 | 35S | ME04211-04 | YES | P04 | [NULL] | 6.50 | FERTILITY-Fertility-Reduced |
| 14311211 | 35S | ME04211-05 | NO | [NULL] | [NULL] | [NULL] | [NULL] |
| 14311211 | 35S | ME04211-06 | NO | [NULL] | [NULL] | [NULL] | [NULL] |
| 14311211 | 35S | ME04211-07 | NO | [NULL] | [NULL] | [NULL] | [NULL] |
| 14311211 | 35S | ME04211-08 | NO | [NULL] | [NULL] | [NULL] | [NULL] |
| 14311211 | 35S | ME04211-09 | YES | J01 | [NULL] | 5.10 | WHOLE PLANT-Color-Dark Green |
| 14311211 | 35S | ME04211-09 | YES | J13 | [NULL] | 5.10 | WHOLE PLANT-Size-Small |
| 14311211 | 35S | ME04211-10 | NO | [NULL] | [NULL] | [NULL] | [NULL] |
| 15170337 | 326D | ME09237-01 | NO | [NULL] | [NULL] | [NULL] | [NULL] |
| 15170337 | 326D | ME09237-02 | NO | [NULL] | [NULL] | [NULL] | [NULL] |
| 15170337 | 326D | ME09237-03 | YES | M13 | [NULL] | 1.09 | INFLORESCENCE-Flowering Time-Late Flowering |
| 15170337 | 326D | ME09237-03 | YES | M13 | [NULL] | 1.10 | INFLORESCENCE-Flowering Time-Late Flowering |
| 15170337 | 326D | ME09237-04 | NO | [NULL] | [NULL] | [NULL] | [NULL] |
| 15170337 | 326D | ME09237-05 | YES | M13 | [NULL] | 1.09 | INFLORESCENCE-Flowering Time-Late Flowering |
| 15170337 | 326D | ME09237-06 | YES | M13 | [NULL] | 1.08 | INFLORESCENCE-Flowering Time-Late Flowering |
| 15170337 | 326D | ME09237-07 | NO | [NULL] | [NULL] | [NULL] | [NULL] |
| 15170337 | 326D | ME09237-08 | YES | M13 | [NULL] | 1.07 | INFLORESCENCE-Flowering Time-Late Flowering |
| 15170337 | 326D | ME09237-09 | YES | M13 | [NULL] | 1.10 | INFLORESCENCE-Flowering Time-Late Flowering |
| 15170337 | 326D | ME09237-10 | YES | M13 | [NULL] | 1.10 | INFLORESCENCE-Flowering Time-Late Flowering |
| 15170337 | 34414F | ME09397-01 | NO | [NULL] | [NULL] | [NULL] | [NULL] |
| 15170337 | 34414F | ME09397-02 | NO | [NULL] | [NULL] | [NULL] | [NULL] |
| 15170337 | 34414F | ME09397-03 | NO | [NULL] | [NULL] | [NULL] | [NULL] |
| 15170337 | 34414F | ME09397-04 | NO | [NULL] | [NULL] | [NULL] | [NULL] |
| 15170337 | 34414F | ME09397-05 | NO | [NULL] | [NULL] | [NULL] | [NULL] |
| 15170337 | 34414F | ME09397-06 | NO | [NULL] | [NULL] | [NULL] | [NULL] |
| 15170337 | 34414F | ME09397-07 | NO | [NULL] | [NULL] | [NULL] | [NULL] |
| 15170337 | 34414F | ME09397-08 | NO | [NULL] | [NULL] | [NULL] | [NULL] |
| 15170337 | 34414F | ME09397-09 | NO | [NULL] | [NULL] | [NULL] | [NULL] |
| 15170337 | 34414F | ME09397-10 | NO | [NULL] | [NULL] | [NULL] | [NULL] |
| 15170337 | 35S | ME05214-01 | YES | I14 | [NULL] | 6.30 | ROSETTE LEAVES-Petiole Length-Short Petioles |
| 15170337 | 35S | ME05214-01 | YES | I20 | [NULL] | 6.30 | ROSETTE LEAVES-Shape-Oval |
| 15170337 | 35S | ME05214-01 | YES | J13 | [NULL] | 6.30 | WHOLE PLANT-Size-Small |
| 15170337 | 35S | ME05214-01 | YES | P04 | [NULL] | 6.30 | FERTILITY-Fertility-Reduced |
| 15170337 | 35S | ME05214-02 | YES | I14 | [NULL] | 6.30 | ROSETTE LEAVES-Petiole Length-Short Petioles |
| 15170337 | 35S | ME05214-02 | YES | I20 | [NULL] | 6.30 | ROSETTE LEAVES-Shape-Oval |
| 15170337 | 35S | ME05214-02 | YES | J13 | [NULL] | 6.30 | WHOLE PLANT-Size-Small |
| 15170337 | 35S | ME05214-03 | YES | I14 | [NULL] | 6.30 | ROSETTE LEAVES-Petiole Length-Short Petioles |
| 15170337 | 35S | ME05214-03 | YES | I20 | [NULL] | 6.30 | ROSETTE LEAVES-Shape-Oval |
| 15170337 | 35S | ME05214-03 | YES | J13 | [NULL] | 6.30 | WHOLE PLANT-Size-Small |
| 15170337 | 35S | ME05214-04 | YES | I14 | [NULL] | 6.30 | ROSETTE LEAVES-Petiole Length-Short Petioles |
| 15170337 | 35S | ME05214-04 | YES | I20 | [NULL] | 6.30 | ROSETTE LEAVES-Shape-Oval |
| 15170337 | 35S | ME05214-04 | YES | J13 | [NULL] | 6.30 | WHOLE PLANT-Size-Small |
| 15170337 | 35S | ME05214-05 | YES | I14 | [NULL] | 6.30 | ROSETTE LEAVES-Petiole Length-Short Petioles |
| 15170337 | 35S | ME05214-05 | YES | I20 | [NULL] | 6.30 | ROSETTE LEAVES-Shape-Oval |
| 15170337 | 35S | ME05214-05 | YES | J13 | [NULL] | 6.30 | WHOLE PLANT-Size-Small |
| 15170337 | 35S | ME05214-06 | YES | I14 | [NULL] | 6.30 | ROSETTE LEAVES-Petiole Length-Short Petioles |
| 15170337 | 35S | ME05214-06 | YES | I20 | [NULL] | 6.30 | ROSETTE LEAVES-Shape-Oval |
| 15170337 | 35S | ME05214-06 | YES | J13 | [NULL] | 6.30 | WHOLE PLANT-Size-Small |
| 15170337 | 35S | ME05214-07 | YES | I14 | [NULL] | 6.30 | ROSETTE LEAVES-Petiole Length-Short Petioles |
| 15170337 | 35S | ME05214-07 | YES | I20 | [NULL] | 6.30 | ROSETTE LEAVES-Shape-Oval |
| 15170337 | 35S | ME05214-07 | YES | J13 | [NULL] | 6.30 | WHOLE PLANT-Size-Small |
| 15170337 | 35S | ME05214-08 | YES | I14 | [NULL] | 6.30 | ROSETTE LEAVES-Petiole Length-Short Petioles |
| 15170337 | 35S | ME05214-08 | YES | I20 | [NULL] | 6.30 | ROSETTE LEAVES-Shape-Oval |
| 15170337 | 35S | ME05214-08 | YES | J13 | [NULL] | 6.30 | WHOLE PLANT-Size-Small |
| 15170337 | 35S | ME05214-09 | YES | I14 | [NULL] | 6.30 | ROSETTE LEAVES-Petiole Length-Short Petioles |
| 15170337 | 35S | ME05214-09 | YES | I20 | [NULL] | 6.30 | ROSETTE LEAVES-Shape-Oval |
| 15170337 | 35S | ME05214-09 | YES | J13 | [NULL] | 6.30 | WHOLE PLANT-Size-Small |
| 15170337 | 35S | ME05214-10 | YES | I14 | [NULL] | 6.30 | ROSETTE LEAVES-Petiole Length-Short Petioles |
| 15170337 | 35S | ME05214-10 | YES | I20 | [NULL] | 6.30 | ROSETTE LEAVES-Shape-Oval |
| 15170337 | 35S | ME05214-10 | YES | J13 | [NULL] | 6.30 | WHOLE PLANT-Size-Small |

The application's sequence listing, which the Patent Office published only in electronic form, follows.

SEQUENCE LISTING (41939 sequences)

SEQ ID NO: 1 - DNA, 460 bp, Brassica napus
  misc_feature (1)..(460): Ceres Seq. ID no. 12556855
  misc_feature (266)..(266): n is a, c, t, g, unknown, or other
accgacaaaactccaaggtgccatataatctcaagtcaaatccagtctcgattccagttttgtttccactgcagtcccagctcaaatctcgaatctttgtaagaagcccagatctactcgtatggcgaagcacacggcggcgttgaaagccggactgactttgctggcgctgagcatgatcggttacatactcggtcctcctctctactggcacctcaccgaggcactggtcgcttccgcctcttcttgctctccttgcgtctgcnactgctcttccctgcctctcctcaccatccccaaaggactcagcaatggatcttttggagattgtgcaaagcatgacccagaggtgaacgaagacacagagaagaactatgctgagctcttaacagaggaactgaagcaacgcgaagcagcatcgatggagaaacacaaacgagtagacactggtctgctcgag

SEQ ID NO: 2 - protein, 113 aa, Brassica napus
  peptide (1)..(113): Ceres Seq. ID no. 12556856
  misc_feature (1)..(112): NCBI GI NO: 18403016 NR Description: expressed protein; protein id: At2g32580
  misc_feature (1)..(112): NCBI GI NO: 21553781 NR Description: unknown [Arabidopsis thaliana]
  misc_feature (1)..(112): NCBI GI NO: 7487433 NR Description: hypothetical protein At2g32580
  misc_feature (1)..(112): NCBI GI NO: 18390477 NR Description: expressed protein; protein id: At1g05070
  misc_feature (1)..(112): NCBI GI NO: 25364108 NR Description: hypothetical protein
  misc_feature (8)..(112): NCBI GI NO: 27922919 NR Description: unknown protein [Phytophthora sojae]
  misc_feature (6)..(112): NCBI GI NO: 34897026 NR Description: unknown protein
  misc_feature (12)..(112): NCBI GI NO: 18417716 NR Description: Expressed protein; protein id: At4g30996
  misc_feature (1)..(112): NCBI GI NO: 25407700 NR Description: hypothetical protein AT4g30990
  misc_feature (14)..(112): NCBI GI NO: 18400504 NR Description: expressed protein; protein id: At2g24290
  misc_feature (49)..(49): Xaa is any aa, unknown or other
MAKHTAALKAGLTLLALSMIGYILGPPLYWHLTEALVASASSCSPCVCXCSSLPLLTIPKGLSNGSFGDCAKHDPEVNEDTEKNYAELLTEELKQREAASMEKHKRVDTGLLE

SEQ ID NO: 3 - protein, 95 aa, Brassica napus
  peptide (1)..(95): Ceres Seq. ID no. 12556857
  misc_feature (1)..(94): NCBI GI NO: 18403016 NR Description: expressed protein; protein id: At2g32580
  misc_feature (1)..(94): NCBI GI NO: 21553781 NR Description: unknown [Arabidopsis thaliana]
  misc_feature (1)..(94): NCBI GI NO: 7487433 NR Description: hypothetical protein At2g32580
  misc_feature (1)..(94): NCBI GI NO: 18390477 NR Description: expressed protein; protein id: At1g05070
  misc_feature (1)..(94): NCBI GI NO: 25364108 NR Description: hypothetical protein
  misc_feature (1)..(94): NCBI GI NO: 27922919 NR Description: unknown protein [Phytophthora sojae]
  misc_feature (1)..(94): NCBI GI NO: 34897026 NR Description: unknown protein
  misc_feature (1)..(94): NCBI GI NO: 18417716 NR Description: Expressed protein; protein id: At4g30996
  misc_feature (1)..(94): NCBI GI NO: 25407700 NR Description: hypothetical protein AT4g30990
  misc_feature (1)..(94): NCBI GI NO: 18400504 NR Description: expressed protein; protein id: At2g24290
  misc_feature (31)..(31): Xaa is any aa, unknown or other
MIGYILGPPLYWHLTEALVASASSCSPCVCXCSSLPLLTIPKGLSNGSFGDCAKHDPEVNEDTEKNYAELLTEELKQREAASMEKHKRVDTGLLE

SEQ ID NO: 4 - DNA, 734 bp, Brassica napus
  misc_feature (1)..(734): Ceres Seq. ID no. 12557512
  misc_feature (484)..(484): n is a, c, t, g, unknown, or other
atacacaaaaaaatcatctcacagactcactcttcaagtctctccctctctccgatcatcaatggcggcgactatggcgacatcaaccagatgcatgtccctgaacccatctcctcctaaacccctaaaccaaaccaaacccatctcctcctcaaaacacttcatcaccctcccaactccaccaaaacccaccgtctctctcgccgtcacaagcaccgccctagccggagccgtcttctccgccctcagctactccgaacccgctctcgccgctcaccagatctcccagctcgccgccgccgccgtgtcggaaggcagcgacaaccgcggcctagctcttctcctcccgatcgtcccggccatcgggtgggtcctcttcaacatcctccagccagctctcaaccagatcaacaagatgcgcgcaagcaaaggagtcgtcgtgggtctcggcggcatcggtgatggtctcgccgcgtcagggctnttgacgccgccgccggaggcagtagctgcggcggaggcggcggagagagctggagataacaggggacagttgttgttgttcgtggttgcaccggcgctgctttgggttctttacaatatattgcagccggctttgaaccaactcaacaaaatgaggtctcagtgaaaactctttacaatatataaatattaatcatcgttcgtcctttgtttaagttttggacaattatccattgttatatatttcgctc

SEQ ID NO: 5 - protein, 215 aa, Brassica napus
  peptide (1)..(215): Ceres Seq. ID no. 12557513
  misc_feature (107)..(140): Pfam Name: PsbY Pfam Description: Photosystem II protein Y
  misc_feature (21)..(214): NCBI GI NO: 15220530 NR Description: F12A21
  misc_feature (25)..(214): NCBI GI NO: 21593330 NR Description: unknown [Arabidopsis thaliana]
  misc_feature (17)..(215): NCBI GI NO: 6093830 NR Description: Photosystem II core complex proteins psbY
  misc_feature (153)..(215): NCBI GI NO: 6093830 NR Description: Photosystem II core complex proteins psbY
  misc_feature (161)..(161): Xaa is any aa, unknown or other
YTKKSSHRLTLQVSPSLRSSMAATMATSTRCMSLNPSPPKPLNQTKPISSSKHFITLPTPPKPTVSLAVTSTALAGAVFSALSYSEPALAAHQISQLAAAAVSEGSDNRGLALLLPIVPAIGWVLFNILQPALNQINKMRASKGVVVGLGGIGDGLAASGXLTPPPEAVAAAEAAERAGDNRGQLLLFVVAPALLWVLYNILQPALNQLNKMRSQ

SEQ ID NO: 6 - protein, 195 aa, Brassica napus
  peptide (1)..(195): Ceres Seq. ID no. 12557514
  misc_feature (87)..(120): Pfam Name: PsbY Pfam Description: Photosystem II protein Y
  misc_feature (1)..(194): NCBI GI NO: 15220530 NR Description: F12A21
  misc_feature (5)..(194): NCBI GI NO: 21593330 NR Description: unknown [Arabidopsis thaliana]
  misc_feature (1)..(195): NCBI GI NO: 6093830 NR Description: Photosystem II core complex proteins psbY
  misc_feature (133)..(195): NCBI GI NO: 6093830 NR Description: Photosystem II core complex proteins psbY
  misc_feature (141)..(141): Xaa is any aa, unknown or other
MAATMATSTRCMSLNPSPPKPLNQTKPISSSKHFITLPTPPKPTVSLAVTSTALAGAVFSALSYSEPALAAHQISQLAAAAVSEGSDNRGLALLLPIVPAIGWVLFNILQPALNQINKMRASKGVVVGLGGIGDGLAASGXLTPPPEAVAAAEAAERAGDNRGQLLLFVVAPALLWVLYNILQPALNQLNKMRSQ

SEQ ID NO: 7 - protein, 191 aa, Brassica napus
  peptide (1)..(191): Ceres Seq. ID no. 12557515
  misc_feature (83)..(116): Pfam Name: PsbY Pfam Description: Photosystem II protein Y
  misc_feature (1)..(190): NCBI GI NO: 15220530 NR Description: F12A21
  misc_feature (1)..(190): NCBI GI NO: 21593330 NR Description: unknown [Arabidopsis thaliana]
  misc_feature (1)..(191): NCBI GI NO: 6093830 NR Description: Photosystem II core complex proteins psbY
  misc_feature (129)..(191): NCBI GI NO: 6093830 NR Description: Photosystem II core complex proteins psbY
  misc_feature (137)..(137): Xaa is any aa, unknown or other
MATSTRCMSLNPSPPKPLNQTKPISSSKHFITLPTPPKPTVSLAVTSTALAGAVFSALSYSEPALAAHQISQLAAAAVSEGSDNRGLALLLPIVPAIGWVLFNILQPALNQINKMRASKGVVVGLGGIGDGLAASGXLTPPPEAVAAAEAAERAGDNRGQLLLFVVAPALLWVLYNILQPALNQLNKMRSQ

SEQ ID NO: 8 - DNA, 767 bp, Brassica napus
  misc_feature (1)..(767): Ceres Seq. ID no. 12557607
  misc_feature (700)..(700): n is a, c, t, g, unknown, or other
atcatcatcatccactttcatctgtaatactaatatctaaatctcttccttcttcaccacccaaccaatcaagacctgactactcttgaagtttctgaaacaacagggcattttaatggcggccatgaactcgagtgttctcacctgcagctacgctatctctggtgctggctcagcagaactgaaccagaaagtgggtttggtcaattcatcagttggttttggtcaaaagaaacaaacgcttccagtgatcaaagcagctcaaagagttggtggtgatgatgttaatgaaagaagatccgcaatggtgttcttagctgctacactcttctcctctgctgctgtatctgcttccgctaatgctagcgtcttcgatgaatacctcgagaagagcaaagccaacaaagagctgaatgataagaagagattggcaacaagtggagcaaactttgcgagagcgtttactgtccagttcggaagctgcaagttccctgagaatttcactggctgccaagatcttgccaagcaaaagaaagttccatttatctcagaagatttggcgttggaatgtgaaggcaaagacaagttcaagtgtggttccaatgttttctggaaatggtgatcatcttttgtttctgttttaatccattcttgtataaactcaacaatgtatcaatccatctctctgttcatcaaagtntcatatccatttgaatttaaaagaaaccgaagaaactctgagtgtgtaatgaaacattattattcct

SEQ ID NO: 9 - protein, 168 aa, Brassica napus
  peptide (1)..(168): Ceres Seq. ID no. 12557608
  misc_feature (34)..(168): Pfam Name: PSAN or PSI-N Pfam Description: Photosystem I reaction centre subunit N
  misc_feature (1)..(168): NCBI GI NO: 15237593 NR Description: photosystem I reaction center subunit PSI-N precursor
  misc_feature (1)..(168): NCBI GI NO: 28629385 NR Description: photosystem I-N subunit [Phaseolus vulgaris]
  misc_feature (48)..(168): NCBI GI NO: 400879 NR Description: Photosystem I reaction centre subunit N
  misc_feature (78)..(168): NCBI GI NO: 3914466 NR Description: Photosystem I reaction centre subunit N
  misc_feature (71)..(162): NCBI GI NO: 11134150 NR Description: Photosystem I reaction centre subunit N
  misc_feature (60)..(162): NCBI GI NO: 12744797 NR Description: PsaN precursor [Chlamydomonas reinhardtii]
  misc_feature (85)..(133): NCBI GI NO: 485082 NR Description: photosystem I 9K protein - rice
MAAMNSSVLTCSYAISGAGSAELNQKVGLVNSSVGFGQKKQTLPVIKAAQRVGGDDVNERRSAMVFLAATLFSSAAVSASANASVFDEYLEKSKANKELNDKKRLATSGANFARAFTVQFGSCKFPENFTGCQDLAKQKKVPFISEDLALECEGKDKFKCGSNVFWKW

SEQ ID NO: 10 - protein, 165 aa, Brassica napus
  peptide (1)..(165): Ceres Seq. ID no. 12557609
  misc_feature (31)..(165): Pfam Name: PSAN or PSI-N Pfam Description: Photosystem I reaction centre subunit N
  misc_feature (1)..(165): NCBI GI NO: 15237593 NR Description: photosystem I reaction center subunit PSI-N precursor
  misc_feature (1)..(165): NCBI GI NO: 28629385 NR Description: photosystem I-N subunit [Phaseolus vulgaris]
  misc_feature (45)..(165): NCBI GI NO: 400879 NR Description: Photosystem I reaction centre subunit N
  misc_feature (75)..(165): NCBI GI NO: 3914466 NR Description: Photosystem I reaction centre subunit N
  misc_feature (68)..(159): NCBI GI NO: 11134150 NR Description: Photosystem I reaction centre subunit N
  misc_feature (57)..(159): NCBI GI NO: 12744797 NR Description: PsaN precursor [Chlamydomonas reinhardtii]
  misc_feature (82)..(130): NCBI GI NO: 485082 NR Description: photosystem I 9K protein - rice
MNSSVLTCSYAISGAGSAELNQKVGLVNSSVGFGQKKQTLPVIKAAQRVGGDDVNERRSAMVFLAATLFSSAAVSASANASVFDEYLEKSKANKELNDKKRLATSGANFARAFTVQFGSCKFPENFTGCQDLAKQKKVPFISEDLALECEGKDKFKCGSNVFWKW

SEQ ID NO: 11 - protein, 105 aa, Brassica napus
  peptide (1)..(105): Ceres Seq. ID no. 12557610
  misc_feature (1)..(105): Pfam Name: PSAN or PSI-N Pfam Description: Photosystem I reaction centre subunit N
  misc_feature (1)..(105): NCBI GI NO: 15237593 NR Description: photosystem I reaction center subunit PSI-N precursor
  misc_feature (1)..(105): NCBI GI NO: 28629385 NR Description: photosystem I-N subunit [Phaseolus vulgaris]
  misc_feature (1)..(105): NCBI GI NO: 400879 NR Description: Photosystem I reaction centre subunit N
  misc_feature (15)..(105): NCBI GI NO: 3914466 NR Description: Photosystem I reaction centre subunit N
  misc_feature (8)..(99): NCBI GI NO: 11134150 NR Description: Photosystem I reaction centre subunit N
  misc_feature (1)..(99): NCBI GI NO: 12744797 NR Description: PsaN precursor [Chlamydomonas reinhardtii]
  misc_feature (22)..(70): NCBI GI NO: 485082 NR Description: photosystem I 9K protein - rice
MVFLAATLFSSAAVSASANASVFDEYLEKSKANKELNDKKRLATSGANFARAFTVQFGSCKFPENFTGCQDLAKQKKVPFISEDLALECEGKDKFKCGSNVFWKW

SEQ ID NO: 12 - DNA, 763 bp, Brassica napus
  misc_feature (1)..(763): Ceres Seq. ID no. 12557654
  misc_feature (516)..(516): n is a, c, t, g, unknown, or other
  misc_feature (677)..(677): n is a, c, t, g, unknown, or other
  misc_feature (524)..(524): n is a, c, t, g, unknown, or other
cacttctttcctctctatcaccgaaccaacaaaagaaatctctgaaaattatctcagaatccctaaaattcactttgaaaaaatggcagaaaccgccgaaacaatcaacaccaccgtctcgcatccgcagcctgaatcagaagactccaacacattgtccgcgacggaagatcagacatcggatgaaacctcaaaagccgcagatctgaagaaggaagaatcagtggcggagacgaagccaggatccatctcgctccgcatctggccgccgacgcagaaaactcgcgacgccgtcttgaaccgcctgatcgagacgttatccaccgaatccatcctctccaagagatacggaacgctcaactccgacgaagcctccgccgtcgcgaaatccatcgaggaggaagcgttcggcgtcgcatcgagcgctgtgtccgatgacgacgatgggatcaagatccttgaggtttattccaaggagattagcaaaaggatgcttgagactgtgaaagatcgatntgcagccnccgccggaaacgggaacgacgaagcgacggacgctacgaaagacgacccggctcctgaggcggaaaagagtgaggcttgaggtctggcttactctgtctgattccgttatctattagcgttcgctttgattttgccagattcatatgaggttntgagaaatttatgacgacatctgttattgtaatgacttggttgtggattttggtatttgcttgtctgaagatggttccttcttcct

SEQ ID NO: 13 - protein, 200 aa, Brassica napus
  peptide (1)..(200): Ceres Seq. ID no. 12557655
  misc_feature (28)..(200): NCBI GI NO: 18401618 NR Description: expressed protein; protein id: At1g47200
  misc_feature (28)..(200): NCBI GI NO: 21553809 NR Description: unknown [Arabidopsis thaliana]
  misc_feature (28)..(189): NCBI GI NO: 15239170 NR Description: putative protein; protein id: At5g43070
  misc_feature (28)..(189): NCBI GI NO: 21618109 NR Description: MFP1 attachment factor 1 [Arabidopsis thaliana]
  misc_feature (70)..(200): NCBI GI NO: 7546725 NR Description: MFP1 attachment factor 1 [Lycopersicon esculentum]
  misc_feature (28)..(182): NCBI GI NO: 18421176 NR Description: Expressed protein; protein id: At5g27940
  misc_feature (28)..(182): NCBI GI NO: 21553983 NR Description: unknown [Arabidopsis thaliana]
  misc_feature (73)..(171): NCBI GI NO: 7546729 NR Description: MFP1 attachment factor 1 [Glycine max]
  misc_feature (66)..(178): NCBI GI NO: 7546731 NR Description: MFP1 attachment factor 1 [Canna edulis]
  misc_feature (57)..(199): NCBI GI NO: 26006500 NR Description: Unknown protein
  misc_feature (172)..(172): Xaa is any aa, unknown or other
  misc_feature (175)..(175): Xaa is any aa, unknown or other
TSFLSITEPTKEISENYLRIPKIHFEKMAETAETINTTVSHPQPESEDSNTLSATEDQTSDETSKAADLKKEESVAETKPGSISLRIWPPTQKTRDAVLNRLIETLSTESILSKRYGTLNSDEASAVAKSIEEEAFGVASSAVSDDDDGIKILEVYSKEISKRMLETVKDRXAAXAGNGNDEATDATKDDPAPEAEKSEA

SEQ ID NO: 14 - protein, 173 aa, Brassica napus
  peptide (1)..(173): Ceres Seq. ID no. 12557656
  misc_feature (1)..(173): NCBI GI NO: 18401618 NR Description: expressed protein; protein id: At1g47200
  misc_feature (1)..(173): NCBI GI NO: 21553809 NR Description: unknown [Arabidopsis thaliana]
  misc_feature (1)..(162): NCBI GI NO: 15239170 NR Description: putative protein; protein id: At5g43070
  misc_feature (1)..(162): NCBI GI NO: 21618109 NR Description: MFP1 attachment factor 1 [Arabidopsis thaliana]
  misc_feature (43)..(173): NCBI GI NO: 7546725 NR Description: MFP1 attachment factor 1 [Lycopersicon esculentum]
  misc_feature (1)..(155): NCBI GI NO: 18421176 NR Description: Expressed protein; protein id: At5g27940
  misc_feature (1)..(155): NCBI GI NO: 21553983 NR Description: unknown [Arabidopsis thaliana]
  misc_feature (46)..(144): NCBI GI NO: 7546729 NR Description: MFP1 attachment factor 1 [Glycine max]
  misc_feature (39)..(151): NCBI GI NO: 7546731 NR Description: MFP1 attachment factor 1 [Canna edulis]
  misc_feature (30)..(172): NCBI GI NO: 26006500 NR Description: Unknown protein
  misc_feature (145)..(145): Xaa is any aa, unknown or other
  misc_feature (148)..(148): Xaa is any aa, unknown or other
MAETAETINTTVSHPQPESEDSNTLSATEDQTSDETSKAADLKKEESVAETKPGSISLRIWPPTQKTRDAVLNRLIETLSTESILSKRYGTLNSDEASAVAKSIEEEAFGVASSAVSDDDDGIKILEVYSKEISKRMLETVKDRXAAXAGNGNDEATDATKDDPAPEAEKSEA

SEQ ID NO: 15 - DNA, 660 bp, Brassica napus
  misc_feature (1)..(660): Ceres Seq. ID no. 12557420
  misc_feature (639)..(639): n is a, c, t, g, unknown, or other
atctttttcttcagccgccgcttgtgtttctcctctctacgatcatggtggggtttaagaacaggttcatgttgatggaggtttatctcgacccagacaaggatctcttaggagaagggactcctgttatcctcacgaaactcaacctctccgaagcgatcaaagacagcatcctcgtcaatttcggcgagtgcggtctcgcctcttgtctcggatccttccacgtcgcgtatgtgaacccggtcacgaagctatgcattgtaagatcgtcgagagaggaacacagacgagtttggtcggcgatgacgctggtcagaagcgtcgggaactgtcccgtggtgtttaacttgctcgataacagcggttgcatcagagcgtgtcgagacgcggccttgaagtgcgagacggagaagtttaatcagtgtggaaaaggattgtctgaagaggagatccgagagatgaataggtgtttagataaactcaaactgttgtaataactcgattttttcgaatttgacccctaagttttcaaaatgtgcaatcctccccttgtcttatatactgttgcgatttgatctggatatttatggcttttttcgtgagactcggaaactcaaggggcacaagtgcaaagtcgtnttaattaataaactcaaaatt

SEQ ID NO: 16 - protein, 163 aa, Brassica napus
  peptide (1)..(163): Ceres Seq. ID no. 12557421
  misc_feature (21)..(111): Pfam Name: Pfam Description:  Rpp14 family
  misc_feature (15)..(163): NCBI GI NO: 22329330 NR Description: similar to Probable lipoate-protein ligase B
  misc_feature (15)..(111): NCBI GI NO: 3122357 NR Description: Probable lipoate-protein ligase
  misc_feature (15)..(161): NCBI GI NO: 38343977 NR Description: OSJNBa0041M21.1
  misc_feature (20)..(161): NCBI GI NO: 38568007 NR Description: OSJNBb0068N06.26
  misc_feature (15)..(132): NCBI GI NO: 19075979 NR Description: putative pre-tRNA/pre-rRNA processing protein
  misc_feature (15)..(127): NCBI GI NO: 20270249 NR Description: RNase MRP/RNase P protein-like [Homo sapiens]
LFLQPPLVFLLSTIMVGFKNRFMLMEVYLDPDKDLLGEGTPVILTKLNLSEAIKDSILVNFGECGLASCLGSFHVAYVNPVTKLCIVRSSREEHRRVWSAMTLVRSVGNCPVVFNLLDNSGCIRACRDAALKCETEKFNQCGKGLSEEEIREMNRCLDKLKLL

SEQ ID NO: 17 - protein, 149 aa, Brassica napus
  peptide (1)..(149): Ceres Seq. ID no. 12557422
  misc_feature (7)..(97): Pfam Name: Pfam Description:  Rpp14 family
  misc_feature (1)..(149): NCBI GI NO: 22329330 NR Description: similar to Probable lipoate-protein ligase B
  misc_feature (1)..(97): NCBI GI NO: 3122357 NR Description: Probable lipoate-protein ligase
  misc_feature (1)..(147): NCBI GI NO: 38343977 NR Description: OSJNBa0041M21.1
  misc_feature (6)..(147): NCBI GI NO: 38568007 NR Description: OSJNBb0068N06.26
  misc_feature (1)..(118): NCBI GI NO: 19075979 NR Description: putative pre-tRNA/pre-rRNA processing protein
  misc_feature (1)..(113): NCBI GI NO: 20270249 NR Description: RNase MRP/RNase P protein-like [Homo sapiens]
MVGFKNRFMLMEVYLDPDKDLLGEGTPVILTKLNLSEAIKDSILVNFGECGLASCLGSFHVAYVNPVTKLCIVRSSREEHRRVWSAMTLVRSVGNCPVVFNLLDNSGCIRACRDAALKCETEKFNQCGKGLSEEEIREMNRCLDKLKLL

SEQ ID NO: 18 - protein, 141 aa, Brassica napus
  peptide (1)..(141): Ceres Seq. ID no. 12557423
  misc_feature (1)..(89): Pfam Name: Pfam Description:  Rpp14 family
  misc_feature (1)..(141): NCBI GI NO: 22329330 NR Description: similar to Probable lipoate-protein ligase B
  misc_feature (1)..(89): NCBI GI NO: 3122357 NR Description: Probable lipoate-protein ligase
  misc_feature (1)..(139): NCBI GI NO: 38343977 NR Description: OSJNBa0041M21.1
  misc_feature (1)..(139): NCBI GI NO: 38568007 NR Description: OSJNBb0068N06.26
  misc_feature (1)..(110): NCBI GI NO: 19075979 NR Description: putative pre-tRNA/pre-rRNA processing protein
  misc_feature (1)..(105): NCBI GI NO: 20270249 NR Description: RNase MRP/RNase P protein-like [Homo sapiens]
MLMEVYLDPDKDLLGEGTPVILTKLNLSEAIKDSILVNFGECGLASCLGSFHVAYVNPVTKLCIVRSSREEHRRVWSAMTLVRSVGNCPVVFNLLDNSGCIRACRDAALKCETEKFNQCGKGLSEEEIREMNRCLDKLKLL

SEQ ID NO: 19 - DNA, 887 bp, Brassica napus
  misc_feature (1)..(887): Ceres Seq. ID no. 13574681
  misc_feature (728)..(728): n is a, c, t, g, unknown, or other
  misc_feature (740)..(740): n is a, c, t, g, unknown, or other
  misc_feature (761)..(761): n is a, c, t, g, unknown, or other
  misc_feature (795)..(795): n is a, c, t, g, unknown, or other
  misc_feature (134)..(134): n is a, c, t, g, unknown, or other
  misc_feature (415)..(415): n is a, c, t, g, unknown, or other
  misc_feature (133)..(133): n is a, c, t, g, unknown, or other
gatttcaatctgcgaatttctctttaaaccctacaaacccttttcccgatcaaacaatgacgctccacgccgcagtgatccagaagcttctcaacaccggctcccatctcggccgccgcgccgccgagcaccnnttcaaacagtacgcctacggaacccgcaacgggatgaccatcatcgactccgacaaaaccctgatctgcctccgcagcgccgccagcttcgtcgccaacctcgcgcacatgagggggaacatctacttcgtcaacacgaaccctctcttcgacgagatcgtcgagctcacttcccgccgcatccagggcgacgcgtacaaccacaaccgctcgatgaatctgtggaatatgggaggttttttgacgaacagttacagtcctaagaagtttcggtcgaggcncaagaagctttgctttggtccgacgacgatgcctgattgtgtcgttgtgtttgataccgagaggaagagctcggtgatactcgaggccgcgaagcttcagattcctgttgtggcgattgtggatccgaatgtgccgttggagttctttgagaagattacttatcctgtgccggcacgtgactcggttaagtttgtttatttgttttgtaatgtgatcactaagtgctttgtggctgagcagatgaagatggggatcaaagatgggggcaaggatgatgtgatgaaggatttagctgcatgatttggatattcncagcacacgttnttagtctcgaatcattgtttnttcagcattgtggtttttctctactttgaaattntgagtcttctttattacatttgggtgattttgttcatgtgattgttataaagcaacagcttttttcaaaggtagatacatcagagccaattt

SEQ ID NO: 20 - protein, 237 aa, Brassica napus
  peptide (1)..(237): Ceres Seq. ID no. 13574682
  misc_feature (29)..(218): Pfam Name: Pfam Description:  Ribosomal protein S2
  misc_feature (19)..(237): NCBI GI NO: 15228593 NR Description: ribosomal protein S2p family
  misc_feature (19)..(237): NCBI GI NO: 21536611 NR Description: putative ribosomal protein S2
  misc_feature (19)..(218): NCBI GI NO: 7440113 NR Description: ribosomal protein S2 homolog - wheat mitochondrion
  misc_feature (23)..(225): NCBI GI NO: 9944891 NR Description: ribosomal protein S2 [Zea mays]
  misc_feature (19)..(212): NCBI GI NO: 9944889 NR Description: ribosomal protein S2 [Zea mays]
  misc_feature (23)..(225): NCBI GI NO: 40795007 NR Description: ribosomal protein S2 [Zea mays]
  misc_feature (25)..(145): NCBI GI NO: 11467163 NR Description: rps2 [Marchantia polymorpha]
  misc_feature (130)..(215): NCBI GI NO: 11467163 NR Description: rps2 [Marchantia polymorpha]
  misc_feature (19)..(218): NCBI GI NO: 7489611 NR Description: hypothetical protein 483 - rice mitochondrion
  misc_feature (19)..(212): NCBI GI NO: 40795002 NR Description: ribosomal protein S2 [Zea mays]
  misc_feature (44)..(44): Xaa is any aa, unknown or other
  misc_feature (138)..(138): Xaa is any aa, unknown or other
FQSANFSLNPTNPFPDQTMTLHAAVIQKLLNTGSHLGRRAAEHXFKQYAYGTRNGMTIIDSDKTLICLRSAASFVANLAHMRGNIYFVNTNPLFDEIVELTSRRIQGDAYNHNRSMNLWNMGGFLTNSYSPKKFRSRXKKLCFGPTTMPDCVVVFDTERKSSVILEAAKLQIPVVAIVDPNVPLEFFEKITYPVPARDSVKFVYLFCNVITKCFVAEQMKMGIKDGGKDDVMKDLAA

SEQ ID NO: 21 - protein, 219 aa, Brassica napus
  peptide (1)..(219): Ceres Seq. ID no. 13574683
  misc_feature (11)..(200): Pfam Name: Pfam Description:  Ribosomal protein S2
  misc_feature (1)..(219): NCBI GI NO: 15228593 NR Description: ribosomal protein S2p family
  misc_feature (1)..(219): NCBI GI NO: 21536611 NR Description: putative ribosomal protein S2
  misc_feature (1)..(200): NCBI GI NO: 7440113 NR Description: ribosomal protein S2 homolog - wheat mitochondrion
  misc_feature (5)..(207): NCBI GI NO: 9944891 NR Description: ribosomal protein S2 [Zea mays]
  misc_feature (1)..(194): NCBI GI NO: 9944889 NR Description: ribosomal protein S2 [Zea mays]
  misc_feature (5)..(207): NCBI GI NO: 40795007 NR Description: ribosomal protein S2 [Zea mays]
  misc_feature (7)..(127): NCBI GI NO: 11467163 NR Description: rps2 [Marchantia polymorpha]
  misc_feature (112)..(197): NCBI GI NO: 11467163 NR Description: rps2 [Marchantia polymorpha]
  misc_feature (1)..(200): NCBI GI NO: 7489611 NR Description: hypothetical protein 483 - rice mitochondrion
  misc_feature (1)..(194): NCBI GI NO: 40795002 NR Description: ribosomal protein S2 [Zea mays]
  misc_feature (26)..(26): Xaa is any aa, unknown or other
  misc_feature (120)..(120): Xaa is any aa, unknown or other
MTLHAAVIQKLLNTGSHLGRRAAEHXFKQYAYGTRNGMTIIDSDKTLICLRSAASFVANLAHMRGNIYFVNTNPLFDEIVELTSRRIQGDAYNHNRSMNLWNMGGFLTNSYSPKKFRSRXKKLCFGPTTMPDCVVVFDTERKSSVILEAAKLQIPVVAIVDPNVPLEFFEKITYPVPARDSVKFVYLFCNVITKCFVAEQMKMGIKDGGKDDVMKDLAA

SEQ ID NO: 22 - protein, 182 aa, Brassica napus
  peptide (1)..(182): Ceres Seq. ID no. 13574684
  misc_feature (1)..(163): Pfam Name: Pfam Description:  Ribosomal protein S2
  misc_feature (1)..(182): NCBI GI NO: 15228593 NR Description: ribosomal protein S2p family
  misc_feature (1)..(182): NCBI GI NO: 21536611 NR Description: putative ribosomal protein S2
  misc_feature (1)..(163): NCBI GI NO: 7440113 NR Description: ribosomal protein S2 homolog - wheat mitochondrion
  misc_feature (1)..(170): NCBI GI NO: 9944891 NR Description: ribosomal protein S2 [Zea mays]
  misc_feature (1)..(157): NCBI GI NO: 9944889 NR Description: ribosomal protein S2 [Zea mays]
  misc_feature (1)..(170): NCBI GI NO: 40795007 NR Description: ribosomal protein S2 [Zea mays]
  misc_feature (1)..(90): NCBI GI NO: 11467163 NR Description: rps2 [Marchantia polymorpha]
  misc_feature (75)..(160): NCBI GI NO: 11467163 NR Description: rps2 [Marchantia polymorpha]
  misc_feature (1)..(163): NCBI GI NO: 7489611 NR Description: hypothetical protein 483 - rice mitochondrion
  misc_feature (1)..(157): NCBI GI NO: 40795002 NR Description: ribosomal protein S2 [Zea mays]
  misc_feature (83)..(83): Xaa is any aa, unknown or other
MTIIDSDKTLICLRSAASFVANLAHMRGNIYFVNTNPLFDEIVELTSRRIQGDAYNHNRSMNLWNMGGFLTNSYSPKKFRSRXKKLCFGPTTMPDCVVVFDTERKSSVILEAAKLQIPVVAIVDPNVPLEFFEKITYPVPARDSVKFVYLFCNVITKCFVAEQMKMGIKDGGKDDVMKDLAA

SEQ ID NO: 23 - DNA, 420 bp, Brassica napus
  misc_feature (1)..(420): Ceres Seq. ID no. 12556794
acacaaacacaagaccagaaaaaaaaaacagaaagtaaacatgagatctctcttcttactagccttgttcctagttcttgcttttcaccatggtgaagcagccgtgacttgcaacaacgtggttggtgatctttacccttgcctctcctacgtgatgcaaggcggaaactccccatcaactaactgctgcagcggtgtcagaacgctcaacagtcaggctcaaaccactgcggatcgtcagagcgtctgccgttgcatcaaaaatgctattggaggagcctcttactcttcaagcaaccttaaaaatgctctgtctttgcctgctaagtgtggtgttaatctccctttcagtatcagcccttccaccaactgcaacagtatccactgaaataagcagaagatcctaaaggaagctactac

SEQ ID NO: 24 - protein, 128 aa, Brassica napus
  peptide (1)..(128): Ceres Seq. ID no. 12556795
  misc_feature (37)..(124): Pfam Name: Pfam Description:  Protease inhibitor/seed storage/LTP family
  misc_feature (14)..(127): NCBI GI NO: 15231964 NR Description: putative nonspecific lipid-transfer protein
  misc_feature (14)..(127): NCBI GI NO: 15241086 NR Description: lipid-transfer protein-like; protein id: At5g01870
  misc_feature (33)..(127): NCBI GI NO: 2497753 NR Description: NONSPECIFIC LIPID-TRANSFER PROTEIN 3 PRECURSOR
  misc_feature (19)..(128): NCBI GI NO: 2497746 NR Description: NONSPECIFIC LIPID-TRANSFER PROTEIN 2 PRECURSOR
  misc_feature (11)..(127): NCBI GI NO: 6782436 NR Description: lipid-transfer protein [Nicotiana glauca]
  misc_feature (19)..(128): NCBI GI NO: 7438275 NR Description: lipid transfer protein LPT II - rice
  misc_feature (8)..(128): NCBI GI NO: 128388 NR Description: Nonspecific lipid-transfer protein precursor
  misc_feature (24)..(127): NCBI GI NO: 16903206 NR Description: lipid transfer protein precursor
  misc_feature (17)..(128): NCBI GI NO: 7438279 NR Description: phospholipid transfer protein - rice
  misc_feature (21)..(127): NCBI GI NO: 2497756 NR Description: NONSPECIFIC LIPID-TRANSFER PROTEIN 2 PRECURSOR
HKHKTRKKKQKVNMRSLFLLALFLVLAFHHGEAAVTCNNVVGDLYPCLSYVMQGGNSPSTNCCSGVRTLNSQAQTTADRQSVCRCIKNAIGGASYSSSNLKNALSLPAKCGVNLPFSISPSTNCNSIH

SEQ ID NO: 25 - protein, 115 aa, Brassica napus
  peptide (1)..(115): Ceres Seq. ID no. 12556796
  misc_feature (24)..(111): Pfam Name: Pfam Description:  Protease inhibitor/seed storage/LTP family
  misc_feature (1)..(114): NCBI GI NO: 15231964 NR Description: putative nonspecific lipid-transfer protein
  misc_feature (1)..(114): NCBI GI NO: 15241086 NR Description: lipid-transfer protein-like; protein id: At5g01870
  misc_feature (20)..(114): NCBI GI NO: 2497753 NR Description: NONSPECIFIC LIPID-TRANSFER PROTEIN 3 PRECURSOR
  misc_feature (6)..(115): NCBI GI NO: 2497746 NR Description: NONSPECIFIC LIPID-TRANSFER PROTEIN 2 PRECURSOR
  misc_feature (1)..(114): NCBI GI NO: 6782436 NR Description: lipid-transfer protein [Nicotiana glauca]
  misc_feature (6)..(115): NCBI GI NO: 7438275 NR Description: lipid transfer protein LPT II - rice
  misc_feature (1)..(115): NCBI GI NO: 128388 NR Description: Nonspecific lipid-transfer protein precursor
  misc_feature (11)..(114): NCBI GI NO: 16903206 NR Description: lipid transfer protein precursor
  misc_feature (4)..(115): NCBI GI NO: 7438279 NR Description: phospholipid transfer protein - rice
  misc_feature (8)..(114): NCBI GI NO: 2497756 NR Description: NONSPECIFIC LIPID-TRANSFER PROTEIN 2 PRECURSOR
MRSLFLLALFLVLAFHHGEAAVTCNNVVGDLYPCLSYVMQGGNSPSTNCCSGVRTLNSQAQTTADRQSVCRCIKNAIGGASYSSSNLKNALSLPAKCGVNLPFSISPSTNCNSIH

SEQ ID NO: 26 - protein, 77 aa, Brassica napus
  peptide (1)..(77): Ceres Seq. ID no. 12556797
  misc_feature (1)..(73): Pfam Name: Pfam Description:  Protease inhibitor/seed storage/LTP family
  misc_feature (1)..(76): NCBI GI NO: 15231964 NR Description: putative nonspecific lipid-transfer protein
  misc_feature (1)..(76): NCBI GI NO: 15241086 NR Description: lipid-transfer protein-like; protein id: At5g01870
  misc_feature (1)..(76): NCBI GI NO: 2497753 NR Description: NONSPECIFIC LIPID-TRANSFER PROTEIN 3 PRECURSOR
  misc_feature (1)..(77): NCBI GI NO: 2497746 NR Description: NONSPECIFIC LIPID-TRANSFER PROTEIN 2 PRECURSOR
  misc_feature (1)..(76): NCBI GI NO: 6782436 NR Description: lipid-transfer protein [Nicotiana glauca]
  misc_feature (1)..(77): NCBI GI NO: 7438275 NR Description: lipid transfer protein LPT II - rice
  misc_feature (1)..(77): NCBI GI NO: 128388 NR Description: Nonspecific lipid-transfer protein precursor
  misc_feature (1)..(76): NCBI GI NO: 16903206 NR Description: lipid transfer protein precursor
  misc_feature (1)..(77): NCBI GI NO: 7438279 NR Description: phospholipid transfer protein - rice
  misc_feature (1)..(76): NCBI GI NO: 2497756 NR Description: NONSPECIFIC LIPID-TRANSFER PROTEIN 2 PRECURSOR
MQGGNSPSTNCCSGVRTLNSQAQTTADRQSVCRCIKNAIGGASYSSSNLKNALSLPAKCGVNLPFSISPSTNCNSIH

SEQ ID NO: 27 - DNA, 792 bp, Brassica napus
  misc_feature (1)..(792): Ceres Seq. ID no. 12578688
  misc_feature (581)..(581): n is a, c, t, g, unknown, or other
aaatcctctggttatggcgtctccgacttctctaaactcaacccctacagatctcgttcgaagaaagaagagacaatccgcttcctcctccgccgcatcgcctcggagaaacaacgcagcttccgcaaccgccggagacggcgagagccacgcgcgatggagatcggagaagcagcagcgtaactactccgcaaagctggtccaggcgctgcaacaggtccgcctcagctcctccgccgccgaaacaccatctccgacggcgaagaagcgagggaaagccgtccgggaagccgccgaccgcgctctcgccgtctccgctcgcgggaggacgctctggagcagagcgatcctcgctaaccggatcaagctcaaattccggaaacagaaacggccgcgaccggcggcgatcccggccgtgatcacgacgggaagtagcagcagcagcaatagcggaagatggaagaaacggagagtgacggttgtgaaactgaataagaagagtataccgacggttaaccggaaagtacgtgtactcggccggttagttccgggttgcaagaaagaatcagtaccggttattntagaagaagcgaccgattacatccaggctttggagatgcaagtcagagccatgaagtctctagctgagcttctctccggctcaaactcagctcctccgccgatttgatgaggttaaaatcgtcattttaagttctgccaatctctgtgtctctctgtgtacaccaaaacacttttcatattaatatatgtaaacataatacgtttgagtgt

SEQ ID NO: 28 - protein, 228 aa, Brassica napus
  peptide (1)..(228): Ceres Seq. ID no. 12578689
  misc_feature (52)..(219): NCBI GI NO: 18397368 NR Description: bHLH protein; protein id: At3g05800
  misc_feature (39)..(225): NCBI GI NO: 34904544 NR Description: B1066G12.17
  misc_feature (88)..(225): NCBI GI NO: 34912942 NR Description: OSJNBb0035I14.10
  misc_feature (19)..(147): NCBI GI NO: 18397368 NR Description: bHLH protein; protein id: At3g05800
  misc_feature (13)..(228): NCBI GI NO: 18397627 NR Description: bHLH protein; protein id: At3g06590
  misc_feature (13)..(228): NCBI GI NO: 21618012 NR Description: unknown [Arabidopsis thaliana]
  misc_feature (1)..(227): NCBI GI NO: 18401374 NR Description: bHLH protein; protein id: At3g17100
  misc_feature (26)..(138): NCBI GI NO: 34898122 NR Description: bHLH protein-like
  misc_feature (166)..(227): NCBI GI NO: 34898122 NR Description: bHLH protein-like
  misc_feature (28)..(221): NCBI GI NO: 18390998 NR Description: bHLH protein; protein id: At1g09250
  misc_feature (194)..(194): Xaa is any aa, unknown or other
NPLVMASPTSLNSTPTDLVRRKKRQSASSSAASPRRNNAASATAGDGESHARWRSEKQQRNYSAKLVQALQQVRLSSSAAETPSPTAKKRGKAVREAADRALAVSARGRTLWSRAILANRIKLKFRKQKRPRPAAIPAVITTGSSSSSNSGRWKKRRVTVVKLNKKSIPTVNRKVRVLGRLVPGCKKESVPVIXEEATDYIQALEMQVRAMKSLAELLSGSNSAPPPI

SEQ ID NO: 29 - protein, 224 aa, Brassica napus
  peptide (1)..(224): Ceres Seq. ID no. 12578690
  misc_feature (9)..(224): NCBI GI NO: 18397627 NR Description: bHLH protein; protein id: At3g06590
  misc_feature (9)..(224): NCBI GI NO: 21618012 NR Description: unknown [Arabidopsis thaliana]
  misc_feature (1)..(223): NCBI GI NO: 18401374 NR Description: bHLH protein; protein id: At3g17100
  misc_feature (22)..(134): NCBI GI NO: 34898122 NR Description: bHLH protein-like
  misc_feature (162)..(223): NCBI GI NO: 34898122 NR Description: bHLH protein-like
  misc_feature (24)..(217): NCBI GI NO: 18390998 NR Description: bHLH protein; protein id: At1g09250
  misc_feature (48)..(215): NCBI GI NO: 18397368 NR Description: bHLH protein; protein id: At3g05800
  misc_feature (35)..(221): NCBI GI NO: 34904544 NR Description: B1066G12.17
  misc_feature (84)..(221): NCBI GI NO: 34912942 NR Description: OSJNBb0035I14.10
  misc_feature (15)..(143): NCBI GI NO: 18397368 NR Description: bHLH protein; protein id: At3g05800
  misc_feature (190)..(190): Xaa is any aa, unknown or other
MASPTSLNSTPTDLVRRKKRQSASSSAASPRRNNAASATAGDGESHARWRSEKQQRNYSAKLVQALQQVRLSSSAAETPSPTAKKRGKAVREAADRALAVSARGRTLWSRAILANRIKLKFRKQKRPRPAAIPAVITTGSSSSSNSGRWKKRRVTVVKLNKKSIPTVNRKVRVLGRLVPGCKKESVPVIXEEATDYIQALEMQVRAMKSLAELLSGSNSAPPPI

SEQ ID NO: 30 - DNA, 809 bp, Brassica napus
  misc_feature (1)..(809): Ceres Seq. ID no. 12556893
  misc_feature (538)..(538): n is a, c, t, g, unknown, or other
  misc_feature (779)..(779): n is a, c, t, g, unknown, or other
  misc_feature (655)..(655): n is a, c, t, g, unknown, or other
  misc_feature (609)..(609): n is a, c, t, g, unknown, or other
  misc_feature (520)..(520): n is a, c, t, g, unknown, or other
acacttcggtatatccgccttcttcttcttcaacaacaattctctctcagagcctatactaaatctcccggagctctacttctccggccgaaactatgtctcagtctatccaattctcaactccttcacgcactcctcaccttctccacctccctaactcacgcttccaccgtcctctcacttccttatccttccgccaattccctctcaagtacacctcaatcagagcctcctcctctccagatctcggctcctcctcatcctcccaggtccttcactctcctaacggcactggcgctgccaaaccggaagagcgatccgtcgtagccaccgcggtctccacggatacggcagcgatagacgtagataccgtgacggaagcggagctgaaggagaatggattcaggagcacgaggaggacgaagctgatctgcacgatcgggcctgccacgtgcgggttcgagcaactggaagcgctcgcggagggaggcatgaacgtggcgaggctcaacatgtgccncggcacgcgcgagtggcnccgcgatgtgatacgcagcgttagaaagcttaacgaggagaaaggattcgcggttgctatcatgatggacnctgaaggcagtgagattcacatgggagatcttggcggtgaatcttntgctaaatctgaggttttgtcttctcttttctccatctcaatcagagcttgagcttgacattattgctctgtataattagatgattggtaggcctgagcattgtaactgaatcggtcagtgttntaataattggtatagcctgcgcttactcgg

SEQ ID NO: 31 - protein, 203 aa, Brassica napus
  peptide (1)..(203): Ceres Seq. ID no. 12556894
  misc_feature (1)..(203): NCBI GI NO: 18403597 NR Description: pyruvate kinase, putative; protein id: At3g22960
  misc_feature (1)..(203): NCBI GI NO: 21537361 NR Description: pyruvate kinase, putative [Arabidopsis thaliana]
  misc_feature (1)..(203): NCBI GI NO: 2497539 NR Description: Pyruvate kinase isozyme A, chloroplast precursor
  misc_feature (1)..(203): NCBI GI NO: 2497541 NR Description: Pyruvate kinase isozyme A, chloroplast precursor
  misc_feature (1)..(203): NCBI GI NO: 2129963 NR Description: pyruvate kinase (EC 2
  misc_feature (46)..(191): NCBI GI NO: 29788835 NR Description: putative pyruvate kinase
  misc_feature (131)..(203): NCBI GI NO: 7434450 NR Description: pyruvate kinase (EC 2
  misc_feature (133)..(203): NCBI GI NO: 34393488 NR Description: putative Pyruvate kinase isozyme A
  misc_feature (107)..(182): NCBI GI NO: 24217414 NR Description: pyruvate kinase
  misc_feature (108)..(182): NCBI GI NO: 29840433 NR Description: pyruvate kinase [Chlamydophila caviae GPIC]
  misc_feature (142)..(142): Xaa is any aa, unknown or other
  misc_feature (148)..(148): Xaa is any aa, unknown or other
  misc_feature (172)..(172): Xaa is any aa, unknown or other
  misc_feature (187)..(187): Xaa is any aa, unknown or other
MSQSIQFSTPSRTPHLLHLPNSRFHRPLTSLSFRQFPLKYTSIRASSSPDLGSSSSSQVLHSPNGTGAAKPEERSVVATAVSTDTAAIDVDTVTEAELKENGFRSTRRTKLICTIGPATCGFEQLEALAEGGMNVARLNMCXGTREWXRDVIRSVRKLNEEKGFAVAIMMDXEGSEIHMGDLGGESXAKSEVLSSLFSISIRA

SEQ ID NO: 32 - protein, 108 aa, Brassica napus
  peptide (1)..(108): Ceres Seq. ID no. 12556895
TLRYIRLLLLQQQFSLRAYTKSPGALLLRPKLCLSLSNSQLLHALLTFSTSLTHASTVLSLPYPSANSLSSTPQSEPPPLQISAPPHPPRSFTLLTALALPNRKSDPS

SEQ ID NO: 33 - DNA, 935 bp, Brassica napus
  misc_feature (1)..(935): Ceres Seq. ID no. 13574766
  misc_feature (817)..(817): n is a, c, t, g, unknown, or other
  misc_feature (69)..(69): n is a, c, t, g, unknown, or other
  misc_feature (766)..(766): n is a, c, t, g, unknown, or other
  misc_feature (745)..(745): n is a, c, t, g, unknown, or other
  misc_feature (644)..(644): n is a, c, t, g, unknown, or other
  misc_feature (542)..(542): n is a, c, t, g, unknown, or other
  misc_feature (483)..(483): n is a, c, t, g, unknown, or other
  misc_feature (550)..(550): n is a, c, t, g, unknown, or other
atagatttgatttcttctacaaacatcgatcgaaagagagacgatcctttaagatggcgaccgtagacnagagttcttcagctaagagatggcttccacttgaagctaacccagatgttatgaatcagtttctgtgggggcttggacttgccccagatgcagctgagtgtaatgatgtgtttggtttagatgacgagcttcttgagatggttccaaagcctgtccttgctgttctcttcctttaccctatcaccaaaaagagtgaagaagagagaattgagcaagacaaggagatcaaggagaaggtgcatattgataaagtttactttatgaaacaaactgttggtaatgcttgtggaaccattggtcttcttcatgctattggcaacattacctctgaaatcaagctttctgagggatccttcttagataagtttttcaaaaccaccagcaatatgactcctatggagcgtggaaggtttntagagaatgatagtcaaatagaagatgctcattctgcagctgttacagctggtgaaacnccggcttntgatgacgtgaacacgcatttcatctgtctagcttgtgtagatggtgagctctatgaacttgatggaaggaaagcaggaccaatttcacatggngcttcctctccagctaccctgttgaaggattcgacgaaagtgataaagaagattatcgaaaagaatccggacacgctcaacttcaatgttatggccatctntaagagaacctgaggatgttnttaagaagcgaagctcatttcatttagtcttgcgtttttgagtttgtgacncaatgaaccaaccacacagattgtttatctaggtggattctgttttactgctttctgaatcttctttttcttgtttctgaaacttttaagagtttatgatctcaaggttttttttttt

SEQ ID NO: 34 - protein, 251 aa, Brassica napus
  peptide (1)..(251): Ceres Seq. ID no. 13574767
  misc_feature (18)..(251): NCBI GI NO: 15236549 NR Description: carboxyl-terminal proteinase like protein
  misc_feature (18)..(192): NCBI GI NO: 7488069 NR Description: probable carboxyl-terminal proteinase - Arabidopsisthaliana
  misc_feature (28)..(249): NCBI GI NO: 14140139 NR Description: putative protein [Oryza sativa]
  misc_feature (28)..(250): NCBI GI NO: 38346164 NR Description: OSJNBa0079A21.11
  misc_feature (28)..(247): NCBI GI NO: 5174741 NR Description: ubiquitin carboxyl-terminal esterase L3
  misc_feature (28)..(247): NCBI GI NO: 7710106 NR Description: ubiquitin carboxyl-terminal esterase L3
  misc_feature (28)..(247): NCBI GI NO: 17380334 NR Description: Ubiquitin carboxyl-terminal hydrolase isozyme L3
  misc_feature (28)..(247): NCBI GI NO: 27705170 NR Description: similar to ubiqutin carboxyl-terminal hydrolase l3
  misc_feature (29)..(247): NCBI GI NO: 7522621 NR Description: ubiquitin carboxy-terminal hydrolase-6 (EC 3
  misc_feature (28)..(247): NCBI GI NO: 15809026 NR Description: ubiquitin carboxyl-terminal esterase L4
  misc_feature (23)..(23): Xaa is any aa, unknown or other
  misc_feature (161)..(161): Xaa is any aa, unknown or other
  misc_feature (180)..(180): Xaa is any aa, unknown or other
  misc_feature (183)..(183): Xaa is any aa, unknown or other
  misc_feature (214)..(214): Xaa is any aa, unknown or other
  misc_feature (248)..(248): Xaa is any aa, unknown or other
RFDFFYKHRSKERRSFKMATVDXSSSAKRWLPLEANPDVMNQFLWGLGLAPDAAECNDVFGLDDELLEMVPKPVLAVLFLYPITKKSEEERIEQDKEIKEKVHIDKVYFMKQTVGNACGTIGLLHAIGNITSEIKLSEGSFLDKFFKTTSNMTPMERGRFXENDSQIEDAHSAAVTAGEXPAXDDVNTHFICLACVDGELYELDGRKAGPISHXASSPATLLKDSTKVIKKIIEKNPDTLNFNVMAIXKRT

SEQ ID NO: 35 - protein, 234 aa, Brassica napus
  peptide (1)..(234): Ceres Seq. ID no. 13574768
  misc_feature (1)..(234): NCBI GI NO: 15236549 NR Description: carboxyl-terminal proteinase like protein
  misc_feature (1)..(175): NCBI GI NO: 7488069 NR Description: probable carboxyl-terminal proteinase - Arabidopsisthaliana
  misc_feature (11)..(232): NCBI GI NO: 14140139 NR Description: putative protein [Oryza sativa]
  misc_feature (11)..(233): NCBI GI NO: 38346164 NR Description: OSJNBa0079A21.11
  misc_feature (11)..(230): NCBI GI NO: 5174741 NR Description: ubiquitin carboxyl-terminal esterase L3
  misc_feature (11)..(230): NCBI GI NO: 7710106 NR Description: ubiquitin carboxyl-terminal esterase L3
  misc_feature (11)..(230): NCBI GI NO: 17380334 NR Description: Ubiquitin carboxyl-terminal hydrolase isozyme L3
  misc_feature (11)..(230): NCBI GI NO: 27705170 NR Description: similar to ubiqutin carboxyl-terminal hydrolase l3
  misc_feature (12)..(230): NCBI GI NO: 7522621 NR Description: ubiquitin carboxy-terminal hydrolase-6 (EC 3
  misc_feature (11)..(230): NCBI GI NO: 15809026 NR Description: ubiquitin carboxyl-terminal esterase L4
  misc_feature (6)..(6): Xaa is any aa, unknown or other
  misc_feature (144)..(144): Xaa is any aa, unknown or other
  misc_feature (163)..(163): Xaa is any aa, unknown or other
  misc_feature (166)..(166): Xaa is any aa, unknown or other
  misc_feature (197)..(197): Xaa is any aa, unknown or other
  misc_feature (231)..(231): Xaa is any aa, unknown or other
MATVDXSSSAKRWLPLEANPDVMNQFLWGLGLAPDAAECNDVFGLDDELLEMVPKPVLAVLFLYPITKKSEEERIEQDKEIKEKVHIDKVYFMKQTVGNACGTIGLLHAIGNITSEIKLSEGSFLDKFFKTTSNMTPMERGRFXENDSQIEDAHSAAVTAGEXPAXDDVNTHFICLACVDGELYELDGRKAGPISHXASSPATLLKDSTKVIKKIIEKNPDTLNFNVMAIXKRT

SEQ ID NO: 36 - protein, 212 aa, Brassica napus
  peptide (1)..(212): Ceres Seq. ID no. 13574769
  misc_feature (1)..(212): NCBI GI NO: 15236549 NR Description: carboxyl-terminal proteinase like protein
  misc_feature (1)..(153): NCBI GI NO: 7488069 NR Description: probable carboxyl-terminal proteinase - Arabidopsisthaliana
  misc_feature (1)..(210): NCBI GI NO: 14140139 NR Description: putative protein [Oryza sativa]
  misc_feature (1)..(211): NCBI GI NO: 38346164 NR Description: OSJNBa0079A21.11
  misc_feature (1)..(208): NCBI GI NO: 5174741 NR Description: ubiquitin carboxyl-terminal esterase L3
  misc_feature (1)..(208): NCBI GI NO: 7710106 NR Description: ubiquitin carboxyl-terminal esterase L3
  misc_feature (1)..(208): NCBI GI NO: 17380334 NR Description: Ubiquitin carboxyl-terminal hydrolase isozyme L3
  misc_feature (1)..(208): NCBI GI NO: 27705170 NR Description: similar to ubiqutin carboxyl-terminal hydrolase l3
  misc_feature (1)..(208): NCBI GI NO: 7522621 NR Description: ubiquitin carboxy-terminal hydrolase-6 (EC 3
  misc_feature (1)..(208): NCBI GI NO: 15809026 NR Description: ubiquitin carboxyl-terminal esterase L4
  misc_feature (122)..(122): Xaa is any aa, unknown or other
  misc_feature (141)..(141): Xaa is any aa, unknown or other
  misc_feature (144)..(144): Xaa is any aa, unknown or other
  misc_feature (175)..(175): Xaa is any aa, unknown or other
  misc_feature (209)..(209): Xaa is any aa, unknown or other
MNQFLWGLGLAPDAAECNDVFGLDDELLEMVPKPVLAVLFLYPITKKSEEERIEQDKEIKEKVHIDKVYFMKQTVGNACGTIGLLHAIGNITSEIKLSEGSFLDKFFKTTSNMTPMERGRFXENDSQIEDAHSAAVTAGEXPAXDDVNTHFICLACVDGELYELDGRKAGPISHXASSPATLLKDSTKVIKKIIEKNPDTLNFNVMAIXKRT

SEQ ID NO: 37 - DNA, 570 bp, Brassica napus
  misc_feature (1)..(570): Ceres Seq. ID no. 12556792
  misc_feature (309)..(309): n is a, c, t, g, unknown, or other
gggcctgttgttagtctcgtttatccactacatgcctcagtcagagcaattgaaactcaatctcacgctgatgacaaacaatggctcacttactgggtcctttactccttacttacactcttcgagctcacattcgccaaactcatcgaatgggtaccaatatggtcgtacttgaagctgatcttgacttgctggcttgtgattccttacttcagcggcgctgcttatgtctacgaacattttgtgagacctgtgtttgttaacccacagagcattaacatttggtatgtgccaaagaagatggatatnttcagaaagccagatgatgtgttaacagctgctgagaagtacattgcagagaatggacctgatgctttccagaagatcttaagccgatctgataaatcaagaagatatgagcagcgtgagaccatgtatggtgaagagtatcagtaccaagggcactacaaaagcttttagtactagacttgtgaagcaagcttcatgttgtttgttttgcttctttgtaaaagaagtttataaataaactttattgaaacttgttcagct

SEQ ID NO: 38 - protein, 159 aa, Brassica napus
  peptide (1)..(159): Ceres Seq. ID no. 12556793
  misc_feature (1)..(86): Pfam Name: Pfam Description:  TB2/DP1, HVA22 family
  misc_feature (1)..(152): NCBI GI NO: 15221266 NR Description: AtHVA22a; protein id: At1g74520
  misc_feature (2)..(152): NCBI GI NO: 15222421 NR Description: AtHVA22c; protein id: At1g69700
  misc_feature (1)..(152): NCBI GI NO: 15241840 NR Description: AtHVA22b-like protein; protein id: At5g62490
  misc_feature (1)..(152): NCBI GI NO: 4884934 NR Description: AtHVA22b [Arabidopsis thaliana]
  misc_feature (14)..(138): NCBI GI NO: 34910810 NR Description: P0042A10.34
  misc_feature (1)..(86): NCBI GI NO: 18423191 NR Description: putative protein; protein id: At5g50720
  misc_feature (1)..(86): NCBI GI NO: 18416458 NR Description: abscisic acid-induced - like protein
  misc_feature (6)..(86): NCBI GI NO: 8777395 NR Description: gene_id:MFB16
  misc_feature (6)..(86): NCBI GI NO: 7484787 NR Description: abscisic acid-induced protein homolog F13M23
  misc_feature (1)..(83): NCBI GI NO: 1076715 NR Description: abscisic acid-induced protein HVA22 - barley
  misc_feature (103)..(103): Xaa is any aa, unknown or other
GPVVSLVYPLHASVRAIETQSHADDKQWLTYWVLYSLLTLFELTFAKLIEWVPIWSYLKLILTCWLVIPYFSGAAYVYEHFVRPVFVNPQSINIWYVPKKMDXFRKPDDVLTAAEKYIAENGPDAFQKILSRSDKSRRYEQRETMYGEEYQYQGHYKSF

SEQ ID NO: 39 - DNA, 762 bp, Brassica napus
  misc_feature (1)..(762): Ceres Seq. ID no. 12556910
  misc_feature (382)..(382): n is a, c, t, g, unknown, or other
  misc_feature (508)..(508): n is a, c, t, g, unknown, or other
atacgaaaccttgtctagtcaaaaagcgcagctgaaaagaaaaacgagtgtggagaaattaaagaagaagaagaagaagaagaagaatagattatctggtgtgtttcgatggcgatgacagtagcagcttcgtcctctgtggcagtgatgattccacgtgttacctccgtctccgccagcttctccgccgttccttaccttcctccgctgcctcctcgctcatttggccgatcctctttcactgttccgccgaagctagtttcaggtaatggttcgcagaagggtgaattgatgaagatgagagcttcttcatcagatgagacctcaacgtccattgacaccaacgaactcttcacagacttgaaggaaaagtgggatggtnttgagaacaagtcgactgtaataatatattgaggaggagccattgttgctgtttggttatcttccattgttgttggtgccatcaactctgttcctctgcttcccaaagttatggaacttattggtntcggctacacaggatggttcgtctaccgatacctcctcttcaagtcaagcagaaaggaactggctgaggatattgattccttgaagaagaagatcgctgggaccgaatagattctttttaaaataataaaataaaccatctttatatctggaattttcttgtaatgtgattattgtacaatctccctgtttcaacaatgtatcttgtgtagtctgaaactattatcttagatccactggcaatgaaatctattt

SEQ ID NO: 40 - protein, 101 aa, Brassica napus
  peptide (1)..(101): Ceres Seq. ID no. 12556911
  misc_feature (2)..(101): NCBI GI NO: 37536446 NR Description: hypothetical protein
  misc_feature (9)..(101): NCBI GI NO: 18403896 NR Description: expressed protein; protein id: At1g52220
  misc_feature (1)..(101): NCBI GI NO: 18411555 NR Description: expressed protein; protein id: At4g01150
  misc_feature (1)..(101): NCBI GI NO: 687677 NR Description: unknown
  misc_feature (27)..(101): NCBI GI NO: 38175474 NR Description: unknown protein
  misc_feature (2)..(101): NCBI GI NO: 18407178 NR Description: expressed protein; protein id: At2g46820
  misc_feature (68)..(101): NCBI GI NO: 7485852 NR Description: hypothetical protein F20D10
  misc_feature (68)..(101): NCBI GI NO: 18420175 NR Description: expressed protein; protein id: At4g38100
  misc_feature (2)..(101): NCBI GI NO: 21555057 NR Description: unknown [Arabidopsis thaliana]
  misc_feature (18)..(101): NCBI GI NO: 34393236 NR Description: unknown protein
  misc_feature (92)..(92): Xaa is any aa, unknown or other
MAMTVAASSSVAVMIPRVTSVSASFSAVPYLPPLPPRSFGRSSFTVPPKLVSGNGSQKGELMKMRASSSDETSTSIDTNELFTDLKEKWDGXENKSTVIIY

SEQ ID NO: 41 - protein, 99 aa, Brassica napus
  peptide (1)..(99): Ceres Seq. ID no. 12556912
  misc_feature (1)..(99): NCBI GI NO: 18411555 NR Description: expressed protein; protein id: At4g01150
  misc_feature (1)..(99): NCBI GI NO: 687677 NR Description: unknown
  misc_feature (25)..(99): NCBI GI NO: 38175474 NR Description: unknown protein
  misc_feature (1)..(99): NCBI GI NO: 18407178 NR Description: expressed protein; protein id: At2g46820
  misc_feature (66)..(99): NCBI GI NO: 7485852 NR Description: hypothetical protein F20D10
  misc_feature (66)..(99): NCBI GI NO: 18420175 NR Description: expressed protein; protein id: At4g38100
  misc_feature (1)..(99): NCBI GI NO: 21555057 NR Description: unknown [Arabidopsis thaliana]
  misc_feature (16)..(99): NCBI GI NO: 34393236 NR Description: unknown protein
  misc_feature (1)..(99): NCBI GI NO: 37536446 NR Description: hypothetical protein
  misc_feature (7)..(99): NCBI GI NO: 18403896 NR Description: expressed protein; protein id: At1g52220
  misc_feature (90)..(90): Xaa is any aa, unknown or other
MTVAASSSVAVMIPRVTSVSASFSAVPYLPPLPPRSFGRSSFTVPPKLVSGNGSQKGELMKMRASSSDETSTSIDTNELFTDLKEKWDGXENKSTVIIY

SEQ ID NO: 42 - protein, 88 aa, Brassica napus
  peptide (1)..(88): Ceres Seq. ID no. 12556913
  misc_feature (1)..(88): NCBI GI NO: 18411555 NR Description: expressed protein; protein id: At4g01150
  misc_feature (1)..(88): NCBI GI NO: 687677 NR Description: unknown
  misc_feature (14)..(88): NCBI GI NO: 38175474 NR Description: unknown protein
  misc_feature (1)..(88): NCBI GI NO: 18407178 NR Description: expressed protein; protein id: At2g46820
  misc_feature (55)..(88): NCBI GI NO: 7485852 NR Description: hypothetical protein F20D10
  misc_feature (55)..(88): NCBI GI NO: 18420175 NR Description: expressed protein; protein id: At4g38100
  misc_feature (1)..(88): NCBI GI NO: 21555057 NR Description: unknown [Arabidopsis thaliana]
  misc_feature (5)..(88): NCBI GI NO: 34393236 NR Description: unknown protein
  misc_feature (1)..(88): NCBI GI NO: 37536446 NR Description: hypothetical protein
  misc_feature (1)..(88): NCBI GI NO: 18403896 NR Description: expressed protein; protein id: At1g52220
  misc_feature (79)..(79): Xaa is any aa, unknown or other
MIPRVTSVSASFSAVPYLPPLPPRSFGRSSFTVPPKLVSGNGSQKGELMKMRASSSDETSTSIDTNELFTDLKEKWDGXENKSTVIIY

SEQ ID NO: 43 - DNA, 879 bp, Brassica napus
  misc_feature (1)..(879): Ceres Seq. ID no. 12557497
  misc_feature (856)..(856): n is a, c, t, g, unknown, or other
  misc_feature (872)..(872): n is a, c, t, g, unknown, or other
  misc_feature (572)..(572): n is a, c, t, g, unknown, or other
  misc_feature (538)..(538): n is a, c, t, g, unknown, or other
  misc_feature (495)..(495): n is a, c, t, g, unknown, or other
  misc_feature (692)..(692): n is a, c, t, g, unknown, or other
  misc_feature (623)..(623): n is a, c, t, g, unknown, or other
  misc_feature (600)..(600): n is a, c, t, g, unknown, or other
  misc_feature (500)..(500): n is a, c, t, g, unknown, or other
  misc_feature (587)..(587): n is a, c, t, g, unknown, or other
  misc_feature (515)..(515): n is a, c, t, g, unknown, or other
aaaaacacctctctctcgttcacatctttcttctttgtggtaaacagaaagggagttagagagagagagagaaaacaatggcgtctaactcgctcatgagctgcggcatcgccgccgtctacccttctcttctctcttcttcaaagtctaagttcgtctccgccggagttcctctccccaacgccgggaacgttggccgtgtcagaatggctgctcactggatgcccggcgagccacgaccagcttacctcgacggttctgctcctggggactttgggtttgacccacttggacttggagaggttccagagaaccttgagaggtacaaagaatcagagctcattcactgtagatgggctatgctcgctgttccagggattttggtaccagaggctttgggatatggaaactgggttaaggcacaagaatgggcagcagtacctggaggacaagccacttacttggggacctcagtcccttggggtactttgcccncaatnttggctatagagttnttagctattgcctttgttgagcnccaaaggagtatggagaaggaccctgagaaaaanaagtacccgggaggngcatttgaccctntcggatactccaaagacccaaanaagttcgaggagttgaaagttaaagagatcaagaacgggcggcttgcactgttggcgtttgtaggcttntgtgtgcaacaatcggcctacccaggcacaggaccattggagaacttggctactcacttggccgatccatggcacaaaaacattggcgatattgttatccctttgaactgatgacttgtaaaaaagatagtaatatatcctatgagctttgtgtatcaaaactntgtgttatgaaagacncattgtg

SEQ ID NO: 44 - protein, 241 aa, Brassica napus
  peptide (1)..(241): Ceres Seq. ID no. 12557498
  misc_feature (53)..(210): Pfam Name: Pfam Description:  Chlorophyll A-B binding protein
  misc_feature (1)..(241): NCBI GI NO: 15233115 NR Description: light-harvesting chlorophyll a/b binding protein
  misc_feature (1)..(241): NCBI GI NO: 13265501 NR Description: AT3g54890 [Arabidopsis thaliana]
  misc_feature (1)..(238): NCBI GI NO: 625547 NR Description: chlorophyll a/b-binding protein type I
  misc_feature (1)..(239): NCBI GI NO: 82078 NR Description: chlorophyll a/b-binding protein type I precursor
  misc_feature (1)..(239): NCBI GI NO: 82079 NR Description: chlorophyll a/b-binding protein type I precursor
  misc_feature (1)..(239): NCBI GI NO: 115764 NR Description: Chlorophyll A-B binding protein 6A
  misc_feature (1)..(151): NCBI GI NO: 30694146 NR Description: light-harvesting chlorophyll a/b binding protein
  misc_feature (186)..(241): NCBI GI NO: 30694146 NR Description: light-harvesting chlorophyll a/b binding protein
  misc_feature (1)..(241): NCBI GI NO: 6685157 NR Description: chlorophyll a/b binding protein precursor
  misc_feature (1)..(239): NCBI GI NO: 3789954 NR Description: chlorophyll a/b-binding protein precursor
  misc_feature (140)..(140): Xaa is any aa, unknown or other
  misc_feature (141)..(141): Xaa is any aa, unknown or other
  misc_feature (146)..(146): Xaa is any aa, unknown or other
  misc_feature (154)..(154): Xaa is any aa, unknown or other
  misc_feature (165)..(165): Xaa is any aa, unknown or other
  misc_feature (170)..(170): Xaa is any aa, unknown or other
  misc_feature (175)..(175): Xaa is any aa, unknown or other
  misc_feature (182)..(182): Xaa is any aa, unknown or other
  misc_feature (205)..(205): Xaa is any aa, unknown or other
MASNSLMSCGIAAVYPSLLSSSKSKFVSAGVPLPNAGNVGRVRMAAHWMPGEPRPAYLDGSAPGDFGFDPLGLGEVPENLERYKESELIHCRWAMLAVPGILVPEALGYGNWVKAQEWAAVPGGQATYLGTSVPWGTLPXXLAIEXLAIAFVEXQRSMEKDPEKXKYPGXAFDPXGYSKDPXKFEELKVKEIKNGRLALLAFVGXCVQQSAYPGTGPLENLATHLADPWHKNIGDIVIPLN

SEQ ID NO: 45 - protein, 235 aa, Brassica napus
  peptide (1)..(235): Ceres Seq. ID no. 12557499
  misc_feature (47)..(204): Pfam Name: Pfam Description:  Chlorophyll A-B binding protein
  misc_feature (1)..(235): NCBI GI NO: 15233115 NR Description: light-harvesting chlorophyll a/b binding protein
  misc_feature (1)..(235): NCBI GI NO: 13265501 NR Description: AT3g54890 [Arabidopsis thaliana]
  misc_feature (1)..(232): NCBI GI NO: 625547 NR Description: chlorophyll a/b-binding protein type I
  misc_feature (1)..(233): NCBI GI NO: 82078 NR Description: chlorophyll a/b-binding protein type I precursor
  misc_feature (1)..(233): NCBI GI NO: 82079 NR Description: chlorophyll a/b-binding protein type I precursor
  misc_feature (1)..(233): NCBI GI NO: 115764 NR Description: Chlorophyll A-B binding protein 6A
  misc_feature (1)..(145): NCBI GI NO: 30694146 NR Description: light-harvesting chlorophyll a/b binding protein
  misc_feature (180)..(235): NCBI GI NO: 30694146 NR Description: light-harvesting chlorophyll a/b binding protein
  misc_feature (1)..(235): NCBI GI NO: 6685157 NR Description: chlorophyll a/b binding protein precursor
  misc_feature (1)..(233): NCBI GI NO: 3789954 NR Description: chlorophyll a/b-binding protein precursor
  misc_feature (134)..(134): Xaa is any aa, unknown or other
  misc_feature (135)..(135): Xaa is any aa, unknown or other
  misc_feature (140)..(140): Xaa is any aa, unknown or other
  misc_feature (148)..(148): Xaa is any aa, unknown or other
  misc_feature (159)..(159): Xaa is any aa, unknown or other
  misc_feature (164)..(164): Xaa is any aa, unknown or other
  misc_feature (169)..(169): Xaa is any aa, unknown or other
  misc_feature (176)..(176): Xaa is any aa, unknown or other
  misc_feature (199)..(199): Xaa is any aa, unknown or other
MSCGIAAVYPSLLSSSKSKFVSAGVPLPNAGNVGRVRMAAHWMPGEPRPAYLDGSAPGDFGFDPLGLGEVPENLERYKESELIHCRWAMLAVPGILVPEALGYGNWVKAQEWAAVPGGQATYLGTSVPWGTLPXXLAIEXLAIAFVEXQRSMEKDPEKXKYPGXAFDPXGYSKDPXKFEELKVKEIKNGRLALLAFVGXCVQQSAYPGTGPLENLATHLADPWHKNIGDIVIPLN

SEQ ID NO: 46 - protein, 198 aa, Brassica napus
  peptide (1)..(198): Ceres Seq. ID no. 12557500
  misc_feature (10)..(167): Pfam Name: Pfam Description:  Chlorophyll A-B binding protein
  misc_feature (1)..(198): NCBI GI NO: 15233115 NR Description: light-harvesting chlorophyll a/b binding protein
  misc_feature (1)..(198): NCBI GI NO: 13265501 NR Description: AT3g54890 [Arabidopsis thaliana]
  misc_feature (1)..(195): NCBI GI NO: 625547 NR Description: chlorophyll a/b-binding protein type I
  misc_feature (1)..(196): NCBI GI NO: 82078 NR Description: chlorophyll a/b-binding protein type I precursor
  misc_feature (1)..(196): NCBI GI NO: 82079 NR Description: chlorophyll a/b-binding protein type I precursor
  misc_feature (1)..(196): NCBI GI NO: 115764 NR Description: Chlorophyll A-B binding protein 6A
  misc_feature (1)..(108): NCBI GI NO: 30694146 NR Description: light-harvesting chlorophyll a/b binding protein
  misc_feature (143)..(198): NCBI GI NO: 30694146 NR Description: light-harvesting chlorophyll a/b binding protein
  misc_feature (1)..(198): NCBI GI NO: 6685157 NR Description: chlorophyll a/b binding protein precursor
  misc_feature (1)..(196): NCBI GI NO: 3789954 NR Description: chlorophyll a/b-binding protein precursor
  misc_feature (97)..(97): Xaa is any aa, unknown or other
  misc_feature (98)..(98): Xaa is any aa, unknown or other
  misc_feature (103)..(103): Xaa is any aa, unknown or other
  misc_feature (111)..(111): Xaa is any aa, unknown or other
  misc_feature (122)..(122): Xaa is any aa, unknown or other
  misc_feature (127)..(127): Xaa is any aa, unknown or other
  misc_feature (132)..(132): Xaa is any aa, unknown or other
  misc_feature (139)..(139): Xaa is any aa, unknown or other
  misc_feature (162)..(162): Xaa is any aa, unknown or other
MAAHWMPGEPRPAYLDGSAPGDFGFDPLGLGEVPENLERYKESELIHCRWAMLAVPGILVPEALGYGNWVKAQEWAAVPGGQATYLGTSVPWGTLPXXLAIEXLAIAFVEXQRSMEKDPEKXKYPGXAFDPXGYSKDPXKFEELKVKEIKNGRLALLAFVGXCVQQSAYPGTGPLENLATHLADPWHKNIGDIVIPLN

SEQ ID NO: 47 - DNA, 1081 bp, Brassica napus
  misc_feature (1)..(1081): Ceres Seq. ID no. 13574576
acctcacattcaacatcacagcaggaggagagagagaaagagagagagagagagcagagttcttcagtccatggcttccttagcttcatccaccacacttatctcttcatccaccgttcttcttccctcaaagccttctcctttttctcccgccgcctccttcctccgaactcttccttctaccgctgcatcaccgtcttctctccgttccggtttctccagcattggctccctcacctgcatcccctcttcctctcgccgtagcttcgccgtcaaggcccaggccgatgatttgccactggttggtaacaaagcgcctgattttgaggcagaggctgtttttgatcaagagttcatcaaggtgaagctctcagagtacattggtaaaaagtatgtgattctctttttctaccctttggacttcacttttgtctgccctacagagattactgcctttagtgaccgttatgaagwatttgagaagctaaacacggaagtgttaggtgtctcagtggacagtgtgttctcgcatcttgsgtgggtccaaacagagagaaagtcaggagggctcggtgatytgaactacccacttgtctctgatatcactaaatccatttcaaaatcttttggtgtgctcatccctgatcagggcattgcactgagagggcttttcatcattgacaaggaaggagtcatccagcattccaccatcaacaacctcggtattggccgaagcgttgatgagacaatgagaaccctccaggcattacagtatgttcaagaaaaccctgatgaggtytgccccgcgggatggaagcctggggagaaatcgatgaagcctgaccccaagctgagcaaagagtatttttcagctatttaaaggcttttttaaaacaaatgattggtgaaaagcagaggcatttttttttttcctatgttggagtctttgagtgctgagtttaatatgttttttgccaaattaacatttgcttgaatatctttgctttgtcttcattagttatgtttytgctgtgtgtgttttcctcaaaatttaataaaaaacaatggaatttatgtgttt

SEQ ID NO: 48 - protein, 292 aa, Brassica napus
  peptide (1)..(292): Ceres Seq. ID no. 15222598
  misc_feature (101)..(252): Pfam Name: Pfam Description:  AhpC/TSA family
  misc_feature (24)..(292): NCBI GI NO: 11119229 NR Description: 2-Cys peroxiredoxin [Brassica napus]
  misc_feature (23)..(292): NCBI GI NO: 18415155 NR Description: 2-cys peroxiredoxin-related protein
  misc_feature (24)..(292): NCBI GI NO: 9758409 NR Description: 2-cys peroxiredoxin-like protein
  misc_feature (24)..(292): NCBI GI NO: 13265490 NR Description: AT5g06290 [Arabidopsis thaliana]
  misc_feature (24)..(292): NCBI GI NO: 21553667 NR Description: 2-cys peroxiredoxin-like protein
  misc_feature (24)..(292): NCBI GI NO: 15229806 NR Description: 2-cys peroxiredoxin BAS1 precursor
  misc_feature (24)..(292): NCBI GI NO: 21592588 NR Description: putative 2-cys peroxiredoxin BAS1 precursor
  misc_feature (24)..(292): NCBI GI NO: 3121825 NR Description: 2-cys peroxiredoxin BAS1, chloroplast precursor
  misc_feature (24)..(292): NCBI GI NO: 7242491 NR Description: 2-Cys peroxiredoxin [Arabidopsis thaliana]
  misc_feature (24)..(292): NCBI GI NO: 1498198 NR Description: 2-Cys peroxiredoxin bas1 [Arabidopsis thaliana]
  misc_feature (158)..(158): Xaa is any aa, unknown or other
  misc_feature (179)..(179): Xaa is any aa, unknown or other
  misc_feature (193)..(193): Xaa is any aa, unknown or other
  misc_feature (266)..(266): Xaa is any aa, unknown or other
PHIQHHSRRRERKRERESRVLQSMASLASSTTLISSSTVLLPSKPSPFSPAASFLRTLPSTAASPSSLRSGFSSIGSLTCIPSSSRRSFAVKAQADDLPLVGNKAPDFEAEAVFDQEFIKVKLSEYIGKKYVILFFYPLDFTFVCPTEITAFSDRYEXFEKLNTEVLGVSVDSVFSHLXWVQTERKSGGLGDXNYPLVSDITKSISKSFGVLIPDQGIALRGLFIIDKEGVIQHSTINNLGIGRSVDETMRTLQALQYVQENPDEXCPAGWKPGEKSMKPDPKLSKEYFSAI

SEQ ID NO: 49 - protein, 269 aa, Brassica napus
  peptide (1)..(269): Ceres Seq. ID no. 15222599
  misc_feature (78)..(229): Pfam Name: Pfam Description:  AhpC/TSA family
  misc_feature (1)..(269): NCBI GI NO: 11119229 NR Description: 2-Cys peroxiredoxin [Brassica napus]
  misc_feature (1)..(269): NCBI GI NO: 18415155 NR Description: 2-cys peroxiredoxin-related protein
  misc_feature (1)..(269): NCBI GI NO: 9758409 NR Description: 2-cys peroxiredoxin-like protein
  misc_feature (1)..(269): NCBI GI NO: 13265490 NR Description: AT5g06290 [Arabidopsis thaliana]
  misc_feature (1)..(269): NCBI GI NO: 21553667 NR Description: 2-cys peroxiredoxin-like protein
  misc_feature (1)..(269): NCBI GI NO: 15229806 NR Description: 2-cys peroxiredoxin BAS1 precursor
  misc_feature (1)..(269): NCBI GI NO: 21592588 NR Description: putative 2-cys peroxiredoxin BAS1 precursor
  misc_feature (1)..(269): NCBI GI NO: 3121825 NR Description: 2-cys peroxiredoxin BAS1, chloroplast precursor
  misc_feature (1)..(269): NCBI GI NO: 7242491 NR Description: 2-Cys peroxiredoxin [Arabidopsis thaliana]
  misc_feature (1)..(269): NCBI GI NO: 1498198 NR Description: 2-Cys peroxiredoxin bas1 [Arabidopsis thaliana]
  misc_feature (135)..(135): Xaa is any aa, unknown or other
  misc_feature (156)..(156): Xaa is any aa, unknown or other
  misc_feature (170)..(170): Xaa is any aa, unknown or other
  misc_feature (243)..(243): Xaa is any aa, unknown or other
MASLASSTTLISSSTVLLPSKPSPFSPAASFLRTLPSTAASPSSLRSGFSSIGSLTCIPSSSRRSFAVKAQADDLPLVGNKAPDFEAEAVFDQEFIKVKLSEYIGKKYVILFFYPLDFTFVCPTEITAFSDRYEXFEKLNTEVLGVSVDSVFSHLXWVQTERKSGGLGDXNYPLVSDITKSISKSFGVLIPDQGIALRGLFIIDKEGVIQHSTINNLGIGRSVDETMRTLQALQYVQENPDEXCPAGWKPGEKSMKPDPKLSKEYFSAI

SEQ ID NO: 50 - DNA, 491 bp, Brassica napus
  misc_feature (1)..(491): Ceres Seq. ID no. 12557827
  misc_feature (483)..(483): n is a, c, t, g, unknown, or other
  misc_feature (414)..(414): n is a, c, t, g, unknown, or other
  misc_feature (441)..(441): n is a, c, t, g, unknown, or other
  misc_feature (454)..(454): n is a, c, t, g, unknown, or other
  misc_feature (110)..(110): n is a, c, t, g, unknown, or other
aatctgcagcgactctctcagacaactttcgatcttcttcttcatctcaatctcgtcgtttcgatcgatcaaaagaatcggagatggcatcgacagcggcggttccgttntggagagcggcggggatgacgtatataacgtactcaaacatctgcgcgaatctggtcaggaactgtctgaaagaaccattcaaggctgaatccatgagccgcgagaaggttcacttctccctctccaaatgggccgatggaaagccccagaaaccagttttgcggtcagacgcacctcaagtttgaggcttttgatcaagatatggttttctgaatgggataaaagggatgctgtaacgtctctctctctttggatattttgtttcctttttgttgtattcgatgaaagattgatactttgccnatcaataatgcaaaaacatggagcttnttctgtttctttnttaagacgaattagttttttgtggatttnttgagttg

SEQ ID NO: 51 - protein, 97 aa, Brassica napus
  peptide (1)..(97): Ceres Seq. ID no. 12557828
  misc_feature (35)..(83): Pfam Name: Pfam Description:  Mitochondrial ATP synthase epsilon chain
  misc_feature (28)..(97): NCBI GI NO: 15217996 NR Description: epsilon subunit of mitochondrial F1-ATPase
  misc_feature (28)..(93): NCBI GI NO: 543868 NR Description: ATP synthase epsilon chain, mitochondrial
  misc_feature (28)..(93): NCBI GI NO: 21068676 NR Description: putative epsilon subunit of mitochondrial F1-ATPase
  misc_feature (32)..(95): NCBI GI NO: 25044815 NR Description: ATP synthase epsilon subunit [Ananas comosus]
  misc_feature (29)..(94): NCBI GI NO: 2493053 NR Description: ATP synthase epsilon chain, mitochondrial
  misc_feature (29)..(92): NCBI GI NO: 40253921 NR Description: putative ATP synthase epsilon chain
  misc_feature (37)..(90): NCBI GI NO: 21070596 NR Description: hypothetical protein [Dictyostelium discoideum]
  misc_feature (37)..(94): NCBI GI NO: 17864256 NR Description: stunted CG9032-PA [Drosophila melanogaster]
  misc_feature (37)..(85): NCBI GI NO: 24642319 NR Description: stunted CG9032-PB
  misc_feature (36)..(36): Xaa is any aa, unknown or other
SAATLSDNFRSSSSSQSRRFDRSKESEMASTAAVPXWRAAGMTYITYSNICANLVRNCLKEPFKAESMSREKVHFSLSKWADGKPQKPVLRSDAPQV

SEQ ID NO: 52 - protein, 82 aa, Brassica napus
  peptide (1)..(82): Ceres Seq. ID no. 12557829
  misc_feature (59)..(59): Xaa is any aa, unknown or other
  misc_feature (68)..(68): Xaa is any aa, unknown or other
  misc_feature (72)..(72): Xaa is any aa, unknown or other
  misc_feature (82)..(82): Xaa is any aa, unknown or other
MGRWKAPETSFAVRRTSSLRLLIKIWFSEWDKRDAVTSLSLWIFCFLFVVFDERLILCXSIMQKHGAXSVSXLRRISFLWIX

SEQ ID NO: 53 - protein, 70 aa, Brassica napus
  peptide (1)..(70): Ceres Seq. ID no. 12557830
  misc_feature (8)..(56): Pfam Name: Pfam Description:  Mitochondrial ATP synthase epsilon chain
  misc_feature (1)..(70): NCBI GI NO: 15217996 NR Description: epsilon subunit of mitochondrial F1-ATPase
  misc_feature (1)..(66): NCBI GI NO: 543868 NR Description: ATP synthase epsilon chain, mitochondrial
  misc_feature (1)..(66): NCBI GI NO: 21068676 NR Description: putative epsilon subunit of mitochondrial F1-ATPase
  misc_feature (5)..(68): NCBI GI NO: 25044815 NR Description: ATP synthase epsilon subunit [Ananas comosus]
  misc_feature (2)..(67): NCBI GI NO: 2493053 NR Description: ATP synthase epsilon chain, mitochondrial
  misc_feature (2)..(65): NCBI GI NO: 40253921 NR Description: putative ATP synthase epsilon chain
  misc_feature (10)..(63): NCBI GI NO: 21070596 NR Description: hypothetical protein [Dictyostelium discoideum]
  misc_feature (10)..(67): NCBI GI NO: 17864256 NR Description: stunted CG9032-PA [Drosophila melanogaster]
  misc_feature (10)..(58): NCBI GI NO: 24642319 NR Description: stunted CG9032-PB
  misc_feature (9)..(9): Xaa is any aa, unknown or other
MASTAAVPXWRAAGMTYITYSNICANLVRNCLKEPFKAESMSREKVHFSLSKWADGKPQKPVLRSDAPQV

SEQ ID NO: 54 - DNA, 646 bp, Brassica napus
  misc_feature (1)..(646): Ceres Seq. ID no. 12556948
  misc_feature (527)..(527): n is a, c, t, g, unknown, or other
  misc_feature (636)..(636): n is a, c, t, g, unknown, or other
  misc_feature (500)..(500): n is a, c, t, g, unknown, or other
  misc_feature (485)..(485): n is a, c, t, g, unknown, or other
agagttaaattctatcaatctctaaaccaactggtttaacatgcaagaactagcaacttgggagttgtaaagcagagatcaccacatctacaaaaaatctcccacaccgacatgtcgagatccttagctttcgtttacttatccatacttttccttcagacccatctctcgatctccgtcgaggttccggtttcgtcggtgaacggagaaatagacgcaatgcttgaccggaaaggcgtagtcggggaagaaggagaagagatgatgccgtcggatataagccggagagtgatgatgatgcggaaacagtacataagctacgcaacgctaaggagagacatggttccttgtcagaggccaggcgcttcctactacgcttgtcgctcaggacaggccaattcttacagcagaggatgcaacatcattactaggtgtgctcgagacactagcgacatcaagacctgaaacatttttatccggttttnttttaaatgcggatnttgataatgcgattaaaatgctctctntccaaggatgaggcaagtaaaatctttaattcattttgtaatgttgttgtttacattagaataaggcttatgtagtttatatgtaatcaatattgatataattgatatntgtattgttg

SEQ ID NO: 55 - protein, 117 aa, Brassica napus
  peptide (1)..(117): Ceres Seq. ID no. 12556949
  misc_feature (46)..(110): Pfam Name: RALF Pfam Description: Rapid ALkalinization Factor
  misc_feature (1)..(117): NCBI GI NO: 18403901 NR Description: Expressed protein; protein id: At3g23805
  misc_feature (1)..(117): NCBI GI NO: 21553907 NR Description: unknown [Arabidopsis thaliana]
  misc_feature (1)..(117): NCBI GI NO: 18414108 NR Description: expressed protein; protein id: At4g13950
  misc_feature (24)..(110): NCBI GI NO: 18401177 NR Description: expressed protein; protein id: At3g16570
  misc_feature (1)..(66): NCBI GI NO: 7459901 NR Description: hypothetical protein DL3015C - Arabidopsis thaliana
  misc_feature (44)..(110): NCBI GI NO: 18397246 NR Description: expressed protein; protein id: At3g05490
  misc_feature (5)..(110): NCBI GI NO: 18414528 NR Description: Expressed protein; protein id: At4g15800
  misc_feature (10)..(113): NCBI GI NO: 30685837 NR Description: expressed protein [Arabidopsis thaliana]
  misc_feature (44)..(108): NCBI GI NO: 28628203 NR Description: rapid alkalinization factor 1 precursor
  misc_feature (44)..(108): NCBI GI NO: 15218637 NR Description: hypothetical protein; protein id: At1g02900.1
MSRSLAFVYLSILFLQTHLSISVEVPVSSVNGEIDAMLDRKGVVGEEGEEMMPSDISRRVMMMRKQYISYATLRRDMVPCQRPGASYYACRSGQANSYSRGCNIITRCARDTSDIKT

SEQ ID NO: 56 - protein, 81 aa, Brassica napus
  peptide (1)..(81): Ceres Seq. ID no. 12556950
  misc_feature (10)..(74): Pfam Name: RALF Pfam Description: Rapid ALkalinization Factor
  misc_feature (1)..(81): NCBI GI NO: 18403901 NR Description: Expressed protein; protein id: At3g23805
  misc_feature (1)..(81): NCBI GI NO: 21553907 NR Description: unknown [Arabidopsis thaliana]
  misc_feature (1)..(81): NCBI GI NO: 18414108 NR Description: expressed protein; protein id: At4g13950
  misc_feature (1)..(74): NCBI GI NO: 18401177 NR Description: expressed protein; protein id: At3g16570
  misc_feature (1)..(30): NCBI GI NO: 7459901 NR Description: hypothetical protein DL3015C - Arabidopsis thaliana
  misc_feature (8)..(74): NCBI GI NO: 18397246 NR Description: expressed protein; protein id: At3g05490
  misc_feature (1)..(74): NCBI GI NO: 18414528 NR Description: Expressed protein; protein id: At4g15800
  misc_feature (1)..(77): NCBI GI NO: 30685837 NR Description: expressed protein [Arabidopsis thaliana]
  misc_feature (8)..(72): NCBI GI NO: 28628203 NR Description: rapid alkalinization factor 1 precursor
  misc_feature (8)..(72): NCBI GI NO: 15218637 NR Description: hypothetical protein; protein id: At1g02900.1
MLDRKGVVGEEGEEMMPSDISRRVMMMRKQYISYATLRRDMVPCQRPGASYYACRSGQANSYSRGCNIITRCARDTSDIKT

SEQ ID NO: 57 - protein, 67 aa, Brassica napus
  peptide (1)..(67): Ceres Seq. ID no. 12556951
  misc_feature (1)..(60): Pfam Name: RALF Pfam Description: Rapid ALkalinization Factor
  misc_feature (1)..(67): NCBI GI NO: 18403901 NR Description: Expressed protein; protein id: At3g23805
  misc_feature (1)..(67): NCBI GI NO: 21553907 NR Description: unknown [Arabidopsis thaliana]
  misc_feature (1)..(67): NCBI GI NO: 18414108 NR Description: expressed protein; protein id: At4g13950
  misc_feature (1)..(60): NCBI GI NO: 18401177 NR Description: expressed protein; protein id: At3g16570
  misc_feature (1)..(16): NCBI GI NO: 7459901 NR Description: hypothetical protein DL3015C - Arabidopsis thaliana
  misc_feature (1)..(60): NCBI GI NO: 18397246 NR Description: expressed protein; protein id: At3g05490
  misc_feature (1)..(60): NCBI GI NO: 18414528 NR Description: Expressed protein; protein id: At4g15800
  misc_feature (1)..(63): NCBI GI NO: 30685837 NR Description: expressed protein [Arabidopsis thaliana]
  misc_feature (1)..(58): NCBI GI NO: 28628203 NR Description: rapid alkalinization factor 1 precursor
  misc_feature (1)..(58): NCBI GI NO: 15218637 NR Description: hypothetical protein; protein id: At1g02900.1
MMPSDISRRVMMMRKQYISYATLRRDMVPCQRPGASYYACRSGQANSYSRGCNIITRCARDTSDIKT

SEQ ID NO: 58 - DNA, 782 bp, Brassica napus
  misc_feature (1)..(782): Ceres Seq. ID no. 12557831
  misc_feature (748)..(748): n is a, c, t, g, unknown, or other
  misc_feature (139)..(139): n is a, c, t, g, unknown, or other
atcaaacaaaatccttggctccccccgaatctagctttctccctctctctctcgatggagaagaatcaagcaagccttcttctccagcaacagctcaaacatctgtgcaagaacccggttgatggtttctctgctggtntcgtcgacgagagtaacgtctttcagtggagcgtctcgatcatgggtcctcccgatactttgtatgaagggggattctttaatgcaattatgacatttccagagcaatatcctaacctcccaccaactgtgaggttcacctcggagatgtggcatcccaatgtttattctgatgggaaagtttgcatatcgattcttcatcatcctggcgatgatcctaatggatacgagcttgcctctgaacgttggacacctgtccatacggtagaaaccattatgttgagtatcatatccatgctctcgagtccaaacgatgagtcaccagcgaacgtggaagctgcaaaagagtggagagagaacagagcagggtttaggaagaaagtgagtcgctgtgttagaaaatcgcaagagatgctatgagccatctcttcttggcgtttttatgtgttgtagaaatttcgatcctaagctaagagagagagaacgtaagtagcatcaatcatcaagtagcaggcggatgaatctgtgtgctcaaaagcttgttttctttttatggttttggagatggctttaaggtttggaatattgtggtggaatcaaatcaactccnccttttaggattataatcttactctcgttaatgg

SEQ ID NO: 59 - protein, 185 aa, Brassica napus
  peptide (1)..(185): Ceres Seq. ID no. 12557832
  misc_feature (19)..(185): NCBI GI NO: 18410268 NR Description: E2, ubiquitin-conjugating enzyme 14
  misc_feature (11)..(184): NCBI GI NO: 19347846 NR Description: putative E2, ubiquitin-conjugating enzyme UBC7
  misc_feature (11)..(184): NCBI GI NO: 28973769 NR Description: putative E2, ubiquitin-conjugating enzyme UBC7
  misc_feature (22)..(184): NCBI GI NO: 31088843 NR Description: Ubiquitin-conjugating enzyme E2 7
  misc_feature (17)..(185): NCBI GI NO: 7437989 NR Description: ubiquitin-conjugating enzyme E2 - maize
  misc_feature (22)..(184): NCBI GI NO: 18408206 NR Description: E2, ubiquitin-conjugating enzyme 13
  misc_feature (22)..(185): NCBI GI NO: 34908132 NR Description: putative Ubiquitin carrier protein UBC7
  misc_feature (23)..(184): NCBI GI NO: 7437988 NR Description: ubiquitin-conjugating enzyme - maize
  misc_feature (52)..(184): NCBI GI NO: 18424219 NR Description: E2, ubiquitin-conjugating enzyme 7
  misc_feature (39)..(185): NCBI GI NO: 136647 NR Description: Ubiquitin-conjugating enzyme E2-20 kDa
  misc_feature (47)..(47): Xaa is any aa, unknown or other
IKQNPWLPPNLAFSLSLSMEKNQASLLLQQQLKHLCKNPVDGFSAGXVDESNVFQWSVSIMGPPDTLYEGGFFNAIMTFPEQYPNLPPTVRFTSEMWHPNVYSDGKVCISILHHPGDDPNGYELASERWTPVHTVETIMLSIISMLSSPNDESPANVEAAKEWRENRAGFRKKVSRCVRKSQEML

SEQ ID NO: 60 - protein, 167 aa, Brassica napus
  peptide (1)..(167): Ceres Seq. ID no. 12557833
  misc_feature (1)..(167): NCBI GI NO: 18410268 NR Description: E2, ubiquitin-conjugating enzyme 14
  misc_feature (1)..(166): NCBI GI NO: 19347846 NR Description: putative E2, ubiquitin-conjugating enzyme UBC7
  misc_feature (1)..(166): NCBI GI NO: 28973769 NR Description: putative E2, ubiquitin-conjugating enzyme UBC7
  misc_feature (4)..(166): NCBI GI NO: 31088843 NR Description: Ubiquitin-conjugating enzyme E2 7
  misc_feature (1)..(167): NCBI GI NO: 7437989 NR Description: ubiquitin-conjugating enzyme E2 - maize
  misc_feature (4)..(166): NCBI GI NO: 18408206 NR Description: E2, ubiquitin-conjugating enzyme 13
  misc_feature (4)..(167): NCBI GI NO: 34908132 NR Description: putative Ubiquitin carrier protein UBC7
  misc_feature (5)..(166): NCBI GI NO: 7437988 NR Description: ubiquitin-conjugating enzyme - maize
  misc_feature (34)..(166): NCBI GI NO: 18424219 NR Description: E2, ubiquitin-conjugating enzyme 7
  misc_feature (21)..(167): NCBI GI NO: 136647 NR Description: Ubiquitin-conjugating enzyme E2-20 kDa
  misc_feature (29)..(29): Xaa is any aa, unknown or other
MEKNQASLLLQQQLKHLCKNPVDGFSAGXVDESNVFQWSVSIMGPPDTLYEGGFFNAIMTFPEQYPNLPPTVRFTSEMWHPNVYSDGKVCISILHHPGDDPNGYELASERWTPVHTVETIMLSIISMLSSPNDESPANVEAAKEWRENRAGFRKKVSRCVRKSQEML

SEQ ID NO: 61 - protein, 125 aa, Brassica napus
  peptide (1)..(125): Ceres Seq. ID no. 12557834
  misc_feature (1)..(125): NCBI GI NO: 18410268 NR Description: E2, ubiquitin-conjugating enzyme 14
  misc_feature (1)..(124): NCBI GI NO: 19347846 NR Description: putative E2, ubiquitin-conjugating enzyme UBC7
  misc_feature (1)..(124): NCBI GI NO: 28973769 NR Description: putative E2, ubiquitin-conjugating enzyme UBC7
  misc_feature (1)..(124): NCBI GI NO: 31088843 NR Description: Ubiquitin-conjugating enzyme E2 7
  misc_feature (1)..(125): NCBI GI NO: 7437989 NR Description: ubiquitin-conjugating enzyme E2 - maize
  misc_feature (1)..(124): NCBI GI NO: 18408206 NR Description: E2, ubiquitin-conjugating enzyme 13
  misc_feature (1)..(125): NCBI GI NO: 34908132 NR Description: putative Ubiquitin carrier protein UBC7
  misc_feature (1)..(124): NCBI GI NO: 7437988 NR Description: ubiquitin-conjugating enzyme - maize
  misc_feature (1)..(124): NCBI GI NO: 18424219 NR Description: E2, ubiquitin-conjugating enzyme 7
  misc_feature (1)..(125): NCBI GI NO: 136647 NR Description: Ubiquitin-conjugating enzyme E2-20 kDa
MGPPDTLYEGGFFNAIMTFPEQYPNLPPTVRFTSEMWHPNVYSDGKVCISILHHPGDDPNGYELASERWTPVHTVETIMLSIISMLSSPNDESPANVEAAKEWRENRAGFRKKVSRCVRKSQEML

SEQ ID NO: 62 - DNA, 577 bp, Brassica napus
  misc_feature (1)..(577): Ceres Seq. ID no. 12557915
ggggagcctcccttcgcaaagcctataccttcgacaccgtccaaaacttctggggtttgcacgagactatattcatccctagcaaactgacgccgaatgctgaaattcacatgttcaaagctggtgttgagcctaagtgggaagatcctgagtgtgctaatggcggaaagtggacttttgttgttacctccaaccgcaagcctgctttagacaaggcttggcttgaaactatgggtattgggaagaagtggaaggagatacttgatgtcaccgacaagataactttcactaaccatgatgattctagaagaactcggttcactgtctgaagagaagacacaagtgtggtgagacctgaggaagatgcaatctagctttgtcttgcattattctgtcggtttactcatagctgagagagcctgagacctttagggacactcactttgaggtgtaactctacaaagttttatttttcactggaaagaagttatttaatattaagttcggttatatctttttggaagcatcaaattttggacacactttctcttaaatcaaatgtctgatttttaatgct

SEQ ID NO: 63 - protein, 108 aa, Brassica napus
  peptide (1)..(108): Ceres Seq. ID no. 12557916
  misc_feature (1)..(85): Pfam Name: Pfam Description:  Eukaryotic initiation factor 4E
  misc_feature (1)..(85): NCBI GI NO: 1352442 NR Description: EUKARYOTIC TRANSLATION INITIATION FACTOR 4E
  misc_feature (77)..(105): NCBI GI NO: 1352442 NR Description: EUKARYOTIC TRANSLATION INITIATION FACTOR 4E
  misc_feature (1)..(85): NCBI GI NO: 32698526 NR Description: eukaryotic translation initiation factor iso4E
  misc_feature (77)..(104): NCBI GI NO: 32698526 NR Description: eukaryotic translation initiation factor iso4E
  misc_feature (1)..(85): NCBI GI NO: 2209274 NR Description: eukaryotic initiation factor (iso)-4F p28 subunit
  misc_feature (1)..(85): NCBI GI NO: 15238558 NR Description: eIF4Eiso protein (emb|CAA71579
  misc_feature (77)..(108): NCBI GI NO: 2209274 NR Description: eukaryotic initiation factor (iso)-4F p28 subunit
  misc_feature (77)..(108): NCBI GI NO: 15238558 NR Description: eIF4Eiso protein (emb|CAA71579
  misc_feature (1)..(85): NCBI GI NO: 37535224 NR Description: cap-binding protein p28
  misc_feature (77)..(105): NCBI GI NO: 37535224 NR Description: cap-binding protein p28
GASLRKAYTFDTVQNFWGLHETIFIPSKLTPNAEIHMFKAGVEPKWEDPECANGGKWTFVVTSNRKPALDKAWLETMGIGKKWKEILDVTDKITFTNHDDSRRTRFTV

SEQ ID NO: 64 - protein, 72 aa, Brassica napus
  peptide (1)..(72): Ceres Seq. ID no. 12557917
  misc_feature (1)..(49): NCBI GI NO: 2209274 NR Description: eukaryotic initiation factor (iso)-4F p28 subunit
  misc_feature (1)..(49): NCBI GI NO: 15238558 NR Description: eIF4Eiso protein (emb|CAA71579
  misc_feature (41)..(72): NCBI GI NO: 2209274 NR Description: eukaryotic initiation factor (iso)-4F p28 subunit
  misc_feature (41)..(72): NCBI GI NO: 15238558 NR Description: eIF4Eiso protein (emb|CAA71579
  misc_feature (1)..(49): NCBI GI NO: 37535224 NR Description: cap-binding protein p28
  misc_feature (41)..(69): NCBI GI NO: 37535224 NR Description: cap-binding protein p28
  misc_feature (1)..(49): NCBI GI NO: 1352442 NR Description: EUKARYOTIC TRANSLATION INITIATION FACTOR 4E
  misc_feature (41)..(69): NCBI GI NO: 1352442 NR Description: EUKARYOTIC TRANSLATION INITIATION FACTOR 4E
  misc_feature (1)..(49): NCBI GI NO: 32698526 NR Description: eukaryotic translation initiation factor iso4E
  misc_feature (41)..(68): NCBI GI NO: 32698526 NR Description: eukaryotic translation initiation factor iso4E
MFKAGVEPKWEDPECANGGKWTFVVTSNRKPALDKAWLETMGIGKKWKEILDVTDKITFTNHDDSRRTRFTV

SEQ ID NO: 65 - DNA, 811 bp, Brassica napus
  misc_feature (1)..(811): Ceres Seq. ID no. 12557850
  misc_feature (605)..(605): n is a, c, t, g, unknown, or other
  misc_feature (473)..(473): n is a, c, t, g, unknown, or other
aaaaacctgattttaccactaaactgctgtcttgtaagaagaagccgcaaaactcttaggactcttcttcgtggtacgttcaaaaggtttctccttcggtttcaaagattctgtgaagatgttctccgctcagaacaagatcaagaaggacaagaatgccgagccgacagaatgcgacgtgcaagttgctcaggctttgtttgatttggagaacactaaccaggagctgaaaagcgagctgaaagatctctacatcaaccaagctgttaacatggacatctgtggaaaccgcaaggctattgtgatttacgtcccattcagattgaggaaagctttccgcaagatccacccccgtctcgttagagagctcgagaagaagttcagtggaaaggatgttatctttgttgccacaagaaggatcatgcgtcctcccaagaagggtgcagctgttcagaggccacgcaacagaactntaacctctgttcacgaagcaatgctcgaggacgtcgcttaccccgctgagatcgttggaaaacgtactcgataccgtcttgatggatccaaagtcatgaaggtgtatttggaggccaaggaaaggaacaacncagagtacaagctcgagactatggttggtgtgtaccgtaaacttactggaaaggatgtcacttttgagtacccggtcgaagcttgaaagtaagacgatgctgaagaatcatcaggatagaggagagattttcaattatgtattttggtatttgatgtaatgaataccctttgtgcttttcaattttgaaacctatgttataatttc

SEQ ID NO: 66 - protein, 190 aa, Brassica napus
  peptide (1)..(190): Ceres Seq. ID no. 12557851
  misc_feature (4)..(190): Pfam Name: Pfam Description:  Ribosomal protein S7e
  misc_feature (1)..(190): NCBI GI NO: 15237278 NR Description: 40S ribosomal protein S7-like
  misc_feature (1)..(190): NCBI GI NO: 21592413 NR Description: 40S ribosomal protein S7-like
  misc_feature (1)..(188): NCBI GI NO: 20139962 NR Description: 40S ribosomal protein S7
  misc_feature (1)..(188): NCBI GI NO: 15232926 NR Description: putative 40S ribosomal protein
  misc_feature (1)..(188): NCBI GI NO: 15221972 NR Description: 40S ribosomal protein S7 homolog, putative
  misc_feature (1)..(188): NCBI GI NO: 20139964 NR Description: 40S ribosomal protein S7
  misc_feature (1)..(188): NCBI GI NO: 14787424 NR Description: Ribosomal protein S7
  misc_feature (1)..(188): NCBI GI NO: 4588906 NR Description: ribosomal protein S7 [Secale cereale]
  misc_feature (1)..(188): NCBI GI NO: 22671664 NR Description: ribosomal protein S7
  misc_feature (1)..(187): NCBI GI NO: 15294025 NR Description: 40S ribosomal protein S7 [Ictalurus punctatus]
  misc_feature (119)..(119): Xaa is any aa, unknown or other
  misc_feature (163)..(163): Xaa is any aa, unknown or other
MFSAQNKIKKDKNAEPTECDVQVAQALFDLENTNQELKSELKDLYINQAVNMDICGNRKAIVIYVPFRLRKAFRKIHPRLVRELEKKFSGKDVIFVATRRIMRPPKKGAAVQRPRNRTXTSVHEAMLEDVAYPAEIVGKRTRYRLDGSKVMKVYLEAKERNNXEYKLETMVGVYRKLTGKDVTFEYPVEA

SEQ ID NO: 67 - protein, 139 aa, Brassica napus
  peptide (1)..(139): Ceres Seq. ID no. 12557852
  misc_feature (1)..(139): Pfam Name: Pfam Description:  Ribosomal protein S7e
  misc_feature (1)..(139): NCBI GI NO: 15237278 NR Description: 40S ribosomal protein S7-like
  misc_feature (1)..(139): NCBI GI NO: 21592413 NR Description: 40S ribosomal protein S7-like
  misc_feature (1)..(137): NCBI GI NO: 20139962 NR Description: 40S ribosomal protein S7
  misc_feature (1)..(137): NCBI GI NO: 15232926 NR Description: putative 40S ribosomal protein
  misc_feature (1)..(137): NCBI GI NO: 15221972 NR Description: 40S ribosomal protein S7 homolog, putative
  misc_feature (1)..(137): NCBI GI NO: 20139964 NR Description: 40S ribosomal protein S7
  misc_feature (1)..(137): NCBI GI NO: 14787424 NR Description: Ribosomal protein S7
  misc_feature (1)..(137): NCBI GI NO: 4588906 NR Description: ribosomal protein S7 [Secale cereale]
  misc_feature (1)..(137): NCBI GI NO: 22671664 NR Description: ribosomal protein S7
  misc_feature (1)..(136): NCBI GI NO: 15294025 NR Description: 40S ribosomal protein S7 [Ictalurus punctatus]
  misc_feature (68)..(68): Xaa is any aa, unknown or other
  misc_feature (112)..(112): Xaa is any aa, unknown or other
MDICGNRKAIVIYVPFRLRKAFRKIHPRLVRELEKKFSGKDVIFVATRRIMRPPKKGAAVQRPRNRTXTSVHEAMLEDVAYPAEIVGKRTRYRLDGSKVMKVYLEAKERNNXEYKLETMVGVYRKLTGKDVTFEYPVEA

SEQ ID NO: 68 - DNA, 834 bp, Brassica napus
  misc_feature (1)..(834): Ceres Seq. ID no. 13574788
ataatttctgcaagatcatcaaaagctgatacaccaagctggttataaactctactttctcagtttcagacatacaaaaacaacagaaaaatgggaacagagatggtcatggttcacgaggttccttttcctccacagatcatcacttccaagcccctctctcttcttggccaaggcatcactgacatagagatccatttccttcaagtgaagttcacggccataggagtttacttagatccttcagatgttaaaacccatcttgacaaatggaaaggcaagaccggaaaggatcttgccggcgatgacgacttcttcgacgccctggcctccggggagattgagaaagttataagggtggtggttataaaggaaataaaaggagctcagtacggagtgcagctagagaattcggtgagagatcgtttggctgctgaggataagtacgaggaggaagaagaaaccgagctcgagaaagttgtgggattttttcagtytaagtacttcaaaactcattccatcatcacttaccgtttytcagccaaagatggaatttgcgagatcggatttgagacggaaggtaaagaagaggagaaactgaaggtagagaatgcgaatgtggtcggtatgatgcagaagtggtacttgtytggaagtcgaggagtttcmccgtccaccatcgtctccctcgccgattctctgtcggcagttttaacctaaaactccttatatagccatctatcatctatggtgtgttttatgttgttgtattatgtcgttcttaagtgagacatcgtgtttggttatctttataaaatctttaatggttgtctt

SEQ ID NO: 69 - protein, 209 aa, Brassica napus
  peptide (1)..(209): Ceres Seq. ID no. 15222606
  misc_feature (1)..(209): Pfam Name: Pfam Description:  Chalcone-flavanone isomerase
  misc_feature (1)..(209): NCBI GI NO: 18414838 NR Description: chalcone-flavanone isomerase family
  misc_feature (5)..(209): NCBI GI NO: 10176739 NR Description: contains similarity to chalcone-flavonone isomerase
  misc_feature (3)..(208): NCBI GI NO: 4126399 NR Description: chalcone isomerase [Citrus sinensis]
  misc_feature (1)..(209): NCBI GI NO: 5921722 NR Description: Chalcone--flavonone isomerase (Chalcone isomerase)
  misc_feature (6)..(208): NCBI GI NO: 3041652 NR Description: CHALCONE--FLAVONONE ISOMERASE (CHALCONE ISOMERASE)
  misc_feature (1)..(208): NCBI GI NO: 20152986 NR Description: chalcone isomerase
  misc_feature (6)..(209): NCBI GI NO: 14582263 NR Description: chalcone isomerase [Glycine max]
  misc_feature (6)..(209): NCBI GI NO: 21327031 NR Description: chalcone isomerase [Saussurea medusa]
  misc_feature (6)..(205): NCBI GI NO: 1705761 NR Description: CHALCONE--FLAVONONE ISOMERASE (CHALCONE ISOMERASE)
  misc_feature (6)..(208): NCBI GI NO: 116134 NR Description: CHALCONE--FLAVONONE ISOMERASE 1
  misc_feature (136)..(136): Xaa is any aa, unknown or other
  misc_feature (149)..(149): Xaa is any aa, unknown or other
  misc_feature (187)..(187): Xaa is any aa, unknown or other
  misc_feature (193)..(193): Xaa is any aa, unknown or other
MGTEMVMVHEVPFPPQIITSKPLSLLGQGITDIEIHFLQVKFTAIGVYLDPSDVKTHLDKWKGKTGKDLAGDDDFFDALASGEIEKVIRVVVIKEIKGAQYGVQLENSVRDRLAAEDKYEEEEETELEKVVGFFQXKYFKTHSIITYRXSAKDGICEIGFETEGKEEEKLKVENANVVGMMQKWYLXGSRGVXPSTIVSLADSLSAVLT

SEQ ID NO: 70 - protein, 205 aa, Brassica napus
  peptide (1)..(205): Ceres Seq. ID no. 15222607
  misc_feature (1)..(205): Pfam Name: Pfam Description:  Chalcone-flavanone isomerase
  misc_feature (1)..(205): NCBI GI NO: 18414838 NR Description: chalcone-flavanone isomerase family
  misc_feature (1)..(205): NCBI GI NO: 10176739 NR Description: contains similarity to chalcone-flavonone isomerase
  misc_feature (1)..(204): NCBI GI NO: 4126399 NR Description: chalcone isomerase [Citrus sinensis]
  misc_feature (1)..(205): NCBI GI NO: 5921722 NR Description: Chalcone--flavonone isomerase (Chalcone isomerase)
  misc_feature (2)..(204): NCBI GI NO: 3041652 NR Description: CHALCONE--FLAVONONE ISOMERASE (CHALCONE ISOMERASE)
  misc_feature (1)..(204): NCBI GI NO: 20152986 NR Description: chalcone isomerase
  misc_feature (2)..(205): NCBI GI NO: 14582263 NR Description: chalcone isomerase [Glycine max]
  misc_feature (2)..(205): NCBI GI NO: 21327031 NR Description: chalcone isomerase [Saussurea medusa]
  misc_feature (2)..(201): NCBI GI NO: 1705761 NR Description: CHALCONE--FLAVONONE ISOMERASE (CHALCONE ISOMERASE)
  misc_feature (2)..(204): NCBI GI NO: 116134 NR Description: CHALCONE--FLAVONONE ISOMERASE 1
  misc_feature (132)..(132): Xaa is any aa, unknown or other
  misc_feature (145)..(145): Xaa is any aa, unknown or other
  misc_feature (183)..(183): Xaa is any aa, unknown or other
  misc_feature (189)..(189): Xaa is any aa, unknown or other
MVMVHEVPFPPQIITSKPLSLLGQGITDIEIHFLQVKFTAIGVYLDPSDVKTHLDKWKGKTGKDLAGDDDFFDALASGEIEKVIRVVVIKEIKGAQYGVQLENSVRDRLAAEDKYEEEEETELEKVVGFFQXKYFKTHSIITYRXSAKDGICEIGFETEGKEEEKLKVENANVVGMMQKWYLXGSRGVXPSTIVSLADSLSAVLT

SEQ ID NO: 71 - protein, 203 aa, Brassica napus
  peptide (1)..(203): Ceres Seq. ID no. 15222608
  misc_feature (1)..(203): Pfam Name: Pfam Description:  Chalcone-flavanone isomerase
  misc_feature (1)..(203): NCBI GI NO: 18414838 NR Description: chalcone-flavanone isomerase family
  misc_feature (1)..(203): NCBI GI NO: 10176739 NR Description: contains similarity to chalcone-flavonone isomerase
  misc_feature (1)..(202): NCBI GI NO: 4126399 NR Description: chalcone isomerase [Citrus sinensis]
  misc_feature (1)..(203): NCBI GI NO: 5921722 NR Description: Chalcone--flavonone isomerase (Chalcone isomerase)
  misc_feature (1)..(202): NCBI GI NO: 3041652 NR Description: CHALCONE--FLAVONONE ISOMERASE (CHALCONE ISOMERASE)
  misc_feature (1)..(202): NCBI GI NO: 20152986 NR Description: chalcone isomerase
  misc_feature (1)..(203): NCBI GI NO: 14582263 NR Description: chalcone isomerase [Glycine max]
  misc_feature (1)..(203): NCBI GI NO: 21327031 NR Description: chalcone isomerase [Saussurea medusa]
  misc_feature (1)..(199): NCBI GI NO: 1705761 NR Description: CHALCONE--FLAVONONE ISOMERASE (CHALCONE ISOMERASE)
  misc_feature (1)..(202): NCBI GI NO: 116134 NR Description: CHALCONE--FLAVONONE ISOMERASE 1
  misc_feature (130)..(130): Xaa is any aa, unknown or other
  misc_feature (143)..(143): Xaa is any aa, unknown or other
  misc_feature (181)..(181): Xaa is any aa, unknown or other
  misc_feature (187)..(187): Xaa is any aa, unknown or other
MVHEVPFPPQIITSKPLSLLGQGITDIEIHFLQVKFTAIGVYLDPSDVKTHLDKWKGKTGKDLAGDDDFFDALASGEIEKVIRVVVIKEIKGAQYGVQLENSVRDRLAAEDKYEEEEETELEKVVGFFQXKYFKTHSIITYRXSAKDGICEIGFETEGKEEEKLKVENANVVGMMQKWYLXGSRGVXPSTIVSLADSLSAVLT

SEQ ID NO: 72 - DNA, 880 bp, Brassica napus
  misc_feature (1)..(880): Ceres Seq. ID no. 12557361
gatcggatctgaaaccgacgaagatcggagatgacggaatcgagcctggatctgcaggaatccggctgggaggagctccggagagaagctcgcaaaatcgaaggcgatctcgacgtcaagctctcctcttacgccaagctcggcgccagattcaatcaaggcggttatggtgttgatggtggatcacctggaggatcatggaagtcgatggagattgagattcagtcttcgcttgagaagctgttggatattaatgattccatgagtagatgtgctgcctctgctgcacctacaacctctgttactcagaagcttgctaggcacagagacattcttcatgaatacactcaggagtttcggaggataaaaggaaacataagctcgatgagggaacatgctgagctcttgagttctgtcagggatgacataagtgaatataaggcttctggtagtatgtcaccaggtgtgcaagtgttaagggagagagcttcaatccatggaagtatatcccatattgatgaagtcattggccaagctcaagcgacaagagcagttcttggctctcaacggtctctgttttctgatgttcaagggaaagtgaaaattctcggagacaagttcccagtgattcgtggcttacttggctcaattagaagaagacgttctcgggacacacttatcctctccgctgtcatcgctgcttgtaccttgtttataatcatctactggctctcgaaataaacagtatgttcatacgcctcaagcccattaagacgatcctctatccgaattttccaagtttaatttttgtattttgccattttgttgagttgtgtttgtagtaatgttacactcttaatcataaaaatcttaaaattcc

SEQ ID NO: 73 - protein, 236 aa, Brassica napus
  peptide (1)..(236): Ceres Seq. ID no. 12557362
  misc_feature (64)..(214): Pfam Name: Pfam Description:  Vesicle transport v-SNARE protein
  misc_feature (1)..(236): NCBI GI NO: 15225431 NR Description: cis-Golgi SNARE protein, putative
  misc_feature (11)..(236): NCBI GI NO: 18394296 NR Description: cis-Golgi SNARE protein, putative
  misc_feature (48)..(232): NCBI GI NO: 28280046 NR Description: Similar to golgi SNAP receptor complex member 1
  misc_feature (48)..(232): NCBI GI NO: 3335132 NR Description: GOS28/P28 protein [Homo sapiens]
  misc_feature (13)..(232): NCBI GI NO: 31207049 NR Description: ENSANGP00000022012 [Anopheles gambiae]
  misc_feature (48)..(232): NCBI GI NO: 11132188 NR Description: 28 kDa Golgi SNARE protein
  misc_feature (48)..(232): NCBI GI NO: 31542904 NR Description: golgi SNAP receptor complex member 1
  misc_feature (48)..(232): NCBI GI NO: 30388705 NR Description: Gosr1 protein [Mus musculus]
  misc_feature (48)..(232): NCBI GI NO: 4758456 NR Description: golgi SNAP receptor complex member 1
  misc_feature (48)..(232): NCBI GI NO: 11132038 NR Description: 28 kDa Golgi SNARE protein
MTESSLDLQESGWEELRREARKIEGDLDVKLSSYAKLGARFNQGGYGVDGGSPGGSWKSMEIEIQSSLEKLLDINDSMSRCAASAAPTTSVTQKLARHRDILHEYTQEFRRIKGNISSMREHAELLSSVRDDISEYKASGSMSPGVQVLRERASIHGSISHIDEVIGQAQATRAVLGSQRSLFSDVQGKVKILGDKFPVIRGLLGSIRRRRSRDTLILSAVIAACTLFIIIYWLSK

SEQ ID NO: 74 - protein, 177 aa, Brassica napus
  peptide (1)..(177): Ceres Seq. ID no. 12557363
  misc_feature (5)..(155): Pfam Name: Pfam Description:  Vesicle transport v-SNARE protein
  misc_feature (1)..(173): NCBI GI NO: 4758456 NR Description: golgi SNAP receptor complex member 1
  misc_feature (1)..(173): NCBI GI NO: 11132038 NR Description: 28 kDa Golgi SNARE protein
  misc_feature (1)..(177): NCBI GI NO: 15225431 NR Description: cis-Golgi SNARE protein, putative
  misc_feature (1)..(177): NCBI GI NO: 18394296 NR Description: cis-Golgi SNARE protein, putative
  misc_feature (1)..(173): NCBI GI NO: 28280046 NR Description: Similar to golgi SNAP receptor complex member 1
  misc_feature (1)..(173): NCBI GI NO: 3335132 NR Description: GOS28/P28 protein [Homo sapiens]
  misc_feature (1)..(173): NCBI GI NO: 31207049 NR Description: ENSANGP00000022012 [Anopheles gambiae]
  misc_feature (1)..(173): NCBI GI NO: 11132188 NR Description: 28 kDa Golgi SNARE protein
  misc_feature (1)..(173): NCBI GI NO: 30388705 NR Description: Gosr1 protein [Mus musculus]
  misc_feature (1)..(173): NCBI GI NO: 31542904 NR Description: golgi SNAP receptor complex member 1
MEIEIQSSLEKLLDINDSMSRCAASAAPTTSVTQKLARHRDILHEYTQEFRRIKGNISSMREHAELLSSVRDDISEYKASGSMSPGVQVLRERASIHGSISHIDEVIGQAQATRAVLGSQRSLFSDVQGKVKILGDKFPVIRGLLGSIRRRRSRDTLILSAVIAACTLFIIIYWLSK

SEQ ID NO: 75 - protein, 159 aa, Brassica napus
  peptide (1)..(159): Ceres Seq. ID no. 12557364
  misc_feature (1)..(137): Pfam Name: Pfam Description:  Vesicle transport v-SNARE protein
  misc_feature (1)..(159): NCBI GI NO: 15225431 NR Description: cis-Golgi SNARE protein, putative
  misc_feature (1)..(159): NCBI GI NO: 18394296 NR Description: cis-Golgi SNARE protein, putative
  misc_feature (1)..(155): NCBI GI NO: 28280046 NR Description: Similar to golgi SNAP receptor complex member 1
  misc_feature (1)..(155): NCBI GI NO: 3335132 NR Description: GOS28/P28 protein [Homo sapiens]
  misc_feature (1)..(155): NCBI GI NO: 31207049 NR Description: ENSANGP00000022012 [Anopheles gambiae]
  misc_feature (1)..(155): NCBI GI NO: 11132188 NR Description: 28 kDa Golgi SNARE protein
  misc_feature (1)..(155): NCBI GI NO: 30388705 NR Description: Gosr1 protein [Mus musculus]
  misc_feature (1)..(155): NCBI GI NO: 31542904 NR Description: golgi SNAP receptor complex member 1
  misc_feature (1)..(155): NCBI GI NO: 4758456 NR Description: golgi SNAP receptor complex member 1
  misc_feature (1)..(155): NCBI GI NO: 11132038 NR Description: 28 kDa Golgi SNARE protein
MSRCAASAAPTTSVTQKLARHRDILHEYTQEFRRIKGNISSMREHAELLSSVRDDISEYKASGSMSPGVQVLRERASIHGSISHIDEVIGQAQATRAVLGSQRSLFSDVQGKVKILGDKFPVIRGLLGSIRRRRSRDTLILSAVIAACTLFIIIYWLSK

SEQ ID NO: 76 - DNA, 731 bp, Brassica napus
  misc_feature (1)..(731): Ceres Seq. ID no. 12557888
  misc_feature (508)..(508): n is a, c, t, g, unknown, or other
agttgtcctcttctctaaaacattttcaacaaagaaaacggtaataagagagaagaggtggtagtaaacaagatcagaatctttaacattttcaaaacaaatggcgaccaaagccatcttcttcttctttgtctcggccgtgtgcctgtcctctctcgccggcgttgccaacgctgacgccgacgactttgacagtttccaaatccagggatcggtttactgtgacacttgccgtgtccaattcgttacccgcctcagccaattccttgaaggtgcgaaagtgaagctagagtgcaggagtagaacaaacggaactgtaacgttgactaaagaagccgtgacggacaaatcaggaagctacaaaatggaagtcaccggtgaccacgaggaggaagtctgcgagctcgttctcctccaatcaccagacagtggttgcagcgacgtcagcacagaggcttacctacgtaacgccgctaaggttagtctgaccgcgaatgacggtatcgtntcacacgagacacgtatcgttaacccccttggtttcatggttaagacgccgttagctgattgtcccgccgcatttaaggagcttggaatcgtccctgacgtcatcttctaaatatgatgacgacttgtaccaattcaagatcgttatttaactgtcatctattatttgctttcttgtatacagaaaacgtaatttgataaaaatacaaaaaagcggcaattct

SEQ ID NO: 77 - protein, 172 aa, Brassica napus
  peptide (1)..(172): Ceres Seq. ID no. 12557889
  misc_feature (35)..(159): Pfam Name: Pfam Description:  Pollen proteins Ole e I family
  misc_feature (1)..(169): NCBI GI NO: 7486300 NR Description: hypothetical protein F28J12
  misc_feature (1)..(172): NCBI GI NO: 18415132 NR Description: similar to Ole e I
  misc_feature (1)..(172): NCBI GI NO: 18422603 NR Description: Ole e I
  misc_feature (1)..(172): NCBI GI NO: 21593871 NR Description: Ole e I (main olive allergen)-like protein
  misc_feature (16)..(172): NCBI GI NO: 9758935 NR Description: Ole e I (main olive allergen)-like protein
  misc_feature (5)..(172): NCBI GI NO: 15218844 NR Description: hypothetical protein; protein id: At1g29140.1
  misc_feature (58)..(172): NCBI GI NO: 28393099 NR Description: unknown protein [Arabidopsis thaliana]
  misc_feature (1)..(166): NCBI GI NO: 22074346 NR Description: Che a 1 allergen precursor [Chenopodium album]
  misc_feature (13)..(169): NCBI GI NO: 28380096 NR Description: Olee1-like protein precursor
  misc_feature (4)..(168): NCBI GI NO: 125887 NR Description: Anther specific LAT52 protein precursor
  misc_feature (136)..(136): Xaa is any aa, unknown or other
MATKAIFFFFVSAVCLSSLAGVANADADDFDSFQIQGSVYCDTCRVQFVTRLSQFLEGAKVKLECRSRTNGTVTLTKEAVTDKSGSYKMEVTGDHEEEVCELVLLQSPDSGCSDVSTEAYLRNAAKVSLTANDGIXSHETRIVNPLGFMVKTPLADCPAAFKELGIVPDVIF

SEQ ID NO: 78 - DNA, 551 bp, Brassica napus
  misc_feature (1)..(551): Ceres Seq. ID no. 12556956
aataatcgtatccggacttcgccgtactccgacactgaaatcgccggcggtaaatcctccgacgctcttcacctccgtgcctagattcttccactcaagctcccctcgtttcagcgacagtagaatcgcgatgaacagcgttgagaaaaccggatcgaacacgggggcgatcgagaatcgggcgagcaggattaaggagaagctggagaaggagctggagccggtggagctagtgatcgaggacgtctcgtaccagcacgcgggtcacgcggggatgaaaggtagaggaaccgacgaagagacgcatttcaatgtgaagatcgtatcgaaaggattcgaagggatgaatctggtgaagaggcacaggctattgtacgatctgctcagggaggagcttgatagtggattgcacgcgctttccatcgtctccaagactccctccgagtccactcgctagatctgttttatgtttctcttatgagagagtttgttttttgatttggaacaaaatgccaacctgctttttaaattaattcgagttctggttttct

SEQ ID NO: 79 - protein, 151 aa, Brassica napus
  peptide (1)..(151): Ceres Seq. ID no. 12556957
  misc_feature (67)..(149): Pfam Name: Pfam Description:  BolA-like protein
  misc_feature (44)..(149): NCBI GI NO: 18405543 NR Description: Expressed protein; protein id: At1g55805
  misc_feature (1)..(122): NCBI GI NO: 8778492 NR Description: F20N2.18 [Arabidopsis thaliana]
  misc_feature (49)..(148): NCBI GI NO: 15236742 NR Description: putative protein; protein id: At4g26500
  misc_feature (49)..(148): NCBI GI NO: 28393578 NR Description: unknown protein [Arabidopsis thaliana]
  misc_feature (1)..(94): NCBI GI NO: 8778331 NR Description: F14J16.3 [Arabidopsis thaliana]
  misc_feature (56)..(149): NCBI GI NO: 27764549 NR Description: unknown [Glycine max]
  misc_feature (60)..(148): NCBI GI NO: 19112580 NR Description: uv-induced protein uvi31
  misc_feature (63)..(151): NCBI GI NO: 15966427 NR Description: PUTATIVE TRANSCRIPTION REGULATOR PROTEIN
  misc_feature (63)..(151): NCBI GI NO: 17937331 NR Description: stress induced morphogen
  misc_feature (64)..(151): NCBI GI NO: 267464 NR Description: Hypothetical 10
IIVSGLRRTPTLKSPAVNPPTLFTSVPRFFHSSSPRFSDSRIAMNSVEKTGSNTGAIENRASRIKEKLEKELEPVELVIEDVSYQHAGHAGMKGRGTDEETHFNVKIVSKGFEGMNLVKRHRLLYDLLREELDSGLHALSIVSKTPSESTR

SEQ ID NO: 80 - protein, 108 aa, Brassica napus
  peptide (1)..(108): Ceres Seq. ID no. 12556958
  misc_feature (24)..(106): Pfam Name: Pfam Description:  BolA-like protein
  misc_feature (1)..(106): NCBI GI NO: 18405543 NR Description: Expressed protein; protein id: At1g55805
  misc_feature (1)..(79): NCBI GI NO: 8778492 NR Description: F20N2.18 [Arabidopsis thaliana]
  misc_feature (6)..(105): NCBI GI NO: 15236742 NR Description: putative protein; protein id: At4g26500
  misc_feature (6)..(105): NCBI GI NO: 28393578 NR Description: unknown protein [Arabidopsis thaliana]
  misc_feature (1)..(51): NCBI GI NO: 8778331 NR Description: F14J16.3 [Arabidopsis thaliana]
  misc_feature (13)..(106): NCBI GI NO: 27764549 NR Description: unknown [Glycine max]
  misc_feature (17)..(105): NCBI GI NO: 19112580 NR Description: uv-induced protein uvi31
  misc_feature (20)..(108): NCBI GI NO: 15966427 NR Description: PUTATIVE TRANSCRIPTION REGULATOR PROTEIN
  misc_feature (20)..(108): NCBI GI NO: 17937331 NR Description: stress induced morphogen
  misc_feature (21)..(108): NCBI GI NO: 267464 NR Description: Hypothetical 10
MNSVEKTGSNTGAIENRASRIKEKLEKELEPVELVIEDVSYQHAGHAGMKGRGTDEETHFNVKIVSKGFEGMNLVKRHRLLYDLLREELDSGLHALSIVSKTPSESTR

SEQ ID NO: 81 - DNA, 663 bp, Brassica napus
  misc_feature (1)..(663): Ceres Seq. ID no. 12557737
  misc_feature (650)..(650): n is a, c, t, g, unknown, or other
  misc_feature (464)..(464): n is a, c, t, g, unknown, or other
caaaaaattttttgcattagggttttcacttcggctgctgctagtgagtgagcaacgaatctttaaccccaaccatggcgacgaaacaagccaaagcgtccgtgcaatgcttcggaaggaagaagacggccgtcgccgtcacccactgcaagcccggctgcggtctgatcaagctcaacggctccccgatcgagctgttcaacccagagatcctccggttcaagatcttcgagccggtgctcctcctcggaaagcaccgtttcgccggcgtcgacatgaggatccgcgtcaacggcggtggtcacacttctcaggtctacgcgattcgtcagagcatagccaaggcgctcgtggctttctaccagaagtatgttgatgagcagtcgaagaaggaggtgaaggatattttgataaggtacgataggactctgctcgtggcggatccgaggaggtgcgagccgaanaagtttggtgggcgtggtgctcgttctcgtttccagaagagttaccgttaaaaacataatctggtttgtgttttttttttctgatctcaaccgttttgagacattatttatctttttgagttttgtctttttggttattggataatgttttgacaatgtcttgatcgtttattgttgaagaacttntcaagttttagtt

SEQ ID NO: 82 - protein, 146 aa, Brassica napus
  peptide (1)..(146): Ceres Seq. ID no. 12557738
  misc_feature (14)..(146): Pfam Name: Pfam Description:  Ribosomal protein S9/S16
  misc_feature (1)..(146): NCBI GI NO: 15238809 NR Description: 40S RIBOSOMAL PROTEIN S16; protein id: At5g18380
  misc_feature (1)..(146): NCBI GI NO: 15226676 NR Description: 40S ribosomal protein S16; protein id: At2g09990
  misc_feature (1)..(146): NCBI GI NO: 15229252 NR Description: putative 40S ribosomal protein S16
  misc_feature (1)..(146): NCBI GI NO: 3122800 NR Description: 40S RIBOSOMAL PROTEIN S16
  misc_feature (9)..(146): NCBI GI NO: 6984222 NR Description: 40S ribosomal protein S16 [Euphorbia esula]
  misc_feature (1)..(146): NCBI GI NO: 1173209 NR Description: 40S RIBOSOMAL PROTEIN S16
  misc_feature (6)..(146): NCBI GI NO: 17369864 NR Description: 40S ribosomal protein S16
  misc_feature (3)..(146): NCBI GI NO: 1172818 NR Description: 40S RIBOSOMAL PROTEIN S16
  misc_feature (1)..(146): NCBI GI NO: 4506691 NR Description: ribosomal protein S16; 40S ribosomal protein S16
  misc_feature (1)..(146): NCBI GI NO: 39850096 NR Description: Unknown (protein for IMAGE:6887619)
  misc_feature (130)..(130): Xaa is any aa, unknown or other
MATKQAKASVQCFGRKKTAVAVTHCKPGCGLIKLNGSPIELFNPEILRFKIFEPVLLLGKHRFAGVDMRIRVNGGGHTSQVYAIRQSIAKALVAFYQKYVDEQSKKEVKDILIRYDRTLLVADPRRCEPXKFGGRGARSRFQKSYR

SEQ ID NO: 83 - protein, 124 aa, Brassica napus
  peptide (1)..(124): Ceres Seq. ID no. 12557739
KKFFALGFSLRLLLVSEQRIFNPNHGDETSQSVRAMLRKEEDGRRRHPLQARLRSDQAQRLPDRAVQPRDPPVQDLRAGAPPRKAPFRRRRHEDPRQRRWSHFSGLRDSSEHSQGARGFLPEVC

SEQ ID NO: 84 - protein, 89 aa, Brassica napus
  peptide (1)..(89): Ceres Seq. ID no. 12557740
MLRKEEDGRRRHPLQARLRSDQAQRLPDRAVQPRDPPVQDLRAGAPPRKAPFRRRRHEDPRQRRWSHFSGLRDSSEHSQGARGFLPEVC

SEQ ID NO: 85 - DNA, 852 bp, Brassica napus
  misc_feature (1)..(852): Ceres Seq. ID no. 13504265
atcatcatctctctatcaacaatagcgattcgttccgtagccagcagaaaaaccctagcgggcctaaaggagacatcttcgaggcttcttggtctccgatcaatccagaccttcacgcttcctgatctcccctatgattacagcgccttggagccggcgatcagcggcgagatcatgcagatccatcaccagaagcatcaccaggcgtacgtcactaattacaacaatgccctcgagcagctggatcaggccgtcaacaagggagacgcttccggcgtcgttaagttgcagagcgccatcaagttcaacggcggaggtcatgtgaaccactctattttctggaagaatcttgctcctgtcaaggaaggtgggggagagccaccaaagggagctcttggctacgccattgacactcattttggctcccttgaaggtttggtgaagaagatgagtgctgaaggtgctgctctgcaagggtcaggatgggtgtggctcggtttagacaaagagcttaagaagcttgtggttgacacaaccgccaatcaggatccacttgtgacaaaaggaggaagcttggttcctctggtgggtattgatgtttgggagcacgcctactatttacagtacaagaatgtgaggccggagtatttgaagaacgtgtggaaagtggtcaactggaaatatgcaagcgaagtttataaggagtgcaagtgagttcgttacataaagagaggaaccagttcccagctcggctttgtttttataagtttgtttgaaacaaacgtataatgtctctttggtctttgagttagctcgaaatgaccatgtggttgcaataatacacgttgtttt

SEQ ID NO: 86 - protein, 237 aa, Brassica napus
  peptide (1)..(237): Ceres Seq. ID no. 13504266
  misc_feature (8)..(237): NCBI GI NO: 7433350 NR Description: superoxide dismutase (EC 1.15.1.1) (Mn) - radish
  misc_feature (8)..(237): NCBI GI NO: 15778185 NR Description: superoxide dismutase [Raphanus sativus]
  misc_feature (8)..(235): NCBI GI NO: 15228407 NR Description: manganese superoxide dismutase (MSD1)
  misc_feature (8)..(235): NCBI GI NO: 21553457 NR Description: putative (Mn) superoxide dismutase
  misc_feature (8)..(235): NCBI GI NO: 11256334 NR Description: superoxide dismutase (EC 1.15.1.1) (Mn)
  misc_feature (8)..(236): NCBI GI NO: 134672 NR Description: Superoxide dismutase [Mn], mitochondrial precursor
  misc_feature (8)..(236): NCBI GI NO: 464775 NR Description: Superoxide dismutase [Mn], mitochondrial precursor
  misc_feature (9)..(236): NCBI GI NO: 9929159 NR Description: manganese superoxide dismutase [Digitalis lanata]
  misc_feature (8)..(236): NCBI GI NO: 3915002 NR Description: Superoxide dismutase [Mn], mitochondrial precursor
  misc_feature (19)..(227): NCBI GI NO: 30841303 NR Description: manganese-containing superoxide dismutase
IIISLSTIAIRSVASRKTLAGLKETSSRLLGLRSIQTFTLPDLPYDYSALEPAISGEIMQIHHQKHHQAYVTNYNNALEQLDQAVNKGDASGVVKLQSAIKFNGGGHVNHSIFWKNLAPVKEGGGEPPKGALGYAIDTHFGSLEGLVKKMSAEGAALQGSGWVWLGLDKELKKLVVDTTANQDPLVTKGGSLVPLVGIDVWEHAYYLQYKNVRPEYLKNVWKVVNWKYASEVYKECK

SEQ ID NO: 87 - protein, 179 aa, Brassica napus
  peptide (1)..(179): Ceres Seq. ID no. 13504267
  misc_feature (1)..(179): NCBI GI NO: 7433350 NR Description: superoxide dismutase (EC 1.15.1.1) (Mn) - radish
  misc_feature (1)..(179): NCBI GI NO: 15778185 NR Description: superoxide dismutase [Raphanus sativus]
  misc_feature (1)..(177): NCBI GI NO: 15228407 NR Description: manganese superoxide dismutase (MSD1)
  misc_feature (1)..(177): NCBI GI NO: 21553457 NR Description: putative (Mn) superoxide dismutase
  misc_feature (1)..(177): NCBI GI NO: 11256334 NR Description: superoxide dismutase (EC 1.15.1.1) (Mn)
  misc_feature (1)..(178): NCBI GI NO: 134672 NR Description: Superoxide dismutase [Mn], mitochondrial precursor
  misc_feature (1)..(178): NCBI GI NO: 464775 NR Description: Superoxide dismutase [Mn], mitochondrial precursor
  misc_feature (1)..(178): NCBI GI NO: 9929159 NR Description: manganese superoxide dismutase [Digitalis lanata]
  misc_feature (1)..(178): NCBI GI NO: 3915002 NR Description: Superoxide dismutase [Mn], mitochondrial precursor
  misc_feature (1)..(169): NCBI GI NO: 30841303 NR Description: manganese-containing superoxide dismutase
MQIHHQKHHQAYVTNYNNALEQLDQAVNKGDASGVVKLQSAIKFNGGGHVNHSIFWKNLAPVKEGGGEPPKGALGYAIDTHFGSLEGLVKKMSAEGAALQGSGWVWLGLDKELKKLVVDTTANQDPLVTKGGSLVPLVGIDVWEHAYYLQYKNVRPEYLKNVWKVVNWKYASEVYKECK

SEQ ID NO: 88 - DNA, 1091 bp, Brassica napus
  misc_feature (1)..(1091): Ceres Seq. ID no. 12474685
  misc_feature (621)..(621): n is a, c, t, g, unknown, or other
  misc_feature (762)..(762): n is a, c, t, g, unknown, or other
gcacttgaaccgacactatacaagcgatcttaatctgaagcctctctaataatggccgaacgcactcagatacttcgagctcaacaccggcgctaagatcccatcggtgggtctcggaacatggcaagcctctccaggacttgtaggtgatgctgtcgccgccgctgttaagatcggatatcgtcatattgattgtgctcagatctacggcaacgagaaagagatagggacagttttgaaaaaattgtttgaagacaatgtagtgaaacgcgaggagttgttcatcacttccaaactatggtgtactgatcatgaccctcaggatgtgccagaggcactaaagagaaccctacaggatctacagcttgactatgtcgatctctatttgatgcactgacctgtaaggatgaagaaaggttctgttggagctaagccagagaaccttttacctgtagatattcctagcacatggaaagcaatggaagcactccatgattcgggcaaggcacgagccataggtgtaagcaatttctcaaccaagaagctagctgatcttatggagttagctcgtgttcctcctgccgttgttcaggtcgaatgtcatccttcttggcgacagantaagctacgagagttctgtaagtccaaaggacttcacctcaccgcatactcgcctttgggttctccaggaacaacgtggctaaagagtgatgttttgaagaaccctatactaaatactgttgctaagaaactcgggaagtntgctgcgcaagttgcgcttcgctggggactccaaatgggtaacagtgtacttcccaagagtactaatgaaggaagaattagagagaactttgaagttttcgactggtcaatacccgatgacttgttttccaagtttcctgagattgaacaggctaggttattgactgctcccttctttgttcatgagacattgagcccttacaagtctctcgaagagttgtgggatggcgaaatatgatatttcaactgatccaattgttttgtcaataataggaggttactctctgcctgttgaacttgacattttatctataaaaatgatgcctctc

SEQ ID NO: 89 - protein, 197 aa, Brassica napus
  peptide (1)..(197): Ceres Seq. ID no. 12474686
  misc_feature (1)..(197): NCBI GI NO: 30687247 NR Description: aldo/keto reductase family [Arabidopsis thaliana]
  misc_feature (1)..(197): NCBI GI NO: 28393400 NR Description: putative aldo/keto reductase
  misc_feature (1)..(171): NCBI GI NO: 7431114 NR Description: aldehyde dehydrogenase homolog At2g37770
  misc_feature (1)..(197): NCBI GI NO: 30687261 NR Description: aldo/keto reductase family [Arabidopsis thaliana]
  misc_feature (1)..(170): NCBI GI NO: 25283479 NR Description: probable alcohol dehydrogenase
  misc_feature (169)..(197): NCBI GI NO: 25283479 NR Description: probable alcohol dehydrogenase
  misc_feature (1)..(197): NCBI GI NO: 15232354 NR Description: aldo/keto reductase family; protein id: At3g53880
  misc_feature (1)..(197): NCBI GI NO: 13160397 NR Description: aldose reductase [Digitalis purpurea]
  misc_feature (1)..(197): NCBI GI NO: 13160399 NR Description: aldose reductase [Digitalis purpurea]
  misc_feature (1)..(197): NCBI GI NO: 7431112 NR Description: abscisic acid activated protein - alfalfa
  misc_feature (72)..(72): Xaa is any aa, unknown or other
  misc_feature (119)..(119): Xaa is any aa, unknown or other
MKKGSVGAKPENLLPVDIPSTWKAMEALHDSGKARAIGVSNFSTKKLADLMELARVPPAVVQVECHPSWRQXKLREFCKSKGLHLTAYSPLGSPGTTWLKSDVLKNPILNTVAKKLGKXAAQVALRWGLQMGNSVLPKSTNEGRIRENFEVFDWSIPDDLFSKFPEIEQARLLTAPFFVHETLSPYKSLEELWDGEI

SEQ ID NO: 90 - protein, 173 aa, Brassica napus
  peptide (1)..(173): Ceres Seq. ID no. 12474687
  misc_feature (1)..(147): NCBI GI NO: 7431114 NR Description: aldehyde dehydrogenase homolog At2g37770
  misc_feature (1)..(173): NCBI GI NO: 30687261 NR Description: aldo/keto reductase family [Arabidopsis thaliana]
  misc_feature (1)..(146): NCBI GI NO: 25283479 NR Description: probable alcohol dehydrogenase
  misc_feature (145)..(173): NCBI GI NO: 25283479 NR Description: probable alcohol dehydrogenase
  misc_feature (1)..(173): NCBI GI NO: 15232354 NR Description: aldo/keto reductase family; protein id: At3g53880
  misc_feature (1)..(173): NCBI GI NO: 13160397 NR Description: aldose reductase [Digitalis purpurea]
  misc_feature (1)..(173): NCBI GI NO: 13160399 NR Description: aldose reductase [Digitalis purpurea]
  misc_feature (1)..(173): NCBI GI NO: 7431112 NR Description: abscisic acid activated protein - alfalfa
  misc_feature (1)..(173): NCBI GI NO: 30687247 NR Description: aldo/keto reductase family [Arabidopsis thaliana]
  misc_feature (1)..(173): NCBI GI NO: 28393400 NR Description: putative aldo/keto reductase
  misc_feature (48)..(48): Xaa is any aa, unknown or other
  misc_feature (95)..(95): Xaa is any aa, unknown or other
MEALHDSGKARAIGVSNFSTKKLADLMELARVPPAVVQVECHPSWRQXKLREFCKSKGLHLTAYSPLGSPGTTWLKSDVLKNPILNTVAKKLGKXAAQVALRWGLQMGNSVLPKSTNEGRIRENFEVFDWSIPDDLFSKFPEIEQARLLTAPFFVHETLSPYKSLEELWDGEI

SEQ ID NO: 91 - protein, 147 aa, Brassica napus
  peptide (1)..(147): Ceres Seq. ID no. 12474688
  misc_feature (1)..(147): NCBI GI NO: 30687247 NR Description: aldo/keto reductase family [Arabidopsis thaliana]
  misc_feature (1)..(147): NCBI GI NO: 28393400 NR Description: putative aldo/keto reductase
  misc_feature (1)..(121): NCBI GI NO: 7431114 NR Description: aldehyde dehydrogenase homolog At2g37770
  misc_feature (1)..(147): NCBI GI NO: 30687261 NR Description: aldo/keto reductase family [Arabidopsis thaliana]
  misc_feature (1)..(120): NCBI GI NO: 25283479 NR Description: probable alcohol dehydrogenase
  misc_feature (119)..(147): NCBI GI NO: 25283479 NR Description: probable alcohol dehydrogenase
  misc_feature (1)..(147): NCBI GI NO: 15232354 NR Description: aldo/keto reductase family; protein id: At3g53880
  misc_feature (1)..(147): NCBI GI NO: 13160397 NR Description: aldose reductase [Digitalis purpurea]
  misc_feature (1)..(147): NCBI GI NO: 13160399 NR Description: aldose reductase [Digitalis purpurea]
  misc_feature (1)..(147): NCBI GI NO: 7431112 NR Description: abscisic acid activated protein - alfalfa
  misc_feature (22)..(22): Xaa is any aa, unknown or other
  misc_feature (69)..(69): Xaa is any aa, unknown or other
MELARVPPAVVQVECHPSWRQXKLREFCKSKGLHLTAYSPLGSPGTTWLKSDVLKNPILNTVAKKLGKXAAQVALRWGLQMGNSVLPKSTNEGRIRENFEVFDWSIPDDLFSKFPEIEQARLLTAPFFVHETLSPYKSLEELWDGEI

SEQ ID NO: 92 - DNA, 1022 bp, Brassica napus
  misc_feature (1)..(1022): Ceres Seq. ID no. 12474640
  misc_feature (876)..(876): n is a, c, t, g, unknown, or other
  misc_feature (709)..(709): n is a, c, t, g, unknown, or other
  misc_feature (778)..(778): n is a, c, t, g, unknown, or other
  misc_feature (720)..(720): n is a, c, t, g, unknown, or other
aaaaggttcttcctcctctcacacgctctgtcttcttcctcctcctccttggttagattagatatttagtagggctttgaagctactaaactcgagcaaaaaaaaaaatggagattgcggagcgtagggacgaggggatgagagaatctggaaacatggagaacataaagtccgactctttttccgatgaacgctactctcgcgacctcaaagctggtctccatcctctacggtacaagtttgcgatttggtacacacgtcgaacaccaggggtcaggagccagacatcttatgaggataacattaagaagattgttgatttcagcactgttgaagggttttgggcatgctactgtcaccttgctcgttcttctctcttgcctagtcctacagatcttcatttcttcaaggatggcattcgccccttgtgggaggattctgccaactgcaatggaggaaagtggatcgtacgtttctccaaagttgtatccgctcgcttctgggaggatctgcttcttgccttggtaggcgaccagcttgatgatgctgacaatatctgtggggcagtactgagtgtccgcttcaacgaggacatcattagtgtgtggaatcgcaatgcttctgatcatcaggcagtgatgggtttgagagactcaatcaagcggcacttgaagctgcctcattcttatgttatggaatacaagccccncgatgcttctnttcgcgacaactcctcttacaggaacacatggatgagaggatagctaggttcaaaatntgacacgtgatgtggagaaagatttgggtagctctcttgcaacctgggaagatatatggactcaaccccgttttcggtagtatcaatggcttacgatntaagcattgaaaatcctctcgacttgtgtaatcatatcgttttcttgtttctagatattgttgttaccttcaatggtttgcactttgcagtgttgtttgaaactataatgattcgaataaaacttgagctcacgtactggttttac

SEQ ID NO: 93 - protein, 218 aa, Brassica napus
  peptide (1)..(218): Ceres Seq. ID no. 12474641
  misc_feature (1)..(218): NCBI GI NO: 25453555 NR Description: eukaryotic cap-binding protein
  misc_feature (1)..(218): NCBI GI NO: 15238740 NR Description: eukaryotic cap-binding protein (gb|AAC17220
  misc_feature (5)..(214): NCBI GI NO: 13624327 NR Description: RIKEN cDNA 2700069E09
  misc_feature (36)..(214): NCBI GI NO: 37590370 NR Description: Unknown (protein for MGC:73242) [Danio rerio]
  misc_feature (5)..(199): NCBI GI NO: 4757702 NR Description: eukaryotic translation initiation factor 4E-like 3
  misc_feature (5)..(199): NCBI GI NO: 12653185 NR Description: EIF4EL3 protein [Homo sapiens]
  misc_feature (12)..(199): NCBI GI NO: 3329384 NR Description: translation initiation factor 4e [Homo sapiens]
  misc_feature (5)..(199): NCBI GI NO: 29144998 NR Description: Similar to RIKEN cDNA 2700069E09 gene
  misc_feature (5)..(199): NCBI GI NO: 29839292 NR Description: Eukaryotic translation initiation factor 4E type 3
  misc_feature (39)..(199): NCBI GI NO: 34877568 NR Description: similar to eukaryotic translation initiation factor 4E like3
  misc_feature (201)..(201): Xaa is any aa, unknown or other
  misc_feature (205)..(205): Xaa is any aa, unknown or other
MEIAERRDEGMRESGNMENIKSDSFSDERYSRDLKAGLHPLRYKFAIWYTRRTPGVRSQTSYEDNIKKIVDFSTVEGFWACYCHLARSSLLPSPTDLHFFKDGIRPLWEDSANCNGGKWIVRFSKVVSARFWEDLLLALVGDQLDDADNICGAVLSVRFNEDIISVWNRNASDHQAVMGLRDSIKRHLKLPHSYVMEYKPXDASXRDNSSYRNTWMRG

SEQ ID NO: 94 - protein, 208 aa, Brassica napus
  peptide (1)..(208): Ceres Seq. ID no. 12474642
  misc_feature (1)..(208): NCBI GI NO: 25453555 NR Description: eukaryotic cap-binding protein
  misc_feature (1)..(208): NCBI GI NO: 15238740 NR Description: eukaryotic cap-binding protein (gb|AAC17220
  misc_feature (1)..(204): NCBI GI NO: 13624327 NR Description: RIKEN cDNA 2700069E09
  misc_feature (26)..(204): NCBI GI NO: 37590370 NR Description: Unknown (protein for MGC:73242) [Danio rerio]
  misc_feature (1)..(189): NCBI GI NO: 4757702 NR Description: eukaryotic translation initiation factor 4E-like 3
  misc_feature (1)..(189): NCBI GI NO: 12653185 NR Description: EIF4EL3 protein [Homo sapiens]
  misc_feature (2)..(189): NCBI GI NO: 3329384 NR Description: translation initiation factor 4e [Homo sapiens]
  misc_feature (1)..(189): NCBI GI NO: 29144998 NR Description: Similar to RIKEN cDNA 2700069E09 gene
  misc_feature (1)..(189): NCBI GI NO: 29839292 NR Description: Eukaryotic translation initiation factor 4E type 3
  misc_feature (29)..(189): NCBI GI NO: 34877568 NR Description: similar to eukaryotic translation initiation factor 4E like3
  misc_feature (191)..(191): Xaa is any aa, unknown or other
  misc_feature (195)..(195): Xaa is any aa, unknown or other
MRESGNMENIKSDSFSDERYSRDLKAGLHPLRYKFAIWYTRRTPGVRSQTSYEDNIKKIVDFSTVEGFWACYCHLARSSLLPSPTDLHFFKDGIRPLWEDSANCNGGKWIVRFSKVVSARFWEDLLLALVGDQLDDADNICGAVLSVRFNEDIISVWNRNASDHQAVMGLRDSIKRHLKLPHSYVMEYKPXDASXRDNSSYRNTWMRG

SEQ ID NO: 95 - protein, 202 aa, Brassica napus
  peptide (1)..(202): Ceres Seq. ID no. 12474643
  misc_feature (1)..(202): NCBI GI NO: 25453555 NR Description: eukaryotic cap-binding protein
  misc_feature (1)..(202): NCBI GI NO: 15238740 NR Description: eukaryotic cap-binding protein (gb|AAC17220
  misc_feature (1)..(198): NCBI GI NO: 13624327 NR Description: RIKEN cDNA 2700069E09
  misc_feature (20)..(198): NCBI GI NO: 37590370 NR Description: Unknown (protein for MGC:73242) [Danio rerio]
  misc_feature (1)..(183): NCBI GI NO: 4757702 NR Description: eukaryotic translation initiation factor 4E-like 3
  misc_feature (1)..(183): NCBI GI NO: 12653185 NR Description: EIF4EL3 protein [Homo sapiens]
  misc_feature (1)..(183): NCBI GI NO: 3329384 NR Description: translation initiation factor 4e [Homo sapiens]
  misc_feature (1)..(183): NCBI GI NO: 29144998 NR Description: Similar to RIKEN cDNA 2700069E09 gene
  misc_feature (1)..(183): NCBI GI NO: 29839292 NR Description: Eukaryotic translation initiation factor 4E type 3
  misc_feature (23)..(183): NCBI GI NO: 34877568 NR Description: similar to eukaryotic translation initiation factor 4E like3
  misc_feature (185)..(185): Xaa is any aa, unknown or other
  misc_feature (189)..(189): Xaa is any aa, unknown or other
MENIKSDSFSDERYSRDLKAGLHPLRYKFAIWYTRRTPGVRSQTSYEDNIKKIVDFSTVEGFWACYCHLARSSLLPSPTDLHFFKDGIRPLWEDSANCNGGKWIVRFSKVVSARFWEDLLLALVGDQLDDADNICGAVLSVRFNEDIISVWNRNASDHQAVMGLRDSIKRHLKLPHSYVMEYKPXDASXRDNSSYRNTWMRG

SEQ ID NO: 96 - DNA, 1008 bp, Brassica napus
  misc_feature (1)..(1008): Ceres Seq. ID no. 12557432
  misc_feature (602)..(602): n is a, c, t, g, unknown, or other
  misc_feature (525)..(525): n is a, c, t, g, unknown, or other
  misc_feature (647)..(647): n is a, c, t, g, unknown, or other
aagcaaaagaaaagtttctgagctgctctcctctgtataaacccttttccaaacaagagcagcagagaagaagaagaagaaagctaaaatgttcaggaatcagtacgacacagatgtgacgacatggagcccaacaggccgtctcttccaagtggagtacgccatggaagcagtcaagcaaggctccgccgcaatcgggctcagatctcgctcccatgtcgtcctcgcctgcgtcaacaaggcccaatccgagctctcctctcaccagaagaagatcttcaaagtcgatgaccatataggcgtcgcgatcgctgggctcaccgccgatggccgtgtcctctctcgttatatgagatcggaggctatcaaccactccttcacctatgagtctccgctccccgttggacgcctcgtcgttcacctcgctgataaggcccaggtctgtacccaacgatcatggaagcggccatatggcgtgggtcttttggtaggtggactggatgagtctggagcccatctttactncaactgcccaagcggaaactactttgagtatcaagctttcgctattgggtcccgttcacaagccgcaaagacctatntggagcgtaggtttgagagctttggggattcttccagagaagatntgataaaagatgctattctggctgtgagggagacactgcaaggagaaacacttaagagttctctctgcacggtctctgttctaggtgtcggtgagccgttccacttcttggaccaggaaactatacagaaagtgattgacacatttgagaaagtaccagaggatgaggctggtgaggctggtgaggctggtgagggtgaggctgaagctgctgctgctgctgcaccagcagaacagggtggtggtggtgcaggtgaccaagacgtggctccgatggaaatgtaaggcgtgtgcaacgctagaactgttttaattgaatgtttgttggatttactttggataatttcatatgaatcatttgc

SEQ ID NO: 97 - protein, 280 aa, Brassica napus
  peptide (1)..(280): Ceres Seq. ID no. 12557433
  misc_feature (29)..(214): Pfam Name: Pfam Description:  Proteasome A-type and B-type
  misc_feature (1)..(280): NCBI GI NO: 25290066 NR Description: C 3
  misc_feature (1)..(280): NCBI GI NO: 21537234 NR Description: 20S proteasome subunit PAF1 [Arabidopsis thaliana]
  misc_feature (1)..(280): NCBI GI NO: 15239061 NR Description: 20S proteasome alpha subunit F1
  misc_feature (1)..(280): NCBI GI NO: 15220151 NR Description: 20S proteasome alpha subunit F2
  misc_feature (11)..(280): NCBI GI NO: 2511586 NR Description: multicatalytic endopeptidase
  misc_feature (1)..(280): NCBI GI NO: 22947842 NR Description: 20S proteasome alpha 6 subunit
  misc_feature (1)..(264): NCBI GI NO: 1709758 NR Description: Proteasome subunit alpha type 1
  misc_feature (6)..(162): NCBI GI NO: 14594923 NR Description: putative alpha6 proteasome subunit
  misc_feature (1)..(236): NCBI GI NO: 12229911 NR Description: Proteasome subunit alpha type 1
  misc_feature (1)..(257): NCBI GI NO: 30584967 NR Description: Homo sapiens proteasome
  misc_feature (146)..(146): Xaa is any aa, unknown or other
  misc_feature (172)..(172): Xaa is any aa, unknown or other
  misc_feature (187)..(187): Xaa is any aa, unknown or other
MFRNQYDTDVTTWSPTGRLFQVEYAMEAVKQGSAAIGLRSRSHVVLACVNKAQSELSSHQKKIFKVDDHIGVAIAGLTADGRVLSRYMRSEAINHSFTYESPLPVGRLVVHLADKAQVCTQRSWKRPYGVGLLVGGLDESGAHLYXNCPSGNYFEYQAFAIGSRSQAAKTYXERRFESFGDSSREDXIKDAILAVRETLQGETLKSSLCTVSVLGVGEPFHFLDQETIQKVIDTFEKVPEDEAGEAGEAGEGEAEAAAAAAPAEQGGGGAGDQDVAPMEM

SEQ ID NO: 98 - protein, 255 aa, Brassica napus
  peptide (1)..(255): Ceres Seq. ID no. 12557434
  misc_feature (4)..(189): Pfam Name: Pfam Description:  Proteasome A-type and B-type
  misc_feature (1)..(255): NCBI GI NO: 25290066 NR Description: C 3
  misc_feature (1)..(255): NCBI GI NO: 21537234 NR Description: 20S proteasome subunit PAF1 [Arabidopsis thaliana]
  misc_feature (1)..(255): NCBI GI NO: 15239061 NR Description: 20S proteasome alpha subunit F1
  misc_feature (1)..(255): NCBI GI NO: 15220151 NR Description: 20S proteasome alpha subunit F2
  misc_feature (1)..(255): NCBI GI NO: 2511586 NR Description: multicatalytic endopeptidase
  misc_feature (1)..(255): NCBI GI NO: 22947842 NR Description: 20S proteasome alpha 6 subunit
  misc_feature (1)..(239): NCBI GI NO: 1709758 NR Description: Proteasome subunit alpha type 1
  misc_feature (1)..(137): NCBI GI NO: 14594923 NR Description: putative alpha6 proteasome subunit
  misc_feature (1)..(211): NCBI GI NO: 12229911 NR Description: Proteasome subunit alpha type 1
  misc_feature (1)..(232): NCBI GI NO: 30584967 NR Description: Homo sapiens proteasome
  misc_feature (121)..(121): Xaa is any aa, unknown or other
  misc_feature (147)..(147): Xaa is any aa, unknown or other
  misc_feature (162)..(162): Xaa is any aa, unknown or other
MEAVKQGSAAIGLRSRSHVVLACVNKAQSELSSHQKKIFKVDDHIGVAIAGLTADGRVLSRYMRSEAINHSFTYESPLPVGRLVVHLADKAQVCTQRSWKRPYGVGLLVGGLDESGAHLYXNCPSGNYFEYQAFAIGSRSQAAKTYXERRFESFGDSSREDXIKDAILAVRETLQGETLKSSLCTVSVLGVGEPFHFLDQETIQKVIDTFEKVPEDEAGEAGEAGEGEAEAAAAAAPAEQGGGGAGDQDVAPMEM

SEQ ID NO: 99 - protein, 193 aa, Brassica napus
  peptide (1)..(193): Ceres Seq. ID no. 12557435
  misc_feature (1)..(127): Pfam Name: Pfam Description:  Proteasome A-type and B-type
  misc_feature (1)..(193): NCBI GI NO: 25290066 NR Description: C 3
  misc_feature (1)..(193): NCBI GI NO: 21537234 NR Description: 20S proteasome subunit PAF1 [Arabidopsis thaliana]
  misc_feature (1)..(193): NCBI GI NO: 15239061 NR Description: 20S proteasome alpha subunit F1
  misc_feature (1)..(193): NCBI GI NO: 15220151 NR Description: 20S proteasome alpha subunit F2
  misc_feature (1)..(193): NCBI GI NO: 2511586 NR Description: multicatalytic endopeptidase
  misc_feature (1)..(193): NCBI GI NO: 22947842 NR Description: 20S proteasome alpha 6 subunit
  misc_feature (1)..(177): NCBI GI NO: 1709758 NR Description: Proteasome subunit alpha type 1
  misc_feature (1)..(75): NCBI GI NO: 14594923 NR Description: putative alpha6 proteasome subunit
  misc_feature (1)..(149): NCBI GI NO: 12229911 NR Description: Proteasome subunit alpha type 1
  misc_feature (1)..(170): NCBI GI NO: 30584967 NR Description: Homo sapiens proteasome
  misc_feature (59)..(59): Xaa is any aa, unknown or other
  misc_feature (85)..(85): Xaa is any aa, unknown or other
  misc_feature (100)..(100): Xaa is any aa, unknown or other
MRSEAINHSFTYESPLPVGRLVVHLADKAQVCTQRSWKRPYGVGLLVGGLDESGAHLYXNCPSGNYFEYQAFAIGSRSQAAKTYXERRFESFGDSSREDXIKDAILAVRETLQGETLKSSLCTVSVLGVGEPFHFLDQETIQKVIDTFEKVPEDEAGEAGEAGEGEAEAAAAAAPAEQGGGGAGDQDVAPMEM

SEQ ID NO: 100 - DNA, 960 bp, Brassica napus
  misc_feature (1)..(960): Ceres Seq. ID no. 12474478
  misc_feature (887)..(887): n is a, c, t, g, unknown, or other
  misc_feature (694)..(694): n is a, c, t, g, unknown, or other
  misc_feature (840)..(840): n is a, c, t, g, unknown, or other
  misc_feature (469)..(469): n is a, c, t, g, unknown, or other
  misc_feature (430)..(430): n is a, c, t, g, unknown, or other
attaacttttcaactaactccagcttttgctctagattttttttttatgtatctggaacattccttaatcctccctctctataaatccctgaacccttttgctgctactctcactcatagctgttaaaggaacctaaaatggcgaaagttttagatctttctctggttctctttgttctgtgtgtgtccactgcagcaatagccatggcaagaaaccttggagaggaatctagtgatgatactgagttcatcaaatcctcttgtgagatagcaacgtacccggaactatgttttcagtctctgtcttcttacgcaagcgagatcaagaagcggccacttcagctcgccgagacagcgcttgccgttagcatggcccgaacgaagtcagccaaaacatatatctcggacatgactgactacaaaggaatcncaaagaggcagcacgaggccgtgttggactgtgttgaanagatgggagatactgttgataggttgagcaagtcgctgaaggagttgaagaatctggaggaaggagagagcaaagaagacttctggttctgtttgagcaatgtccggacgtggacaagcgcggcgctgacagatgagaccacgtgtcttgatgggtttggagggaaaggcatggatggggagctgaaaagcttagtcaaagcacacattgtgcgtgtggcgcaanatacgagtaatgccttggctttgatcaatgtctatgcttccaagcattgaatatattgcaacggtttggtcatgaggacttgagctttttatacttttggatttggtttgtattgtgttttcaagaaatgtgttttggtttggttntgagtcatatcagtttctcttgccacattgttatatcatctacggtntatatagtttgaagcttttcattttgatgtttgattagtgatatagttttgtaagccatgaagagtattttgc

SEQ ID NO: 101 - protein, 201 aa, Brassica napus
  peptide (1)..(201): Ceres Seq. ID no. 12474479
  misc_feature (5)..(200): NCBI GI NO: 18407657 NR Description: expressed protein; protein id: At1g62770
  misc_feature (5)..(200): NCBI GI NO: 21618013 NR Description: putative ripening-related protein
  misc_feature (1)..(201): NCBI GI NO: 15234982 NR Description: putative protein; protein id: At4g25260
  misc_feature (36)..(201): NCBI GI NO: 112717 NR Description: 21 KD PROTEIN PRECURSOR (1.2 PROTEIN)
  misc_feature (10)..(201): NCBI GI NO: 7406663 NR Description: putative ripening-related protein [Vitis vinifera]
  misc_feature (1)..(201): NCBI GI NO: 15241799 NR Description: ripening-related protein - like
  misc_feature (1)..(201): NCBI GI NO: 21618088 NR Description: ripening-related protein-like
  misc_feature (31)..(201): NCBI GI NO: 7488727 NR Description: 21K protein precursor - alfalfa
  misc_feature (1)..(201): NCBI GI NO: 15234547 NR Description: putative protein; protein id: At4g12390
  misc_feature (1)..(201): NCBI GI NO: 21555297 NR Description: unknown [Arabidopsis thaliana]
  misc_feature (98)..(98): Xaa is any aa, unknown or other
  misc_feature (111)..(111): Xaa is any aa, unknown or other
  misc_feature (186)..(186): Xaa is any aa, unknown or other
MAKVLDLSLVLFVLCVSTAAIAMARNLGEESSDDTEFIKSSCEIATYPELCFQSLSSYASEIKKRPLQLAETALAVSMARTKSAKTYISDMTDYKGIXKRQHEAVLDCVEXMGDTVDRLSKSLKELKNLEEGESKEDFWFCLSNVRTWTSAALTDETTCLDGFGGKGMDGELKSLVKAHIVRVAQXTSNALALINVYASKH

SEQ ID NO: 102 - protein, 179 aa, Brassica napus
  peptide (1)..(179): Ceres Seq. ID no. 12474480
  misc_feature (1)..(179): NCBI GI NO: 15234982 NR Description: putative protein; protein id: At4g25260
  misc_feature (14)..(179): NCBI GI NO: 112717 NR Description: 21 KD PROTEIN PRECURSOR (1.2 PROTEIN)
  misc_feature (1)..(179): NCBI GI NO: 7406663 NR Description: putative ripening-related protein [Vitis vinifera]
  misc_feature (1)..(179): NCBI GI NO: 15241799 NR Description: ripening-related protein - like
  misc_feature (1)..(179): NCBI GI NO: 21618088 NR Description: ripening-related protein-like
  misc_feature (9)..(179): NCBI GI NO: 7488727 NR Description: 21K protein precursor - alfalfa
  misc_feature (1)..(179): NCBI GI NO: 15234547 NR Description: putative protein; protein id: At4g12390
  misc_feature (1)..(179): NCBI GI NO: 21555297 NR Description: unknown [Arabidopsis thaliana]
  misc_feature (1)..(178): NCBI GI NO: 18407657 NR Description: expressed protein; protein id: At1g62770
  misc_feature (1)..(178): NCBI GI NO: 21618013 NR Description: putative ripening-related protein
  misc_feature (76)..(76): Xaa is any aa, unknown or other
  misc_feature (89)..(89): Xaa is any aa, unknown or other
  misc_feature (164)..(164): Xaa is any aa, unknown or other
MARNLGEESSDDTEFIKSSCEIATYPELCFQSLSSYASEIKKRPLQLAETALAVSMARTKSAKTYISDMTDYKGIXKRQHEAVLDCVEXMGDTVDRLSKSLKELKNLEEGESKEDFWFCLSNVRTWTSAALTDETTCLDGFGGKGMDGELKSLVKAHIVRVAQXTSNALALINVYASKH

SEQ ID NO: 103 - protein, 124 aa, Brassica napus
  peptide (1)..(124): Ceres Seq. ID no. 12474481
  misc_feature (1)..(124): NCBI GI NO: 15234982 NR Description: putative protein; protein id: At4g25260
  misc_feature (1)..(124): NCBI GI NO: 112717 NR Description: 21 KD PROTEIN PRECURSOR (1.2 PROTEIN)
  misc_feature (1)..(124): NCBI GI NO: 7406663 NR Description: putative ripening-related protein [Vitis vinifera]
  misc_feature (1)..(124): NCBI GI NO: 15241799 NR Description: ripening-related protein - like
  misc_feature (1)..(124): NCBI GI NO: 21618088 NR Description: ripening-related protein-like
  misc_feature (1)..(124): NCBI GI NO: 7488727 NR Description: 21K protein precursor - alfalfa
  misc_feature (1)..(124): NCBI GI NO: 15234547 NR Description: putative protein; protein id: At4g12390
  misc_feature (1)..(124): NCBI GI NO: 21555297 NR Description: unknown [Arabidopsis thaliana]
  misc_feature (1)..(123): NCBI GI NO: 18407657 NR Description: expressed protein; protein id: At1g62770
  misc_feature (1)..(123): NCBI GI NO: 21618013 NR Description: putative ripening-related protein
  misc_feature (21)..(21): Xaa is any aa, unknown or other
  misc_feature (34)..(34): Xaa is any aa, unknown or other
  misc_feature (109)..(109): Xaa is any aa, unknown or other
MARTKSAKTYISDMTDYKGIXKRQHEAVLDCVEXMGDTVDRLSKSLKELKNLEEGESKEDFWFCLSNVRTWTSAALTDETTCLDGFGGKGMDGELKSLVKAHIVRVAQXTSNALALINVYASKH

SEQ ID NO: 104 - DNA, 890 bp, Brassica napus
  misc_feature (1)..(890): Ceres Seq. ID no. 12473977
  misc_feature (642)..(642): n is a, c, t, g, unknown, or other
  misc_feature (546)..(546): n is a, c, t, g, unknown, or other
  misc_feature (761)..(761): n is a, c, t, g, unknown, or other
attctgattattatctttcgaaaatgtttattctccggtcgcagaagctatggacggtggttatgattctagtgatgtcgtcgcgtgtaacgcactcgctgcacttcgatctgcactcgggacggacgaagtgtatagcggaagacatcaagagcaattcaatgaccgtgggaaagtacagcgtcgataaccctcacgaaggccacgatttgcctcaatctcacaagatctccgtcaaggtgacgtcaagctcagggaatgcgtaccatcacgcggatcaagtggcgtctgggcaattcgcgttctcggcagtggaagctggggactacatggcttgtttctcagccgttgatcataagcctgaggtgactctgagcattgattttgagtggaggacgggtgttcaatccaagagctgggctactgttgccaagaagagccaagtcgaaaccatggagtttgatgtaaagagccttcttgatactgtcaactctattcatgaagagatgttttatcttagagaaagggaagaagaaatgcaagatntgaaccggtcaacaaacactaaaatggcgtggttgagtttgctctctttattcgtatgcataggagtggcagctatgcagtatgtacacttgaagncctttttcgagaagaagaaagtcatctaatttgttacttacaggcaatcacacgcacgaaacaatctacttatcttttgggtgttgtatattaagtcaatgactactgcaagcatgttntcttgagacttagaactttgattttatgtgccagtattgtccttcttgggtttagttctttgtttagatttgttggtccttaatacttggataatttgatggtttaaactatataaaatgtgcatttcc

SEQ ID NO: 105 - protein, 222 aa, Brassica napus
  peptide (1)..(222): Ceres Seq. ID no. 12473978
  misc_feature (18)..(222): Pfam Name: Pfam Description:  emp24/gp25L/p24 family
  misc_feature (8)..(222): NCBI GI NO: 22330523 NR Description: unknown protein; protein id: At1g69460
  misc_feature (19)..(222): NCBI GI NO: 12597802 NR Description: unknown protein [Arabidopsis thaliana]
  misc_feature (8)..(222): NCBI GI NO: 18396016 NR Description: expressed protein; protein id: At1g26690
  misc_feature (8)..(222): NCBI GI NO: 21618241 NR Description: unknown [Arabidopsis thaliana]
  misc_feature (19)..(222): NCBI GI NO: 15223027 NR Description: unknown protein; protein id: At1g14010.1
  misc_feature (59)..(222): NCBI GI NO: 26452085 NR Description: unknown protein [Arabidopsis thaliana]
  misc_feature (19)..(222): NCBI GI NO: 8778403 NR Description: F16A14.23 [Arabidopsis thaliana]
  misc_feature (8)..(222): NCBI GI NO: 15227591 NR Description: putative Golgi-associated membrane trafficking protein
  misc_feature (19)..(222): NCBI GI NO: 33146897 NR Description: putative transmembrane protein
  misc_feature (1)..(222): NCBI GI NO: 11994711 NR Description: golgi-associated membrane trafficking protein-like
  misc_feature (182)..(182): Xaa is any aa, unknown or other
  misc_feature (214)..(214): Xaa is any aa, unknown or other
SDYYLSKMFILRSQKLWTVVMILVMSSRVTHSLHFDLHSGRTKCIAEDIKSNSMTVGKYSVDNPHEGHDLPQSHKISVKVTSSSGNAYHHADQVASGQFAFSAVEAGDYMACFSAVDHKPEVTLSIDFEWRTGVQSKSWATVAKKSQVETMEFDVKSLLDTVNSIHEEMFYLREREEEMQDXNRSTNTKMAWLSLLSLFVCIGVAAMQYVHLKXFFEKKKVI

SEQ ID NO: 106 - protein, 215 aa, Brassica napus
  peptide (1)..(215): Ceres Seq. ID no. 12473979
  misc_feature (11)..(215): Pfam Name: Pfam Description:  emp24/gp25L/p24 family
  misc_feature (1)..(215): NCBI GI NO: 22330523 NR Description: unknown protein; protein id: At1g69460
  misc_feature (12)..(215): NCBI GI NO: 12597802 NR Description: unknown protein [Arabidopsis thaliana]
  misc_feature (1)..(215): NCBI GI NO: 18396016 NR Description: expressed protein; protein id: At1g26690
  misc_feature (1)..(215): NCBI GI NO: 21618241 NR Description: unknown [Arabidopsis thaliana]
  misc_feature (12)..(215): NCBI GI NO: 15223027 NR Description: unknown protein; protein id: At1g14010.1
  misc_feature (52)..(215): NCBI GI NO: 26452085 NR Description: unknown protein [Arabidopsis thaliana]
  misc_feature (12)..(215): NCBI GI NO: 8778403 NR Description: F16A14.23 [Arabidopsis thaliana]
  misc_feature (1)..(215): NCBI GI NO: 15227591 NR Description: putative Golgi-associated membrane trafficking protein
  misc_feature (12)..(215): NCBI GI NO: 33146897 NR Description: putative transmembrane protein
  misc_feature (1)..(215): NCBI GI NO: 11994711 NR Description: golgi-associated membrane trafficking protein-like
  misc_feature (175)..(175): Xaa is any aa, unknown or other
  misc_feature (207)..(207): Xaa is any aa, unknown or other
MFILRSQKLWTVVMILVMSSRVTHSLHFDLHSGRTKCIAEDIKSNSMTVGKYSVDNPHEGHDLPQSHKISVKVTSSSGNAYHHADQVASGQFAFSAVEAGDYMACFSAVDHKPEVTLSIDFEWRTGVQSKSWATVAKKSQVETMEFDVKSLLDTVNSIHEEMFYLREREEEMQDXNRSTNTKMAWLSLLSLFVCIGVAAMQYVHLKXFFEKKKVI

SEQ ID NO: 107 - protein, 202 aa, Brassica napus
  peptide (1)..(202): Ceres Seq. ID no. 12473980
  misc_feature (1)..(202): Pfam Name: Pfam Description:  emp24/gp25L/p24 family
  misc_feature (1)..(202): NCBI GI NO: 22330523 NR Description: unknown protein; protein id: At1g69460
  misc_feature (1)..(202): NCBI GI NO: 12597802 NR Description: unknown protein [Arabidopsis thaliana]
  misc_feature (1)..(202): NCBI GI NO: 18396016 NR Description: expressed protein; protein id: At1g26690
  misc_feature (1)..(202): NCBI GI NO: 21618241 NR Description: unknown [Arabidopsis thaliana]
  misc_feature (1)..(202): NCBI GI NO: 15223027 NR Description: unknown protein; protein id: At1g14010.1
  misc_feature (39)..(202): NCBI GI NO: 26452085 NR Description: unknown protein [Arabidopsis thaliana]
  misc_feature (1)..(202): NCBI GI NO: 8778403 NR Description: F16A14.23 [Arabidopsis thaliana]
  misc_feature (1)..(202): NCBI GI NO: 15227591 NR Description: putative Golgi-associated membrane trafficking protein
  misc_feature (1)..(202): NCBI GI NO: 33146897 NR Description: putative transmembrane protein
  misc_feature (1)..(202): NCBI GI NO: 11994711 NR Description: golgi-associated membrane trafficking protein-like
  misc_feature (162)..(162): Xaa is any aa, unknown or other
  misc_feature (194)..(194): Xaa is any aa, unknown or other
MILVMSSRVTHSLHFDLHSGRTKCIAEDIKSNSMTVGKYSVDNPHEGHDLPQSHKISVKVTSSSGNAYHHADQVASGQFAFSAVEAGDYMACFSAVDHKPEVTLSIDFEWRTGVQSKSWATVAKKSQVETMEFDVKSLLDTVNSIHEEMFYLREREEEMQDXNRSTNTKMAWLSLLSLFVCIGVAAMQYVHLKXFFEKKKVI

SEQ ID NO: 108 - DNA, 814 bp, Brassica napus
  misc_feature (1)..(814): Ceres Seq. ID no. 13504237
  misc_feature (808)..(808): n is a, c, t, g, unknown, or other
  misc_feature (802)..(802): n is a, c, t, g, unknown, or other
gaagcttttttttatctctctctccgccgtcactctcacctgcggcgaggcttaacgatctcagccatggccgccgccgtagaaatcgacgcagagatccagcagcagcttaccaacgaggtcaagctcttcaaccgctggacctacgatgacgtctcggttgcagatatcagtcttgttgactacattggagttcaagcagccaaacacgccacctttgtcccccacactgcaggaagatactctgtgaagagattcaggaaggctcagtgcccaattgttgagaggctcacaaactctctcatgatgcacggaagaaacaatggaaagaagttgatggcggtgaggatcatcaagcacgccatggagatcatccacctcttgactgacgccaacccgattcagatcatcatcgatgccattgtcaacagtggtccacgtgaagatgccaccagaattggatctgctggtgtcgttaggagacaagctgttgatatctctcctttgagacgtgttaaccaggcgatcttcttgctcacaaccggtgctcgtgaggctgctttcagaaacattaagactattgctgagtgccttgctgatgagttaatcaacgcagccaagggctcgtccaacagctatgccatcaaaaagaaggatgagattgagagagttgccaaggctaatcgttaagggaaagtcttcttttaccctgatggttgttacaatcttatcaatgaaatttatgttttgtttcgactaagattgggaatatgtaacagatgttttgctcttttcgtcttangaaagnttattt

SEQ ID NO: 109 - protein, 229 aa, Brassica napus
  peptide (1)..(229): Ceres Seq. ID no. 13504238
  misc_feature (76)..(229): Pfam Name: Pfam Description:  Ribosomal protein S7p/S5e
  misc_feature (23)..(229): NCBI GI NO: 15228111 NR Description: 40S ribosomal protein S5 (RPS5A)
  misc_feature (23)..(229): NCBI GI NO: 15229897 NR Description: 40S ribosomal protein S5 (RPS5B)
  misc_feature (23)..(229): NCBI GI NO: 21617886 NR Description: 40S ribosomal protein S5 [Arabidopsis thaliana]
  misc_feature (40)..(229): NCBI GI NO: 6831665 NR Description: 40S RIBOSOMAL PROTEIN S5
  misc_feature (31)..(229): NCBI GI NO: 34893994 NR Description: putative 40S ribosomal protein S5
  misc_feature (23)..(229): NCBI GI NO: 40748265 NR Description: 40S ribosomal protein S5 [Capsicum annuum]
  misc_feature (38)..(229): NCBI GI NO: 3717978 NR Description: 5S ribosomal protein [Mus musculus]
  misc_feature (38)..(229): NCBI GI NO: 13904870 NR Description: ribosomal protein S5; 40S ribosomal protein S5
  misc_feature (38)..(229): NCBI GI NO: 34854534 NR Description: similar to ribosomal protein S5
  misc_feature (38)..(229): NCBI GI NO: 15294021 NR Description: 40S ribosomal protein S5 [Ictalurus punctatus]
EAFFYLSLRRHSHLRRGLTISAMAAAVEIDAEIQQQLTNEVKLFNRWTYDDVSVADISLVDYIGVQAAKHATFVPHTAGRYSVKRFRKAQCPIVERLTNSLMMHGRNNGKKLMAVRIIKHAMEIIHLLTDANPIQIIIDAIVNSGPREDATRIGSAGVVRRQAVDISPLRRVNQAIFLLTTGAREAAFRNIKTIAECLADELINAAKGSSNSYAIKKKDEIERVAKANR

SEQ ID NO: 110 - protein, 207 aa, Brassica napus
  peptide (1)..(207): Ceres Seq. ID no. 13504239
  misc_feature (54)..(207): Pfam Name: Pfam Description:  Ribosomal protein S7p/S5e
  misc_feature (1)..(207): NCBI GI NO: 15228111 NR Description: 40S ribosomal protein S5 (RPS5A)
  misc_feature (1)..(207): NCBI GI NO: 15229897 NR Description: 40S ribosomal protein S5 (RPS5B)
  misc_feature (1)..(207): NCBI GI NO: 21617886 NR Description: 40S ribosomal protein S5 [Arabidopsis thaliana]
  misc_feature (18)..(207): NCBI GI NO: 6831665 NR Description: 40S RIBOSOMAL PROTEIN S5
  misc_feature (9)..(207): NCBI GI NO: 34893994 NR Description: putative 40S ribosomal protein S5
  misc_feature (1)..(207): NCBI GI NO: 40748265 NR Description: 40S ribosomal protein S5 [Capsicum annuum]
  misc_feature (16)..(207): NCBI GI NO: 3717978 NR Description: 5S ribosomal protein [Mus musculus]
  misc_feature (16)..(207): NCBI GI NO: 13904870 NR Description: ribosomal protein S5; 40S ribosomal protein S5
  misc_feature (16)..(207): NCBI GI NO: 34854534 NR Description: similar to ribosomal protein S5
  misc_feature (16)..(207): NCBI GI NO: 15294021 NR Description: 40S ribosomal protein S5 [Ictalurus punctatus]
MAAAVEIDAEIQQQLTNEVKLFNRWTYDDVSVADISLVDYIGVQAAKHATFVPHTAGRYSVKRFRKAQCPIVERLTNSLMMHGRNNGKKLMAVRIIKHAMEIIHLLTDANPIQIIIDAIVNSGPREDATRIGSAGVVRRQAVDISPLRRVNQAIFLLTTGAREAAFRNIKTIAECLADELINAAKGSSNSYAIKKKDEIERVAKANR

SEQ ID NO: 111 - protein, 128 aa, Brassica napus
  peptide (1)..(128): Ceres Seq. ID no. 13504240
  misc_feature (1)..(128): Pfam Name: Pfam Description:  Ribosomal protein S7p/S5e
  misc_feature (1)..(128): NCBI GI NO: 34854534 NR Description: similar to ribosomal protein S5
  misc_feature (1)..(128): NCBI GI NO: 15294021 NR Description: 40S ribosomal protein S5 [Ictalurus punctatus]
  misc_feature (1)..(128): NCBI GI NO: 15228111 NR Description: 40S ribosomal protein S5 (RPS5A)
  misc_feature (1)..(128): NCBI GI NO: 15229897 NR Description: 40S ribosomal protein S5 (RPS5B)
  misc_feature (1)..(128): NCBI GI NO: 21617886 NR Description: 40S ribosomal protein S5 [Arabidopsis thaliana]
  misc_feature (1)..(128): NCBI GI NO: 6831665 NR Description: 40S RIBOSOMAL PROTEIN S5
  misc_feature (1)..(128): NCBI GI NO: 34893994 NR Description: putative 40S ribosomal protein S5
  misc_feature (1)..(128): NCBI GI NO: 40748265 NR Description: 40S ribosomal protein S5 [Capsicum annuum]
  misc_feature (1)..(128): NCBI GI NO: 3717978 NR Description: 5S ribosomal protein [Mus musculus]
  misc_feature (1)..(128): NCBI GI NO: 13904870 NR Description: ribosomal protein S5; 40S ribosomal protein S5
MMHGRNNGKKLMAVRIIKHAMEIIHLLTDANPIQIIIDAIVNSGPREDATRIGSAGVVRRQAVDISPLRRVNQAIFLLTTGAREAAFRNIKTIAECLADELINAAKGSSNSYAIKKKDEIERVAKANR

SEQ ID NO: 112 - DNA, 804 bp, Brassica napus
  misc_feature (1)..(804): Ceres Seq. ID no. 12473409
  misc_feature (595)..(595): n is a, c, t, g, unknown, or other
  misc_feature (470)..(470): n is a, c, t, g, unknown, or other
  misc_feature (493)..(493): n is a, c, t, g, unknown, or other
caccacactctctcttccacagtttcgttatctagatattattttaggaggatctctctctgcttctctccatctctctcttagccatggctgctttcacttgtacctctcgtcctcctgttcccctccgttcggagtcgagaatcgcatcctctccatccgcttcactctctgctcggcggatgttcgccgtctcgcctgactcagcaggattgagaatccgtctttcccagtcttcgtccttgttgacctcgaaggttcctcgaccacgaagaggcatcgtctgtgaggctcaggaaaccactacagatatagtttcaatagtcaacgacacaacatgggactctctagttctcaaggcggacgggcctgttcttgtcgacttttgggctccatggtgtggactttgcaaaatgattgacccgctcgtgaatgaactagcaaaagagtaccccgggaaggtcaagttntacaaactgaacacggacgactntccttcaaccccaagcaagtacaatgttagaagcattccaacgatcatgatctttgtcaatggggagaagaaggatgcaatcataggtgcagtgcccagatntacgctcgcgtctagcattgataaattcttgcaatgagattagactggtgagtctgtgagatctgtttctccccccccctctgtcttgtgttctcattctctcttgtaatttgtgcttctttgtagctatctgcttcttctattgtatcttttcttcatcactgaacatctagacatggataaataagatgatgtcatgtttttatgtt

SEQ ID NO: 113 - protein, 181 aa, Brassica napus
  peptide (1)..(181): Ceres Seq. ID no. 12473410
  misc_feature (1)..(180): NCBI GI NO: 15236327 NR Description: putative M-type thioredoxin; protein id: At4g03520
  misc_feature (1)..(180): NCBI GI NO: 6539610 NR Description: thioredoxin m2 [Arabidopsis thaliana]
  misc_feature (1)..(180): NCBI GI NO: 21618235 NR Description: putative M-type thioredoxin [Arabidopsis thaliana]
  misc_feature (1)..(180): NCBI GI NO: 30678634 NR Description: thioredoxin M-type 1, chloroplast precursor
  misc_feature (1)..(181): NCBI GI NO: 11135407 NR Description: Thioredoxin M-type, chloroplast precursor (TRX-M)
  misc_feature (12)..(180): NCBI GI NO: 15594012 NR Description: putative thioredoxin m2 [Pisum sativum]
  misc_feature (21)..(180): NCBI GI NO: 6539614 NR Description: thioredoxin m4 [Arabidopsis thaliana]
  misc_feature (18)..(181): NCBI GI NO: 38346628 NR Description: OSJNBa0074L08.22
  misc_feature (21)..(180): NCBI GI NO: 15232567 NR Description: thioredoxin m4; protein id: At3g15360
  misc_feature (38)..(180): NCBI GI NO: 21354 NR Description: thioredoxin M precursor (AA -67 to 114)
  misc_feature (128)..(128): Xaa is any aa, unknown or other
  misc_feature (136)..(136): Xaa is any aa, unknown or other
  misc_feature (170)..(170): Xaa is any aa, unknown or other
MAAFTCTSRPPVPLRSESRIASSPSASLSARRMFAVSPDSAGLRIRLSQSSSLLTSKVPRPRRGIVCEAQETTTDIVSIVNDTTWDSLVLKADGPVLVDFWAPWCGLCKMIDPLVNELAKEYPGKVKXYKLNTDDXPSTPSKYNVRSIPTIMIFVNGEKKDAIIGAVPRXTLASSIDKFLQ

SEQ ID NO: 114 - protein, 149 aa, Brassica napus
  peptide (1)..(149): Ceres Seq. ID no. 12473411
  misc_feature (1)..(148): NCBI GI NO: 15236327 NR Description: putative M-type thioredoxin; protein id: At4g03520
  misc_feature (1)..(148): NCBI GI NO: 6539610 NR Description: thioredoxin m2 [Arabidopsis thaliana]
  misc_feature (1)..(148): NCBI GI NO: 21618235 NR Description: putative M-type thioredoxin [Arabidopsis thaliana]
  misc_feature (1)..(148): NCBI GI NO: 30678634 NR Description: thioredoxin M-type 1, chloroplast precursor
  misc_feature (1)..(149): NCBI GI NO: 11135407 NR Description: Thioredoxin M-type, chloroplast precursor (TRX-M)
  misc_feature (1)..(148): NCBI GI NO: 15594012 NR Description: putative thioredoxin m2 [Pisum sativum]
  misc_feature (1)..(148): NCBI GI NO: 6539614 NR Description: thioredoxin m4 [Arabidopsis thaliana]
  misc_feature (1)..(149): NCBI GI NO: 38346628 NR Description: OSJNBa0074L08.22
  misc_feature (1)..(148): NCBI GI NO: 15232567 NR Description: thioredoxin m4; protein id: At3g15360
  misc_feature (6)..(148): NCBI GI NO: 21354 NR Description: thioredoxin M precursor (AA -67 to 114)
  misc_feature (96)..(96): Xaa is any aa, unknown or other
  misc_feature (104)..(104): Xaa is any aa, unknown or other
  misc_feature (138)..(138): Xaa is any aa, unknown or other
MFAVSPDSAGLRIRLSQSSSLLTSKVPRPRRGIVCEAQETTTDIVSIVNDTTWDSLVLKADGPVLVDFWAPWCGLCKMIDPLVNELAKEYPGKVKXYKLNTDDXPSTPSKYNVRSIPTIMIFVNGEKKDAIIGAVPRXTLASSIDKFLQ

SEQ ID NO: 115 - DNA, 763 bp, Brassica napus
  misc_feature (1)..(763): Ceres Seq. ID no. 13504224
aattgattccttcgtcaagcctcaatcactttcctcactcctctctctctcaaatcaacagcacgaagagatgaagcacctgatccgccgcctctcccgcgtcgccgactccgcgaactacagcctcctccgctccgattcgcagcgacctagccgccgtccaccgccgcctcgtcgctcgaagaagcacacatcctccgttcccgagggacacgtgcctgtctacgtgggagacgagatggagcggttcgtcgtgagcgcggagctgcttaaccacccggttttcatcggtttgttgaaccgatcggctcaagagtacggttacgaacagaaaggagttctgcagatcccctgccacgtgttggtattcgagcgaatcatggagtcgctccggctcggattagcggtgccgagcgacctacaagatctgatcggcgacgagacgatttgacacgcgagggaatctttggtagttagagagagatattgatctggttcttcttttttttggctcagatgcagtacgacgtcgtgttgatggtgtacatagctatatgtatatttttttttttcgggatgatgatgatgaaaagttcaaatgggaaggggaaagattagcgatatttttagggcttttctttttgaatttttttttctttttataaaatttgtttgttgcaaatttcctgtttttcgccggtttaagaaccggtttgagactcttgtgaaggtttatatggaaattgcttcggtttggttatgc

SEQ ID NO: 116 - protein, 149 aa, Brassica napus
  peptide (1)..(149): Ceres Seq. ID no. 13504225
  misc_feature (27)..(131): Pfam Name: Pfam Description:  Auxin responsive protein
  misc_feature (24)..(149): NCBI GI NO: 15230601 NR Description: auxin-induced
  misc_feature (24)..(135): NCBI GI NO: 15223462 NR Description: auxin-induced
  misc_feature (24)..(149): NCBI GI NO: 15219275 NR Description: auxin-induced
  misc_feature (24)..(144): NCBI GI NO: 15219296 NR Description: auxin-induced
  misc_feature (64)..(133): NCBI GI NO: 38345606 NR Description: OSJNBa0093O08.8
  misc_feature (51)..(149): NCBI GI NO: 15228626 NR Description: auxin-induced
  misc_feature (58)..(129): NCBI GI NO: 15236199 NR Description: auxin-induced
  misc_feature (64)..(133): NCBI GI NO: 5852079 NR Description: zwh0002.1 [Oryza sativa (indica cultivar-group)]
  misc_feature (49)..(131): NCBI GI NO: 15238919 NR Description: auxin-induced
  misc_feature (9)..(127): NCBI GI NO: 15231081 NR Description: auxin-induced
IDSFVKPQSLSSLLSLSNQQHEEMKHLIRRLSRVADSANYSLLRSDSQRPSRRPPPPRRSKKHTSSVPEGHVPVYVGDEMERFVVSAELLNHPVFIGLLNRSAQEYGYEQKGVLQIPCHVLVFERIMESLRLGLAVPSDLQDLIGDETI

SEQ ID NO: 117 - protein, 126 aa, Brassica napus
  peptide (1)..(126): Ceres Seq. ID no. 13504226
  misc_feature (4)..(108): Pfam Name: Pfam Description:  Auxin responsive protein
  misc_feature (1)..(126): NCBI GI NO: 15230601 NR Description: auxin-induced
  misc_feature (1)..(112): NCBI GI NO: 15223462 NR Description: auxin-induced
  misc_feature (1)..(126): NCBI GI NO: 15219275 NR Description: auxin-induced
  misc_feature (1)..(121): NCBI GI NO: 15219296 NR Description: auxin-induced
  misc_feature (41)..(110): NCBI GI NO: 38345606 NR Description: OSJNBa0093O08.8
  misc_feature (28)..(126): NCBI GI NO: 15228626 NR Description: auxin-induced
  misc_feature (35)..(106): NCBI GI NO: 15236199 NR Description: auxin-induced
  misc_feature (41)..(110): NCBI GI NO: 5852079 NR Description: zwh0002.1 [Oryza sativa (indica cultivar-group)]
  misc_feature (26)..(108): NCBI GI NO: 15238919 NR Description: auxin-induced
  misc_feature (1)..(104): NCBI GI NO: 15231081 NR Description: auxin-induced
MKHLIRRLSRVADSANYSLLRSDSQRPSRRPPPPRRSKKHTSSVPEGHVPVYVGDEMERFVVSAELLNHPVFIGLLNRSAQEYGYEQKGVLQIPCHVLVFERIMESLRLGLAVPSDLQDLIGDETI

SEQ ID NO: 118 - DNA, 460 bp, Brassica napus
  misc_feature (1)..(460): Ceres Seq. ID no. 12476115
actaaaaacctcgattacgtaataaagtaatcaatattctcgatcgttcttataccgctttatagtcccttttatagtgccaccttcctcattagctcaccacgcacttaacaattgttcccttttccaactctcgctctctcttaaactttcttcccctctttcaaaatgaagctttctttgcgtttgatctcagctgttctcctcatgttcatgatattcgttgcttcagggatgggtccagtcaccgtggaggcacgcacgtgtgagtcgaagagccataagttcaggggtctttgtgtgagcagacacaactgcgcaaatgtgtgccacaacgaaggttttcatggaggcaaatgccgtgggttccgtcgtcgttgctactgcaccagacattgctgatccatccatcgatcgagactcataactcaaaatcttcaatccatcatctcgtctcatg

SEQ ID NO: 119 - protein, 77 aa, Brassica napus
  peptide (1)..(77): Ceres Seq. ID no. 12476116
  misc_feature (31)..(77): Pfam Name: Pfam Description:  Gamma-thionins family
  misc_feature (1)..(77): NCBI GI NO: 15226878 NR Description: plant defensin protein, putative (PDF2
  misc_feature (1)..(77): NCBI GI NO: 7488534 NR Description: proteinase inhibitor II - turnip
  misc_feature (1)..(77): NCBI GI NO: 15226872 NR Description: plant defensin protein, putative (PDF2
  misc_feature (1)..(77): NCBI GI NO: 15226876 NR Description: plant defensin protein, putative (PDF2
  misc_feature (1)..(77): NCBI GI NO: 11387188 NR Description: Flower-specific gamma-thionin precursor
  misc_feature (1)..(77): NCBI GI NO: 16225423 NR Description: putative gamma-thionin [Castanea sativa]
  misc_feature (1)..(77): NCBI GI NO: 21553559 NR Description: protease inhibitor II [Arabidopsis thaliana]
  misc_feature (1)..(77): NCBI GI NO: 22330359 NR Description: plant defensin protein, putative (PDF2
  misc_feature (1)..(77): NCBI GI NO: 28624546 NR Description: defensin protein 1 [Prunus persica]
  misc_feature (6)..(77): NCBI GI NO: 17373811 NR Description: Defensin J1-2 precursor
MKLSLRLISAVLLMFMIFVASGMGPVTVEARTCESKSHKFRGLCVSRHNCANVCHNEGFHGGKCRGFRRRCYCTRHC

SEQ ID NO: 120 - protein, 64 aa, Brassica napus
  peptide (1)..(64): Ceres Seq. ID no. 12476117
  misc_feature (18)..(64): Pfam Name: Pfam Description:  Gamma-thionins family
  misc_feature (1)..(64): NCBI GI NO: 15226878 NR Description: plant defensin protein, putative (PDF2
  misc_feature (1)..(64): NCBI GI NO: 7488534 NR Description: proteinase inhibitor II - turnip
  misc_feature (1)..(64): NCBI GI NO: 15226872 NR Description: plant defensin protein, putative (PDF2
  misc_feature (1)..(64): NCBI GI NO: 15226876 NR Description: plant defensin protein, putative (PDF2
  misc_feature (1)..(64): NCBI GI NO: 11387188 NR Description: Flower-specific gamma-thionin precursor
  misc_feature (1)..(64): NCBI GI NO: 16225423 NR Description: putative gamma-thionin [Castanea sativa]
  misc_feature (1)..(64): NCBI GI NO: 21553559 NR Description: protease inhibitor II [Arabidopsis thaliana]
  misc_feature (1)..(64): NCBI GI NO: 22330359 NR Description: plant defensin protein, putative (PDF2
  misc_feature (1)..(64): NCBI GI NO: 28624546 NR Description: defensin protein 1 [Prunus persica]
  misc_feature (1)..(64): NCBI GI NO: 17373811 NR Description: Defensin J1-2 precursor
MFMIFVASGMGPVTVEARTCESKSHKFRGLCVSRHNCANVCHNEGFHGGKCRGFRRRCYCTRHC

SEQ ID NO: 121 - protein, 62 aa, Brassica napus
  peptide (1)..(62): Ceres Seq. ID no. 12476118
  misc_feature (16)..(62): Pfam Name: Pfam Description:  Gamma-thionins family
  misc_feature (1)..(62): NCBI GI NO: 15226878 NR Description: plant defensin protein, putative (PDF2
  misc_feature (1)..(62): NCBI GI NO: 7488534 NR Description: proteinase inhibitor II - turnip
  misc_feature (1)..(62): NCBI GI NO: 15226872 NR Description: plant defensin protein, putative (PDF2
  misc_feature (1)..(62): NCBI GI NO: 15226876 NR Description: plant defensin protein, putative (PDF2
  misc_feature (1)..(62): NCBI GI NO: 11387188 NR Description: Flower-specific gamma-thionin precursor
  misc_feature (1)..(62): NCBI GI NO: 16225423 NR Description: putative gamma-thionin [Castanea sativa]
  misc_feature (1)..(62): NCBI GI NO: 21553559 NR Description: protease inhibitor II [Arabidopsis thaliana]
  misc_feature (1)..(62): NCBI GI NO: 22330359 NR Description: plant defensin protein, putative (PDF2
  misc_feature (1)..(62): NCBI GI NO: 28624546 NR Description: defensin protein 1 [Prunus persica]
  misc_feature (1)..(62): NCBI GI NO: 17373811 NR Description: Defensin J1-2 precursor
MIFVASGMGPVTVEARTCESKSHKFRGLCVSRHNCANVCHNEGFHGGKCRGFRRRCYCTRHC

SEQ ID NO: 122 - DNA, 765 bp, Brassica napus
  misc_feature (1)..(765): Ceres Seq. ID no. 12557928
  misc_feature (742)..(742): n is a, c, t, g, unknown, or other
  misc_feature (590)..(590): n is a, c, t, g, unknown, or other
  misc_feature (611)..(611): n is a, c, t, g, unknown, or other
aaagagaaagcccctccagagctcataacccaatctcccatcctcctcgattcaatacttatctctcctctcaatcaaaaacttgatctacataatcgattccacatgaaacgcagtgcttcaaactcagttacaaacggtgacgcgagtaacaagaagatgaaaaagaccacagaggaagattcagaaatcggattcgccaacttagacgagaatctactctacgaggtgttgaagcacgtggacgcgaggaccttagcaacgtcttcttgcgtgagcaagatctggcacaggactgcacaagacgagcgtctgtgggagctgatctgcacgcgtcactgggccaacatcggctgcagccaacaccagctcagattcgtcgtcttggcgcttggcggcttcaagcaactccactcgctctacctgtggcctctctcgagtccgaatcaacatggtagattgggtaaagacgagctgaaactctccctttctctcctctcgattcggtactacgagaagatgaatttcactaagagactcccctgagtccaaatgattttacttcagatctattttttccagcatcgttnttagttttattttattgtttngcgagatgtttgtaatttgtaatatctgctttgtacttgtttaagctcgttctcatatgtttgatattattaaaatctggcaaaatccatgtaagccagactgtctgaaacagctagttctgtaataatanaggctggtgagaatatttaagcc

SEQ ID NO: 123 - protein, 181 aa, Brassica napus
  peptide (1)..(181): Ceres Seq. ID no. 12557929
  misc_feature (36)..(181): NCBI GI NO: 15233744 NR Description: putative protein; protein id: At4g24210
  misc_feature (36)..(181): NCBI GI NO: 21593260 NR Description: unknown [Arabidopsis thaliana]
  misc_feature (41)..(179): NCBI GI NO: 33411641 NR Description: GID2 [Oryza sativa (japonica cultivar-group)]
  misc_feature (39)..(174): NCBI GI NO: 15238908 NR Description: putative protein; protein id: At5g48170.1
KEKAPPELITQSPILLDSILISPLNQKLDLHNRFHMKRSASNSVTNGDASNKKMKKTTEEDSEIGFANLDENLLYEVLKHVDARTLATSSCVSKIWHRTAQDERLWELICTRHWANIGCSQHQLRFVVLALGGFKQLHSLYLWPLSSPNQHGRLGKDELKLSLSLLSIRYYEKMNFTKRLP

SEQ ID NO: 124 - protein, 146 aa, Brassica napus
  peptide (1)..(146): Ceres Seq. ID no. 12557930
  misc_feature (6)..(144): NCBI GI NO: 33411641 NR Description: GID2 [Oryza sativa (japonica cultivar-group)]
  misc_feature (4)..(139): NCBI GI NO: 15238908 NR Description: putative protein; protein id: At5g48170.1
  misc_feature (1)..(146): NCBI GI NO: 15233744 NR Description: putative protein; protein id: At4g24210
  misc_feature (1)..(146): NCBI GI NO: 21593260 NR Description: unknown [Arabidopsis thaliana]
MKRSASNSVTNGDASNKKMKKTTEEDSEIGFANLDENLLYEVLKHVDARTLATSSCVSKIWHRTAQDERLWELICTRHWANIGCSQHQLRFVVLALGGFKQLHSLYLWPLSSPNQHGRLGKDELKLSLSLLSIRYYEKMNFTKRLP

SEQ ID NO: 125 - protein, 128 aa, Brassica napus
  peptide (1)..(128): Ceres Seq. ID no. 12557931
  misc_feature (1)..(128): NCBI GI NO: 15233744 NR Description: putative protein; protein id: At4g24210
  misc_feature (1)..(128): NCBI GI NO: 21593260 NR Description: unknown [Arabidopsis thaliana]
  misc_feature (1)..(126): NCBI GI NO: 33411641 NR Description: GID2 [Oryza sativa (japonica cultivar-group)]
  misc_feature (1)..(121): NCBI GI NO: 15238908 NR Description: putative protein; protein id: At5g48170.1
MKKTTEEDSEIGFANLDENLLYEVLKHVDARTLATSSCVSKIWHRTAQDERLWELICTRHWANIGCSQHQLRFVVLALGGFKQLHSLYLWPLSSPNQHGRLGKDELKLSLSLLSIRYYEKMNFTKRLP

SEQ ID NO: 126 - DNA, 618 bp, Brassica napus
  misc_feature (1)..(618): Ceres Seq. ID no. 12557027
aagaccgtccattgtgagtcggttgcaaaaatcaacatagatgggaaaaaatctcaccttgaatcctttttgattgaaataaaatctcaaattcgatcaaagaaatgcaaacatcatctgttcctcctggaagaagtctctacctcaacctcatcgtcgtcgtcttagcgctctttgcatcgatcaccatggcagaatccaccggagaagcatcgtccgaagcgaaggtccacatcatctacaccgagaaacccaccgatgaggaacctaaagactatcatctccgtactctctcctccgctctcggcagtgaggaagcagcaaaggacgctctgatctacagttacaaggaagctgcttctggtttctcagctaagctcacacctgagcaagtcaccaagatctccaaactaccaggtgtgattcaagttgtgccgagccagacctaccagttgcacaaacctgttggtgctggtttcaagctgacttaactaaaatgtagcttcttgttgttgtaaatgtcgtggctttcagaactggtatctaactataataatgccatgaatttgctagagttctgtgttgttgagaaattgggttttataattatattatttt

SEQ ID NO: 127 - protein, 128 aa, Brassica napus
  peptide (1)..(128): Ceres Seq. ID no. 12557028
  misc_feature (41)..(118): Pfam Name: Pfam Description:  Subtilisin N-terminal Region
  misc_feature (1)..(128): NCBI GI NO: 18409953 NR Description: expressed protein; protein id: At1g71950
  misc_feature (1)..(128): NCBI GI NO: 21593285 NR Description: unknown [Arabidopsis thaliana]
  misc_feature (29)..(118): NCBI GI NO: 7489176 NR Description: pit2 protein
  misc_feature (18)..(118): NCBI GI NO: 3204125 NR Description: putative Pi starvation-induced protein
  misc_feature (20)..(115): NCBI GI NO: 34394844 NR Description: unknown protein
  misc_feature (13)..(117): NCBI GI NO: 4115920 NR Description: similar to the subtilase family of serine proteases
  misc_feature (13)..(117): NCBI GI NO: 18413353 NR Description: subtilisin-like serine protease
  misc_feature (13)..(117): NCBI GI NO: 7435680 NR Description: subtilisin-like proteinase homolog T4F9
  misc_feature (18)..(117): NCBI GI NO: 18413349 NR Description: subtilisin-like serine protease
  misc_feature (18)..(117): NCBI GI NO: 18413347 NR Description: subtilisin-like serine protease
MQTSSVPPGRSLYLNLIVVVLALFASITMAESTGEASSEAKVHIIYTEKPTDEEPKDYHLRTLSSALGSEEAAKDALIYSYKEAASGFSAKLTPEQVTKISKLPGVIQVVPSQTYQLHKPVGAGFKLT

SEQ ID NO: 128 - protein, 100 aa, Brassica napus
  peptide (1)..(100): Ceres Seq. ID no. 12557029
  misc_feature (13)..(90): Pfam Name: Pfam Description:  Subtilisin N-terminal Region
  misc_feature (1)..(100): NCBI GI NO: 18409953 NR Description: expressed protein; protein id: At1g71950
  misc_feature (1)..(100): NCBI GI NO: 21593285 NR Description: unknown [Arabidopsis thaliana]
  misc_feature (1)..(90): NCBI GI NO: 7489176 NR Description: pit2 protein
  misc_feature (1)..(90): NCBI GI NO: 3204125 NR Description: putative Pi starvation-induced protein
  misc_feature (1)..(87): NCBI GI NO: 34394844 NR Description: unknown protein
  misc_feature (1)..(89): NCBI GI NO: 4115920 NR Description: similar to the subtilase family of serine proteases
  misc_feature (1)..(89): NCBI GI NO: 18413353 NR Description: subtilisin-like serine protease
  misc_feature (1)..(89): NCBI GI NO: 7435680 NR Description: subtilisin-like proteinase homolog T4F9
  misc_feature (1)..(89): NCBI GI NO: 18413349 NR Description: subtilisin-like serine protease
  misc_feature (1)..(89): NCBI GI NO: 18413347 NR Description: subtilisin-like serine protease
MAESTGEASSEAKVHIIYTEKPTDEEPKDYHLRTLSSALGSEEAAKDALIYSYKEAASGFSAKLTPEQVTKISKLPGVIQVVPSQTYQLHKPVGAGFKLT

SEQ ID NO: 129 - DNA, 1017 bp, Brassica napus
  misc_feature (1)..(1017): Ceres Seq. ID no. 12472913
  misc_feature (850)..(850): n is a, c, t, g, unknown, or other
  misc_feature (589)..(589): n is a, c, t, g, unknown, or other
  misc_feature (580)..(580): n is a, c, t, g, unknown, or other
aactgtcactcgaactccaacaaacagaagatggcgatatggtggcgtggcgtgagatccgcggcggaggcagctaatctgccagcagcatactcattcggtcgatcgattcggtgtttacatcagtatgagacgattcaggcgataccacgcgaggctacggggcgaagagtatcggctcgtgatcggacgattggccggattcccgccgtggttttcacccaatcgcttctcgagacggacgcttcgaagagaggcgtttcgaggaagcagcttttgacggccgataggaagcagatcaagtcgattgttgactctgtgggtctcccgttcttctgttcgactactttcaagctccaggtcagagcggggcaaggttcgtcgtcgctggttgagtcgggtcgtgtacttcccctcaagattcatagagatgaagagagtgggaagatacttaatttagtgttcgtgtgggctaatgatggagagcagctgaaggttgatgttccaattgttttcaaaggattagatgattgtcccggtcttaagaaagggggaaatctacggtcaatgcgaagcactntgaagcttntaggcccagcggaacacattccatcgaaaatcgaagtggatgtgagcaaactggacatagcggacaaagtgttaatgcaagaagttgaattccatccatcgttgaagctgttgagcaagaatgagacattgcctgtgtgtaagattgttgccacaagcccggtcaaagaaccagaagctgttcaagcatagaataagtccttcaactttagaaggagagaagcacccttcaagtcctctctagctacttatttttttgttntagaacgaagcaaattcagtttgaattgctgatcaacaacatatctgtttttgagtctttcttcggaatgttactttaactagtagtatccgattcttcgcaagagtcagaacaacttgaatttggtcgttaccagtgaaaataaaagcccaacaacgacttggtcc

SEQ ID NO: 130 - protein, 259 aa, Brassica napus
  peptide (1)..(259): Ceres Seq. ID no. 12472914
  misc_feature (11)..(259): NCBI GI NO: 15240108 NR Description: putative protein; protein id: At5g66860
  misc_feature (44)..(245): NCBI GI NO: 15236554 NR Description: putative protein; protein id: At4g23620
  misc_feature (44)..(211): NCBI GI NO: 34912284 NR Description: P0451D05.2
  misc_feature (76)..(256): NCBI GI NO: 22961530 NR Description: hypothetical protein [Rhodopseudomonas palustris]
  misc_feature (194)..(194): Xaa is any aa, unknown or other
  misc_feature (197)..(197): Xaa is any aa, unknown or other
NCHSNSNKQKMAIWWRGVRSAAEAANLPAAYSFGRSIRCLHQYETIQAIPREATGRRVSARDRTIGRIPAVVFTQSLLETDASKRGVSRKQLLTADRKQIKSIVDSVGLPFFCSTTFKLQVRAGQGSSSLVESGRVLPLKIHRDEESGKILNLVFVWANDGEQLKVDVPIVFKGLDDCPGLKKGGNLRSMRSTXKLXGPAEHIPSKIEVDVSKLDIADKVLMQEVEFHPSLKLLSKNETLPVCKIVATSPVKEPEAVQA

SEQ ID NO: 131 - protein, 249 aa, Brassica napus
  peptide (1)..(249): Ceres Seq. ID no. 12472915
  misc_feature (1)..(249): NCBI GI NO: 15240108 NR Description: putative protein; protein id: At5g66860
  misc_feature (34)..(235): NCBI GI NO: 15236554 NR Description: putative protein; protein id: At4g23620
  misc_feature (34)..(201): NCBI GI NO: 34912284 NR Description: P0451D05.2
  misc_feature (66)..(246): NCBI GI NO: 22961530 NR Description: hypothetical protein [Rhodopseudomonas palustris]
  misc_feature (184)..(184): Xaa is any aa, unknown or other
  misc_feature (187)..(187): Xaa is any aa, unknown or other
MAIWWRGVRSAAEAANLPAAYSFGRSIRCLHQYETIQAIPREATGRRVSARDRTIGRIPAVVFTQSLLETDASKRGVSRKQLLTADRKQIKSIVDSVGLPFFCSTTFKLQVRAGQGSSSLVESGRVLPLKIHRDEESGKILNLVFVWANDGEQLKVDVPIVFKGLDDCPGLKKGGNLRSMRSTXKLXGPAEHIPSKIEVDVSKLDIADKVLMQEVEFHPSLKLLSKNETLPVCKIVATSPVKEPEAVQA

SEQ ID NO: 132 - DNA, 945 bp, Brassica napus
  misc_feature (1)..(945): Ceres Seq. ID no. 12472626
  misc_feature (613)..(613): n is a, c, t, g, unknown, or other
aaaatcttcgatggaaacactttctcctcctctacgagacgacgatgaggaaaacgaagtagacgaagccaaaatgctcctcatcggtgagaacggaaccaacggtgagagtttctctcctctgtccgacggtgcaccggagctccagcagtacactatccgctccatcgagtcaacggtcgtgattcgtcaactaacatcacagggtctctccttccagctctggccagccgcttctactttcgtcgcgcttctcgataactaccgcctcgaccctaccaacagccccctcgccgcaacactctcctcgctgaaacccgccggctctacgactactactacaccgatgaacattctcgagctcggatccggaaccggcgtcgtcggaatcgccgcggcgatcactctttccgctaacgtcacggtgacggatctcccgcacgtcctcgacaacctcagcttcaacgcagaggcgaacgctcagactgtggcgagattcggcggtcaagtccacgcggcaccgctccgttggggagaggctgatgacgtggagattctggggcggaacgttgacttggttgtagcatctgacgtggtgtaccacgaccatctntacgagcctctcctgaaaacgctgcgtttaatggcggcggcgaaggggttagaggggaagaggttgatatttctgatggctcatctgaggaggtggaaaaaagagtctgtcttcttcaagaaagctagaaaggtctttgatgttgacgttatacactctgatgagcctcgaaatggtgcaagaagcggcgttttggtttaccgttttgtcgcgaaacaatcgaatcaaaatggtcggattgtttcgtgttaacagtttgcaaattttcaggattaatttcgtttgatgaatgaaatttctcaaatgtgtttatcaaaagatttccacattat

SEQ ID NO: 133 - protein, 287 aa, Brassica napus
  peptide (1)..(287): Ceres Seq. ID no. 12472627
  misc_feature (10)..(287): NCBI GI NO: 15240506 NR Description: putative protein; protein id: At5g49560.1
  misc_feature (43)..(279): NCBI GI NO: 15230327 NR Description: putative protein; protein id: At3g50850.1
  misc_feature (43)..(279): NCBI GI NO: 26451147 NR Description: unknown protein [Arabidopsis thaliana]
  misc_feature (47)..(277): NCBI GI NO: 33146776 NR Description: unknown protein
  misc_feature (10)..(203): NCBI GI NO: 38567162 NR Description: conserved hypothetical protein [Neurospora crassa]
  misc_feature (60)..(202): NCBI GI NO: 38109737 NR Description: hypothetical protein MG01212.4
  misc_feature (98)..(221): NCBI GI NO: 19075657 NR Description: uv-induced protein uvi22
  misc_feature (31)..(243): NCBI GI NO: 40739926 NR Description: hypothetical protein AN3851.2
  misc_feature (57)..(224): NCBI GI NO: 40746818 NR Description: hypothetical protein AN0945.2
  misc_feature (204)..(204): Xaa is any aa, unknown or other
KSSMETLSPPLRDDDEENEVDEAKMLLIGENGTNGESFSPLSDGAPELQQYTIRSIESTVVIRQLTSQGLSFQLWPAASTFVALLDNYRLDPTNSPLAATLSSLKPAGSTTTTTPMNILELGSGTGVVGIAAAITLSANVTVTDLPHVLDNLSFNAEANAQTVARFGGQVHAAPLRWGEADDVEILGRNVDLVVASDVVYHDHXYEPLLKTLRLMAAAKGLEGKRLIFLMAHLRRWKKESVFFKKARKVFDVDVIHSDEPRNGARSGVLVYRFVAKQSNQNGRIVSC

SEQ ID NO: 134 - protein, 284 aa, Brassica napus
  peptide (1)..(284): Ceres Seq. ID no. 12472628
  misc_feature (7)..(284): NCBI GI NO: 15240506 NR Description: putative protein; protein id: At5g49560.1
  misc_feature (40)..(276): NCBI GI NO: 15230327 NR Description: putative protein; protein id: At3g50850.1
  misc_feature (40)..(276): NCBI GI NO: 26451147 NR Description: unknown protein [Arabidopsis thaliana]
  misc_feature (44)..(274): NCBI GI NO: 33146776 NR Description: unknown protein
  misc_feature (7)..(200): NCBI GI NO: 38567162 NR Description: conserved hypothetical protein [Neurospora crassa]
  misc_feature (57)..(199): NCBI GI NO: 38109737 NR Description: hypothetical protein MG01212.4
  misc_feature (95)..(218): NCBI GI NO: 19075657 NR Description: uv-induced protein uvi22
  misc_feature (28)..(240): NCBI GI NO: 40739926 NR Description: hypothetical protein AN3851.2
  misc_feature (54)..(221): NCBI GI NO: 40746818 NR Description: hypothetical protein AN0945.2
  misc_feature (201)..(201): Xaa is any aa, unknown or other
METLSPPLRDDDEENEVDEAKMLLIGENGTNGESFSPLSDGAPELQQYTIRSIESTVVIRQLTSQGLSFQLWPAASTFVALLDNYRLDPTNSPLAATLSSLKPAGSTTTTTPMNILELGSGTGVVGIAAAITLSANVTVTDLPHVLDNLSFNAEANAQTVARFGGQVHAAPLRWGEADDVEILGRNVDLVVASDVVYHDHXYEPLLKTLRLMAAAKGLEGKRLIFLMAHLRRWKKESVFFKKARKVFDVDVIHSDEPRNGARSGVLVYRFVAKQSNQNGRIVSC

SEQ ID NO: 135 - protein, 263 aa, Brassica napus
  peptide (1)..(263): Ceres Seq. ID no. 12472629
  misc_feature (1)..(263): NCBI GI NO: 15240506 NR Description: putative protein; protein id: At5g49560.1
  misc_feature (19)..(255): NCBI GI NO: 15230327 NR Description: putative protein; protein id: At3g50850.1
  misc_feature (19)..(255): NCBI GI NO: 26451147 NR Description: unknown protein [Arabidopsis thaliana]
  misc_feature (23)..(253): NCBI GI NO: 33146776 NR Description: unknown protein
  misc_feature (1)..(179): NCBI GI NO: 38567162 NR Description: conserved hypothetical protein [Neurospora crassa]
  misc_feature (36)..(178): NCBI GI NO: 38109737 NR Description: hypothetical protein MG01212.4
  misc_feature (74)..(197): NCBI GI NO: 19075657 NR Description: uv-induced protein uvi22
  misc_feature (7)..(219): NCBI GI NO: 40739926 NR Description: hypothetical protein AN3851.2
  misc_feature (33)..(200): NCBI GI NO: 40746818 NR Description: hypothetical protein AN0945.2
  misc_feature (180)..(180): Xaa is any aa, unknown or other
MLLIGENGTNGESFSPLSDGAPELQQYTIRSIESTVVIRQLTSQGLSFQLWPAASTFVALLDNYRLDPTNSPLAATLSSLKPAGSTTTTTPMNILELGSGTGVVGIAAAITLSANVTVTDLPHVLDNLSFNAEANAQTVARFGGQVHAAPLRWGEADDVEILGRNVDLVVASDVVYHDHXYEPLLKTLRLMAAAKGLEGKRLIFLMAHLRRWKKESVFFKKARKVFDVDVIHSDEPRNGARSGVLVYRFVAKQSNQNGRIVSC

SEQ ID NO: 136 - DNA, 945 bp, Brassica napus
  misc_feature (1)..(945): Ceres Seq. ID no. 12472003
  misc_feature (934)..(934): n is a, c, t, g, unknown, or other
  misc_feature (738)..(738): n is a, c, t, g, unknown, or other
  misc_feature (548)..(548): n is a, c, t, g, unknown, or other
  misc_feature (589)..(589): n is a, c, t, g, unknown, or other
caccgtgtcaccgcttttgaagtaacaatgccgcagggagattacatcgagctgcaccagaagaggcatggacgccgcctcgattacgaggagcgcaagcgcaagaaggaggcgcgtgcagttcacaagcgctccaaacaagctcaaaactctataggtataaagggtaagatgattgctaagaagaactacgctgagaaagctcaaatgaagaaaacattgaagatgcatgaggagagttcatcaaggcgtaaagctgatgaggatgttcaggaaggagctgttcctgcttatcttcttgatcgtgagaacacctctcgtgccaaggttcttagcaatactattaaacagaagaggaaggagaaagctgggaagtgggaggttcctctgccaaaggttcgtcctgtggctgaagatgagatgttcagagtgatcagatccgggaagaggaaaacaaaacagtggaagaggatggttacgaaagctacatttgttggacctggtttcacaaggaagccgccaaagtacgagcgattcatccgcccttntgggctgcgtttcaccaaggcccacgtcactcaccctgagntaagatgcactttttgtctcgagatcattgggatcaagaagaatcccaacggtcctatgtatacgtcccttggtgtcatgaccagaggaacaatcattgaggtcaatgtgagtgagcttggtcttgttacaccagctggaaaagttgtntgggggaagtacgctcaggtgacaaacaatcctgagaatgacggatgtataaacgctgttctgcttgtgtaatcaaaatctccggcaagaataacgttgtttactttcttttttagttctctcctgaaaacaattttgtctttgactcgagtcttttatgtatctgtgtggtttaatacaatttaagcaaagcctnttttccgtttc

SEQ ID NO: 137 - protein, 269 aa, Brassica napus
  peptide (1)..(269): Ceres Seq. ID no. 12472004
  misc_feature (10)..(246): Pfam Name: Pfam Description:  Ribosomal protein S8e
  misc_feature (10)..(269): NCBI GI NO: 15240023 NR Description: putative protein; protein id: At5g06360
  misc_feature (10)..(269): NCBI GI NO: 21553587 NR Description: unknown [Arabidopsis thaliana]
  misc_feature (10)..(269): NCBI GI NO: 33146852 NR Description: putative TGF
  misc_feature (10)..(269): NCBI GI NO: 7662677 NR Description: hypothetical protein YR-29
  misc_feature (10)..(269): NCBI GI NO: 34925411 NR Description: TGF beta-inducible nuclear protein 1
  misc_feature (10)..(269): NCBI GI NO: 34924868 NR Description: TGF beta-inducible nuclear protein 1
  misc_feature (10)..(269): NCBI GI NO: 12856931 NR Description: unnamed protein product [Mus musculus]
  misc_feature (10)..(269): NCBI GI NO: 28278483 NR Description: Similar to RIKEN cDNA 5730427N09 gene
  misc_feature (10)..(269): NCBI GI NO: 29248956 NR Description: GLP_159_37795_38577 [Giardia lamblia ATCC 50803]
  misc_feature (10)..(269): NCBI GI NO: 9438133 NR Description: unknown [Ochlerotatus triseriatus]
  misc_feature (183)..(183): Xaa is any aa, unknown or other
  misc_feature (197)..(197): Xaa is any aa, unknown or other
  misc_feature (246)..(246): Xaa is any aa, unknown or other
HRVTAFEVTMPQGDYIELHQKRHGRRLDYEERKRKKEARAVHKRSKQAQNSIGIKGKMIAKKNYAEKAQMKKTLKMHEESSSRRKADEDVQEGAVPAYLLDRENTSRAKVLSNTIKQKRKEKAGKWEVPLPKVRPVAEDEMFRVIRSGKRKTKQWKRMVTKATFVGPGFTRKPPKYERFIRPXGLRFTKAHVTHPEXRCTFCLEIIGIKKNPNGPMYTSLGVMTRGTIIEVNVSELGLVTPAGKVXWGKYAQVTNNPENDGCINAVLLV

SEQ ID NO: 138 - protein, 260 aa, Brassica napus
  peptide (1)..(260): Ceres Seq. ID no. 12472005
  misc_feature (1)..(237): Pfam Name: Pfam Description:  Ribosomal protein S8e
  misc_feature (1)..(260): NCBI GI NO: 15240023 NR Description: putative protein; protein id: At5g06360
  misc_feature (1)..(260): NCBI GI NO: 21553587 NR Description: unknown [Arabidopsis thaliana]
  misc_feature (1)..(260): NCBI GI NO: 33146852 NR Description: putative TGF
  misc_feature (1)..(260): NCBI GI NO: 7662677 NR Description: hypothetical protein YR-29
  misc_feature (1)..(260): NCBI GI NO: 34925411 NR Description: TGF beta-inducible nuclear protein 1
  misc_feature (1)..(260): NCBI GI NO: 34924868 NR Description: TGF beta-inducible nuclear protein 1
  misc_feature (1)..(260): NCBI GI NO: 12856931 NR Description: unnamed protein product [Mus musculus]
  misc_feature (1)..(260): NCBI GI NO: 28278483 NR Description: Similar to RIKEN cDNA 5730427N09 gene
  misc_feature (1)..(260): NCBI GI NO: 29248956 NR Description: GLP_159_37795_38577 [Giardia lamblia ATCC 50803]
  misc_feature (1)..(260): NCBI GI NO: 9438133 NR Description: unknown [Ochlerotatus triseriatus]
  misc_feature (174)..(174): Xaa is any aa, unknown or other
  misc_feature (188)..(188): Xaa is any aa, unknown or other
  misc_feature (237)..(237): Xaa is any aa, unknown or other
MPQGDYIELHQKRHGRRLDYEERKRKKEARAVHKRSKQAQNSIGIKGKMIAKKNYAEKAQMKKTLKMHEESSSRRKADEDVQEGAVPAYLLDRENTSRAKVLSNTIKQKRKEKAGKWEVPLPKVRPVAEDEMFRVIRSGKRKTKQWKRMVTKATFVGPGFTRKPPKYERFIRPXGLRFTKAHVTHPEXRCTFCLEIIGIKKNPNGPMYTSLGVMTRGTIIEVNVSELGLVTPAGKVXWGKYAQVTNNPENDGCINAVLLV

SEQ ID NO: 139 - protein, 212 aa, Brassica napus
  peptide (1)..(212): Ceres Seq. ID no. 12472006
  misc_feature (1)..(189): Pfam Name: Pfam Description:  Ribosomal protein S8e
  misc_feature (1)..(212): NCBI GI NO: 7662677 NR Description: hypothetical protein YR-29
  misc_feature (1)..(212): NCBI GI NO: 34925411 NR Description: TGF beta-inducible nuclear protein 1
  misc_feature (1)..(212): NCBI GI NO: 34924868 NR Description: TGF beta-inducible nuclear protein 1
  misc_feature (1)..(212): NCBI GI NO: 12856931 NR Description: unnamed protein product [Mus musculus]
  misc_feature (1)..(212): NCBI GI NO: 28278483 NR Description: Similar to RIKEN cDNA 5730427N09 gene
  misc_feature (1)..(212): NCBI GI NO: 29248956 NR Description: GLP_159_37795_38577 [Giardia lamblia ATCC 50803]
  misc_feature (1)..(212): NCBI GI NO: 9438133 NR Description: unknown [Ochlerotatus triseriatus]
  misc_feature (1)..(212): NCBI GI NO: 15240023 NR Description: putative protein; protein id: At5g06360
  misc_feature (1)..(212): NCBI GI NO: 21553587 NR Description: unknown [Arabidopsis thaliana]
  misc_feature (1)..(212): NCBI GI NO: 33146852 NR Description: putative TGF
  misc_feature (126)..(126): Xaa is any aa, unknown or other
  misc_feature (140)..(140): Xaa is any aa, unknown or other
  misc_feature (189)..(189): Xaa is any aa, unknown or other
MIAKKNYAEKAQMKKTLKMHEESSSRRKADEDVQEGAVPAYLLDRENTSRAKVLSNTIKQKRKEKAGKWEVPLPKVRPVAEDEMFRVIRSGKRKTKQWKRMVTKATFVGPGFTRKPPKYERFIRPXGLRFTKAHVTHPEXRCTFCLEIIGIKKNPNGPMYTSLGVMTRGTIIEVNVSELGLVTPAGKVXWGKYAQVTNNPENDGCINAVLLV

SEQ ID NO: 140 - DNA, 905 bp, Brassica napus
  misc_feature (1)..(905): Ceres Seq. ID no. 12471935
  misc_feature (885)..(885): n is a, c, t, g, unknown, or other
accacttaatatatgtatatgaatccatctcttcttcataaattcccacgaccatcggaccaaagaatcatacccctcctttctagccattcaaactagtaaacaatggggatactcaggaagaaaaaacacgagcgaaagccgtcgtttaagagtgttttaaccgcaatattagctacacatgccgcaacattcctcttgttgatcgccggtgtatccctcgccggcacagccgccgcatttatcgctaccatgccactattcgtagtattcagtccgattctcgtaccagctggtattaccactggtttactgactacgggtttagcagccgccggtggcgccggcgcgactgctgtcaccatcatcctgtggctctacaagcgagcaacgggcaaggcgccgccaaaagtcctagaaaaagtcttgaaaaagataataccaggtgctgcagctgcaccagcagccgctccaggagccgctccagcagcggcgccagcagccgcaccagctgtggcgccagcagccgcaccagctgctgcgccagcacctaagccagcagccccaccagcacctaagccagcagccgcaccgagtatatgaaaagaagtggtgggcatgagtaaaggttgatatggaaaactggatacatagaaaaaagagtaatccaacttttaaaaaataaataacaacttcacgtggggatagaaaaattttcaaatattattttactaatggatgtcgcggtacaaaataataacaaatgtaagcctttttattgtatagtattttaagaacgaagctatgtagcgttgacatttgtaccttattcaagttcaactatattattctagttcttttttcaccaatcctactatataaaanaagctaaattggagctttct

SEQ ID NO: 141 - protein, 165 aa, Brassica napus
  peptide (1)..(165): Ceres Seq. ID no. 12471936
  misc_feature (14)..(131): Pfam Name: Pfam Description:  Oleosin
  misc_feature (1)..(165): NCBI GI NO: 1076453 NR Description: oleosin - rape
  misc_feature (1)..(156): NCBI GI NO: 1076452 NR Description: oleosin - rape
  misc_feature (1)..(156): NCBI GI NO: 123952 NR Description: MICROSPORE-SPECIFIC PROTEIN I3
  misc_feature (1)..(144): NCBI GI NO: 7488519 NR Description: anther-specific protein BNA237 - turnip
  misc_feature (11)..(147): NCBI GI NO: 15081213 NR Description: glycine-rich protein GRP20 [Arabidopsis thaliana]
  misc_feature (11)..(153): NCBI GI NO: 15240816 NR Description: glycine-rich protein GRP20; protein id: At5g07560
  misc_feature (11)..(145): NCBI GI NO: 15081227 NR Description: glycine-rich protein GRP20 [Arabidopsis thaliana]
  misc_feature (11)..(141): NCBI GI NO: 15081220 NR Description: glycine-rich protein GRP20 [Arabidopsis thaliana]
  misc_feature (56)..(144): NCBI GI NO: 7488475 NR Description: oleosin-like protein OLN8 - rape (fragment)
  misc_feature (55)..(144): NCBI GI NO: 7488470 NR Description: oleosin-like protein OLN10 - rape (fragment)
MGILRKKKHERKPSFKSVLTAILATHAATFLLLIAGVSLAGTAAAFIATMPLFVVFSPILVPAGITTGLLTTGLAAAGGAGATAVTIILWLYKRATGKAPPKVLEKVLKKIIPGAAAAPAAAPGAAPAAAPAAAPAVAPAAAPAAAPAPKPAAPPAPKPAAAPSI

SEQ ID NO: 142 - protein, 116 aa, Brassica napus
  peptide (1)..(116): Ceres Seq. ID no. 12471937
  misc_feature (1)..(82): Pfam Name: Pfam Description:  Oleosin
  misc_feature (1)..(116): NCBI GI NO: 1076453 NR Description: oleosin - rape
  misc_feature (1)..(107): NCBI GI NO: 1076452 NR Description: oleosin - rape
  misc_feature (1)..(107): NCBI GI NO: 123952 NR Description: MICROSPORE-SPECIFIC PROTEIN I3
  misc_feature (1)..(95): NCBI GI NO: 7488519 NR Description: anther-specific protein BNA237 - turnip
  misc_feature (1)..(98): NCBI GI NO: 15081213 NR Description: glycine-rich protein GRP20 [Arabidopsis thaliana]
  misc_feature (1)..(104): NCBI GI NO: 15240816 NR Description: glycine-rich protein GRP20; protein id: At5g07560
  misc_feature (1)..(96): NCBI GI NO: 15081227 NR Description: glycine-rich protein GRP20 [Arabidopsis thaliana]
  misc_feature (1)..(92): NCBI GI NO: 15081220 NR Description: glycine-rich protein GRP20 [Arabidopsis thaliana]
  misc_feature (7)..(95): NCBI GI NO: 7488475 NR Description: oleosin-like protein OLN8 - rape (fragment)
  misc_feature (6)..(95): NCBI GI NO: 7488470 NR Description: oleosin-like protein OLN10 - rape (fragment)
MPLFVVFSPILVPAGITTGLLTTGLAAAGGAGATAVTIILWLYKRATGKAPPKVLEKVLKKIIPGAAAAPAAAPGAAPAAAPAAAPAVAPAAAPAAAPAPKPAAPPAPKPAAAPSI

SEQ ID NO: 143 - DNA, 608 bp, Brassica napus
  misc_feature (1)..(608): Ceres Seq. ID no. 12556889
attttttcatgttctgtggatgttagaaataaaacaaaggagattggtctgggagaaagaagcaaagaagaaaaatggcagcaacatttgcagctccatcgacagtgataggtctcggaggatcatctgtttctcccatcaaggccaaagctctctcttcatcctttttgaaaccaacattaagagcaaagaaccctctgaaagtcgccggagcatcaggaggaagattcacttgctttgagaggaactggctgaggagagatctgaacgtggtggggttcgggcttgtcggatggctagctccgtctagcattccggcgataaacgggaagagcctgacgggtctcttctttgagagcataggaactgagctcgctcacttcccaactcctccagctctcacgtcacagttctggttgtggctgatcacctggcacttaggcctcttcatatgcctcaccttcggacaaatcggatttaagggcaggactgaagattacttcaagaaataaatcattccctcttgttccatctgtacttattatcttactctctcttggttctctgtgtaatagtatgactctatatgaagctttctttcgattcct

SEQ ID NO: 144 - protein, 145 aa, Brassica napus
  peptide (1)..(145): Ceres Seq. ID no. 12556890
  misc_feature (1)..(143): NCBI GI NO: 18390888 NR Description: expressed protein; protein id: At1g08380
  misc_feature (1)..(143): NCBI GI NO: 22531014 NR Description: expressed protein [Arabidopsis thaliana]
  misc_feature (1)..(145): NCBI GI NO: 6996562 NR Description: putative 16kDa membrane protein
MAATFAAPSTVIGLGGSSVSPIKAKALSSSFLKPTLRAKNPLKVAGASGGRFTCFERNWLRRDLNVVGFGLVGWLAPSSIPAINGKSLTGLFFESIGTELAHFPTPPALTSQFWLWLITWHLGLFICLTFGQIGFKGRTEDYFKK

SEQ ID NO: 145 - protein, 79 aa, Brassica napus
  peptide (1)..(79): Ceres Seq. ID no. 12556891
FFHVLWMLEIKQRRLVWEKEAKKKNGSNICSSIDSDRSRRIICFSHQGQSSLFILFETNIKSKEPSESRRSIRRKIHLL

SEQ ID NO: 146 - protein, 73 aa, Brassica napus
  peptide (1)..(73): Ceres Seq. ID no. 12556892
MLEIKQRRLVWEKEAKKKNGSNICSSIDSDRSRRIICFSHQGQSSLFILFETNIKSKEPSESRRSIRRKIHLL

SEQ ID NO: 147 - DNA, 999 bp, Brassica napus
  misc_feature (1)..(999): Ceres Seq. ID no. 12465955
  misc_feature (548)..(548): n is a, c, t, g, unknown, or other
  misc_feature (897)..(897): n is a, c, t, g, unknown, or other
  misc_feature (927)..(927): n is a, c, t, g, unknown, or other
  misc_feature (807)..(807): n is a, c, t, g, unknown, or other
  misc_feature (616)..(616): n is a, c, t, g, unknown, or other
  misc_feature (587)..(587): n is a, c, t, g, unknown, or other
ataagaaacaatacttccttcgtaatctccgcctcgtatctcttatataactcatctctctaaacctaaaaaatgttcctctccgttaaatctaacggtcatgtcaactaataccgtcgtccctctccgtcgcagatctaacggatatcacactaacggcgtggcctttaacggaatggataatattgtcaagaaaaccgacgactgctacaccaacggcaacggcaacggaggagtagagagaagcaaagcctcgtttctgacatggaccatgcgtgacgctgtctacgtagcgagataccattggataccgtgtttctttgcggtcggagttctgttctttatgggggttgagtacacgctccagatggttccggcgaagtctgagccgttcgatattgggtttgtggccacgcgctctctaaaccgcgtcttggcgagttcaccggatcttaacacccttttagcggctctaaacacggtattcgtagcgatgcaaacgacgtatattgtatggacatggttgatggaaggaagaccacgagccnctatctcggcttgcttcatgtttacttgtcgcggcattnttggttactctactcagctccctctaccncaggattttttaggatcaggagttgattttccggtgggaaacgtctcattcttcctcttctattctggccacgtagccggttcaatgatcgcatccttggacatgaggagaatgcagaggttgagactagcgatgctttttgacatcctcaacatattacaatcgatcagactgctcgggacgagaggacnctacacgatcgatcttgcggtcggagttggcgctgggattctctttgactcattggccgggaagtacgaagagatgatgagcaagagacncaatttagccaatggttttagtttgatttntaaagactcgctagtcaattaatcttttgttttcattttaaatgattagttgaacttgaacatatttgattt

SEQ ID NO: 148 - protein, 282 aa, Brassica napus
  peptide (1)..(282): Ceres Seq. ID no. 12465956
  misc_feature (1)..(282): NCBI GI NO: 18400910 NR Description: expressed protein; protein id: At3g15820
  misc_feature (26)..(282): NCBI GI NO: 13926235 NR Description: AT3g15820/MSJ11_22 [Arabidopsis thaliana]
  misc_feature (3)..(281): NCBI GI NO: 15232701 NR Description: unknown protein; protein id: At3g15830.1
  misc_feature (150)..(150): Xaa is any aa, unknown or other
  misc_feature (163)..(163): Xaa is any aa, unknown or other
  misc_feature (172)..(172): Xaa is any aa, unknown or other
  misc_feature (236)..(236): Xaa is any aa, unknown or other
  misc_feature (266)..(266): Xaa is any aa, unknown or other
  misc_feature (276)..(276): Xaa is any aa, unknown or other
MSTNTVVPLRRRSNGYHTNGVAFNGMDNIVKKTDDCYTNGNGNGGVERSKASFLTWTMRDAVYVARYHWIPCFFAVGVLFFMGVEYTLQMVPAKSEPFDIGFVATRSLNRVLASSPDLNTLLAALNTVFVAMQTTYIVWTWLMEGRPRAXISACFMFTCRGIXGYSTQLPLXQDFLGSGVDFPVGNVSFFLFYSGHVAGSMIASLDMRRMQRLRLAMLFDILNILQSIRLLGTRGXYTIDLAVGVGAGILFDSLAGKYEEMMSKRXNLANGFSLIXKDSLVN

SEQ ID NO: 149 - protein, 257 aa, Brassica napus
  peptide (1)..(257): Ceres Seq. ID no. 12465957
  misc_feature (1)..(257): NCBI GI NO: 18400910 NR Description: expressed protein; protein id: At3g15820
  misc_feature (1)..(257): NCBI GI NO: 13926235 NR Description: AT3g15820/MSJ11_22 [Arabidopsis thaliana]
  misc_feature (1)..(256): NCBI GI NO: 15232701 NR Description: unknown protein; protein id: At3g15830.1
  misc_feature (125)..(125): Xaa is any aa, unknown or other
  misc_feature (138)..(138): Xaa is any aa, unknown or other
  misc_feature (147)..(147): Xaa is any aa, unknown or other
  misc_feature (211)..(211): Xaa is any aa, unknown or other
  misc_feature (241)..(241): Xaa is any aa, unknown or other
  misc_feature (251)..(251): Xaa is any aa, unknown or other
MDNIVKKTDDCYTNGNGNGGVERSKASFLTWTMRDAVYVARYHWIPCFFAVGVLFFMGVEYTLQMVPAKSEPFDIGFVATRSLNRVLASSPDLNTLLAALNTVFVAMQTTYIVWTWLMEGRPRAXISACFMFTCRGIXGYSTQLPLXQDFLGSGVDFPVGNVSFFLFYSGHVAGSMIASLDMRRMQRLRLAMLFDILNILQSIRLLGTRGXYTIDLAVGVGAGILFDSLAGKYEEMMSKRXNLANGFSLIXKDSLVN

SEQ ID NO: 150 - protein, 225 aa, Brassica napus
  peptide (1)..(225): Ceres Seq. ID no. 12465958
  misc_feature (1)..(225): NCBI GI NO: 18400910 NR Description: expressed protein; protein id: At3g15820
  misc_feature (1)..(225): NCBI GI NO: 13926235 NR Description: AT3g15820/MSJ11_22 [Arabidopsis thaliana]
  misc_feature (1)..(224): NCBI GI NO: 15232701 NR Description: unknown protein; protein id: At3g15830.1
  misc_feature (93)..(93): Xaa is any aa, unknown or other
  misc_feature (106)..(106): Xaa is any aa, unknown or other
  misc_feature (115)..(115): Xaa is any aa, unknown or other
  misc_feature (179)..(179): Xaa is any aa, unknown or other
  misc_feature (209)..(209): Xaa is any aa, unknown or other
  misc_feature (219)..(219): Xaa is any aa, unknown or other
MRDAVYVARYHWIPCFFAVGVLFFMGVEYTLQMVPAKSEPFDIGFVATRSLNRVLASSPDLNTLLAALNTVFVAMQTTYIVWTWLMEGRPRAXISACFMFTCRGIXGYSTQLPLXQDFLGSGVDFPVGNVSFFLFYSGHVAGSMIASLDMRRMQRLRLAMLFDILNILQSIRLLGTRGXYTIDLAVGVGAGILFDSLAGKYEEMMSKRXNLANGFSLIXKDSLVN

SEQ ID NO: 151 - DNA, 1826 bp, Arabidopsis thaliana
  misc_feature (1)..(1826): Ceres Seq. ID no. 13646221
atttgctcactcccattctccagttgtggaaaccccccaaagacatggcatttgaaccttttgagtcatcatcagcgtattcattcacacgacgatttatagaatgtggtgtttgtcctgctttaaaccttccactaaacatgatccctctgaggatcgttttgaagaagaaacaaatatcgttacaggtatttctctgtatgaagatgtcatcttacgtcagagaagatcagaagctgatcagatagaatgggctattcaagatagcttcaacccgcaagaaacttctcgttgtcgtcagcgagaggaggatgatcagatagcgcgtggtttgcaatatgtggaagaaactgagcttgataaatcagttgtggacgaagaagatcagcagctttctaagattgttgaggagagtttgaaggagaaaggcaaaagtaagcaatttgaagatgatcaagtggaaaatgatgaacagcaagctctgatggttcaggagagtctatacatggtggagctttctgctcaacttgaagaagataaaaacatttcaacaatacctccgctgaatgaagatgcgcagcttcagaaggttatttgggaaagcgcgaagggtaaaggccaaatagagcatttcaaagatccagtggaagaagatggaaatcttccaagggtagatctcaacgttaaccatcctcatagcatatgtgatggttgcaaatctgcgattgaatatggaagatctgttcatgccttgggtgttaattggcatcctgaatgtttctgttgtcgttattgcgacaaaccaatcgctatgcacgagttttcaaacacaaaagggaggtgtcatataacctgctacgagcgtagtcacccaaactgccatgtctgcaaaaagaagtttcctggtagaaagtataaagaacatcccttctggaaggaaaagtactgcccttttcatgaagttgatggaactcccaagtgttgcagttgtgaaagattagagccctggggaacgaagtatgtaatgcttgctgacaatcggtggctatgcgtaaaatgtatggaatgcgcggttatggatacttatgagtgccaaccattgcactttgaaatccgtgaaatcttcggaagcttaaacatgaaggttgagaaagaattccctcttcttttggtggagaaagaagcgctgaaaaaagctgaggcgcaagaaaagatcgacaatcagcatggggttgtaaccagaggtatttgcctgtctgaagggcagattgtcaatagtgtctttaaaaagccaaccatggggccaaacggcgagctagtaagcttgggtacagaacctcaaaaggttgttggtggatgtgaggtcactgcaattctcatcctatatggacttcctaggttactaactggatatatcttggctcatgagatgatgcatgcttggcttagactcaatggttataggaatcttaagttagagctggaagaaggaatatgccaagtgctaggccacatgtggttggagtcacagacatactccagttctgcagctgcatcatcagcttcttcttcttcgaggactccagctgctaatgcatcaaagaaaggtgctcaatctgattacgagaagaaactggtggaattttgcaaggatcagatagaaacagacgattcaccggtctacggtgttggattcaggaaagttaaccagatggtctcaaactccagcctccataaaatcctgaaaagtattcaacactggacgaaaccagattcaaatctttgaagcacctaatataggacaaatcgaaacataccttatcgat

SEQ ID NO: 152 - protein, 560 aa, Arabidopsis thaliana
  peptide (1)..(560): Ceres Seq. ID no. 13646222
  misc_feature (65)..(560): NCBI GI NO: 15240017 NR Description: expressed protein [Arabidopsis thaliana]
  misc_feature (17)..(550): NCBI GI NO: 15240018 NR Description: hypothetical protein [Arabidopsis thaliana]
  misc_feature (1)..(271): NCBI GI NO: 15240017 NR Description: expressed protein [Arabidopsis thaliana]
  misc_feature (178)..(550): NCBI GI NO: 27808630 NR Description: At5g66630 [Arabidopsis thaliana]
  misc_feature (178)..(550): NCBI GI NO: 30698240 NR Description: expressed protein [Arabidopsis thaliana]
  misc_feature (15)..(550): NCBI GI NO: 22326876 NR Description: disease resistance protein
  misc_feature (110)..(560): NCBI GI NO: 8843722 NR Description: emb|CAB16816
  misc_feature (44)..(551): NCBI GI NO: 17065046 NR Description: Unknown protein [Arabidopsis thaliana]
  misc_feature (120)..(560): NCBI GI NO: 30698242 NR Description: expressed protein [Arabidopsis thaliana]
  misc_feature (237)..(550): NCBI GI NO: 10177891 NR Description: emb|CAB16816
MWCLSCFKPSTKHDPSEDRFEEETNIVTGISLYEDVILRQRRSEADQIEWAIQDSFNPQETSRCRQREEDDQIARGLQYVEETELDKSVVDEEDQQLSKIVEESLKEKGKSKQFEDDQVENDEQQALMVQESLYMVELSAQLEEDKNISTIPPLNEDAQLQKVIWESAKGKGQIEHFKDPVEEDGNLPRVDLNVNHPHSICDGCKSAIEYGRSVHALGVNWHPECFCCRYCDKPIAMHEFSNTKGRCHITCYERSHPNCHVCKKKFPGRKYKEHPFWKEKYCPFHEVDGTPKCCSCERLEPWGTKYVMLADNRWLCVKCMECAVMDTYECQPLHFEIREIFGSLNMKVEKEFPLLLVEKEALKKAEAQEKIDNQHGVVTRGICLSEGQIVNSVFKKPTMGPNGELVSLGTEPQKVVGGCEVTAILILYGLPRLLTGYILAHEMMHAWLRLNGYRNLKLELEEGICQVLGHMWLESQTYSSSAAASSASSSSRTPAANASKKGAQSDYEKKLVEFCKDQIETDDSPVYGVGFRKVNQMVSNSSLHKILKSIQHWTKPDSNL

SEQ ID NO: 153 - protein, 433 aa, Arabidopsis thaliana
  peptide (1)..(433): Ceres Seq. ID no. 13646223
  misc_feature (1)..(433): NCBI GI NO: 15240017 NR Description: expressed protein [Arabidopsis thaliana]
  misc_feature (1)..(423): NCBI GI NO: 15240018 NR Description: hypothetical protein [Arabidopsis thaliana]
  misc_feature (1)..(144): NCBI GI NO: 15240017 NR Description: expressed protein [Arabidopsis thaliana]
  misc_feature (51)..(423): NCBI GI NO: 27808630 NR Description: At5g66630 [Arabidopsis thaliana]
  misc_feature (51)..(423): NCBI GI NO: 30698240 NR Description: expressed protein [Arabidopsis thaliana]
  misc_feature (1)..(423): NCBI GI NO: 22326876 NR Description: disease resistance protein
  misc_feature (1)..(433): NCBI GI NO: 8843722 NR Description: emb|CAB16816
  misc_feature (1)..(424): NCBI GI NO: 17065046 NR Description: Unknown protein [Arabidopsis thaliana]
  misc_feature (1)..(433): NCBI GI NO: 30698242 NR Description: expressed protein [Arabidopsis thaliana]
  misc_feature (110)..(423): NCBI GI NO: 10177891 NR Description: emb|CAB16816
MVQESLYMVELSAQLEEDKNISTIPPLNEDAQLQKVIWESAKGKGQIEHFKDPVEEDGNLPRVDLNVNHPHSICDGCKSAIEYGRSVHALGVNWHPECFCCRYCDKPIAMHEFSNTKGRCHITCYERSHPNCHVCKKKFPGRKYKEHPFWKEKYCPFHEVDGTPKCCSCERLEPWGTKYVMLADNRWLCVKCMECAVMDTYECQPLHFEIREIFGSLNMKVEKEFPLLLVEKEALKKAEAQEKIDNQHGVVTRGICLSEGQIVNSVFKKPTMGPNGELVSLGTEPQKVVGGCEVTAILILYGLPRLLTGYILAHEMMHAWLRLNGYRNLKLELEEGICQVLGHMWLESQTYSSSAAASSASSSSRTPAANASKKGAQSDYEKKLVEFCKDQIETDDSPVYGVGFRKVNQMVSNSSLHKILKSIQHWTKPDSNL

SEQ ID NO: 154 - protein, 426 aa, Arabidopsis thaliana
  peptide (1)..(426): Ceres Seq. ID no. 13646224
  misc_feature (1)..(426): NCBI GI NO: 15240017 NR Description: expressed protein [Arabidopsis thaliana]
  misc_feature (1)..(416): NCBI GI NO: 15240018 NR Description: hypothetical protein [Arabidopsis thaliana]
  misc_feature (1)..(137): NCBI GI NO: 15240017 NR Description: expressed protein [Arabidopsis thaliana]
  misc_feature (44)..(416): NCBI GI NO: 27808630 NR Description: At5g66630 [Arabidopsis thaliana]
  misc_feature (44)..(416): NCBI GI NO: 30698240 NR Description: expressed protein [Arabidopsis thaliana]
  misc_feature (1)..(416): NCBI GI NO: 22326876 NR Description: disease resistance protein
  misc_feature (1)..(426): NCBI GI NO: 8843722 NR Description: emb|CAB16816
  misc_feature (1)..(417): NCBI GI NO: 17065046 NR Description: Unknown protein [Arabidopsis thaliana]
  misc_feature (1)..(426): NCBI GI NO: 30698242 NR Description: expressed protein [Arabidopsis thaliana]
  misc_feature (103)..(416): NCBI GI NO: 10177891 NR Description: emb|CAB16816
MVELSAQLEEDKNISTIPPLNEDAQLQKVIWESAKGKGQIEHFKDPVEEDGNLPRVDLNVNHPHSICDGCKSAIEYGRSVHALGVNWHPECFCCRYCDKPIAMHEFSNTKGRCHITCYERSHPNCHVCKKKFPGRKYKEHPFWKEKYCPFHEVDGTPKCCSCERLEPWGTKYVMLADNRWLCVKCMECAVMDTYECQPLHFEIREIFGSLNMKVEKEFPLLLVEKEALKKAEAQEKIDNQHGVVTRGICLSEGQIVNSVFKKPTMGPNGELVSLGTEPQKVVGGCEVTAILILYGLPRLLTGYILAHEMMHAWLRLNGYRNLKLELEEGICQVLGHMWLESQTYSSSAAASSASSSSRTPAANASKKGAQSDYEKKLVEFCKDQIETDDSPVYGVGFRKVNQMVSNSSLHKILKSIQHWTKPDSNL

SEQ ID NO: 155 - DNA, 849 bp, Arabidopsis thaliana
  misc_feature (1)..(849): Ceres Seq. ID no. 13646254
cactcaagaagacatctaaagccatcaaaaatatatccatagaagcttcatcgaaatggcgaatcaagcagctgctgcagcattcttccttttcgctttagccgtcttctccaacttggagctctcagcttcttcacttgtcagtggcaagatctcttgccttgactgccaccgcgatttcgacttctcaggcattaaggtcctccttaaatgcgacggagagaagaaacaaataaccgcgatggcagctgcagacggatctttccggtcagtgcttccaacggctgacaaaaaaggctccataaattgtcttgcaaagctcttgggaggccctgagcaactctatgctcacaaacacaacttggtctctgaattggtcaagtctaaacacgattccaaagttttaactacctcaaacccacttgccttctctctctcctgccccaaaccatcccgagatgatatcggaaaattaatagtcttggaatctccgatcatacttccgatatcatctcgggatggtttggagcaggagaagaagacagaggtggttgaggagaaacagactgaggttgcggctgctgaggaagtcgccgttgagaaggccgaggagtaaagaggaaggaagaagctatatatgaccttttttggtctcatatcgttttctgtttattttattttatcaacatttcataagtattttctatgtttgttgggtttgttatgatgaaatcagatgtttggatcttttaatggttgctacattgtttacatgcttggtcgtagcaacaaagtacaaacttaaaccgmcaaaaaaaaaaaaaaaaaagcttatcgataccgtcgacc

SEQ ID NO: 156 - protein, 186 aa, Arabidopsis thaliana
  peptide (1)..(186): Ceres Seq. ID no. 15218687
  misc_feature (1)..(141): NCBI GI NO: 18420486 NR Description: expressed protein [Arabidopsis thaliana]
  misc_feature (1)..(141): NCBI GI NO: 21594030 NR Description: unknown [Arabidopsis thaliana]
  misc_feature (1)..(131): NCBI GI NO: 30683502 NR Description: expressed protein [Arabidopsis thaliana]
  misc_feature (157)..(186): NCBI GI NO: 18391349 NR Description: expressed protein [Arabidopsis thaliana]
  misc_feature (157)..(186): NCBI GI NO: 30682601 NR Description: expressed protein [Arabidopsis thaliana]
MANQAAAAAFFLFALAVFSNLELSASSLVSGKISCLDCHRDFDFSGIKVLLKCDGEKKQITAMAAADGSFRSVLPTADKKGSINCLAKLLGGPEQLYAHKHNLVSELVKSKHDSKVLTTSNPLAFSLSCPKPSRDDIGKLIVLESPIILPISSRDGLEQEKKTEVVEEKQTEVAAAEEVAVEKAEE

SEQ ID NO: 157 - protein, 124 aa, Arabidopsis thaliana
  peptide (1)..(124): Ceres Seq. ID no. 15218688
  misc_feature (1)..(79): NCBI GI NO: 18420486 NR Description: expressed protein [Arabidopsis thaliana]
  misc_feature (1)..(79): NCBI GI NO: 21594030 NR Description: unknown [Arabidopsis thaliana]
  misc_feature (1)..(69): NCBI GI NO: 30683502 NR Description: expressed protein [Arabidopsis thaliana]
  misc_feature (95)..(124): NCBI GI NO: 18391349 NR Description: expressed protein [Arabidopsis thaliana]
  misc_feature (95)..(124): NCBI GI NO: 30682601 NR Description: expressed protein [Arabidopsis thaliana]
MAAADGSFRSVLPTADKKGSINCLAKLLGGPEQLYAHKHNLVSELVKSKHDSKVLTTSNPLAFSLSCPKPSRDDIGKLIVLESPIILPISSRDGLEQEKKTEVVEEKQTEVAAAEEVAVEKAEE

SEQ ID NO: 158 - DNA, 1826 bp, Arabidopsis thaliana
  misc_feature (1)..(1826): Ceres Seq. ID no. 13592768
aattcattccattgtcgttacctttttgtttctcagactgttaccttacctgtaaagaagagagttaaagatctattgcaaaaaaactcaacctttaatctctctgcttcttctaattaagtaatttcaactacccttttggcgaaacctctcgatctattggtttggtactgaagaaaccgacttgagtctgatttgtttttggtgaaagccatggaagctataagaaagcaagctgcgaagctcagagagcaagtcgcgaggcaacagcaagcggttttgaagcatttagggcatgttaatgctgatgctgttgttgttgatgaagaagagcttcattgtcatcagaaacttcaagatctttatagctctactaaagctgctaagcgtttgcaaaggaacattgttcgtggacttgaaggtttcattgcgactggcacaaaggttgttgagatagggttgaagtttgctgaagattttaagaaatatggagatgagaatcctgatgctaatactcctctatcaagagtcgcacatcactttgggacctcttacaagtcggtggaagacgagagggaaactctcctcggagttcttagtgagcaggtttgtgagccaattcgtacgatgatatatagtgcgcctttggaggatgctcggcatttggtgaatcactatgacaggctgagacaagaagtcgaagctcaggcaactgatgtactgaggagaagatctaagttgaaggaatctgatatttctgaagaagcctacataaaacttaagaattccgaatcgagattagctgagctcaaatcaagtatgaaaactcttggcaaagaagctactaaggccatgttggaagtcgacgatcagcaacagaacgttacttctcagcgcctccgtgctctggttgaagccgagagatcataccatcgtaatgccctcgatatccttgacaagctacatgctgagatgattgctgaggaagaagctataggagcatcaccaaagtcactgcctttacatttagaggatagtgcttctcttccccaagaagaaccgatttcaaaaccctcgggagaggtcaaatcaaaccccttgggaaagatcaaaggaagtcgtcgagaagaagtcaagtctaatccccaagaagtaaccaaacccaatcccaaggacgaaatgaagtccagtccccaagaagaaaccaaatccaatcatcagaaagaaatcaagtctagtccacaggaagagatcaagaagtccaatggatctgatgatcatcacaatcatcaacttctcagtcagaatgattcctactttcttgcaaaggttgtgcacccgtttgatgctcaagccccaggggaactcagtctcgctgtcgatgattatgtaattgtgcgacaggtggctgggacaggctggtcagaaggagaatacaagggcaaagccggatggttcccgtctgcttacgttgagaaacaagagaaagctccggcgagcaagatcgtggaatcaaacgccaagtaacaatgatccctttctttaacatatacatacaaaaagtatgtgtaagatatgattgtgtttttcttccttcttacctatcttcgtaagtaaagatatgtttccacgagtaaatatgatcttgtaagagttatgatttgtgtgttttcttccttttcttcttatgtatcaacatgagtctaactctagactcttgagtcatatctctacgcagttgtgagaatcctgttttatcttttgtttgataagatcctctgtttcttctgtaatttactctgataatgataatgatctttcttgct

SEQ ID NO: 159 - protein, 437 aa, Arabidopsis thaliana
  peptide (1)..(437): Ceres Seq. ID no. 13592769
  misc_feature (369)..(423): Pfam Name: Pfam Description:  SH3 domain
  misc_feature (1)..(437): NCBI GI NO: 15221714 NR Description: SH3 domain-containing protein 1
  misc_feature (1)..(267): NCBI GI NO: 18418491 NR Description: SH3 domain-containing protein 2
  misc_feature (322)..(433): NCBI GI NO: 18418491 NR Description: SH3 domain-containing protein 2
  misc_feature (1)..(265): NCBI GI NO: 38344978 NR Description: OSJNBa0011L07.8
  misc_feature (328)..(431): NCBI GI NO: 38344978 NR Description: OSJNBa0011L07.8
  misc_feature (1)..(271): NCBI GI NO: 22093679 NR Description: putative SH3
  misc_feature (345)..(431): NCBI GI NO: 22093679 NR Description: putative SH3
  misc_feature (1)..(269): NCBI GI NO: 21928139 NR Description: AT4g18060/F15J5_30 [Arabidopsis thaliana]
  misc_feature (363)..(429): NCBI GI NO: 21928139 NR Description: AT4g18060/F15J5_30 [Arabidopsis thaliana]
  misc_feature (1)..(269): NCBI GI NO: 22328762 NR Description: SH3 domain-containing protein 3
MEAIRKQAAKLREQVARQQQAVLKHLGHVNADAVVVDEEELHCHQKLQDLYSSTKAAKRLQRNIVRGLEGFIATGTKVVEIGLKFAEDFKKYGDENPDANTPLSRVAHHFGTSYKSVEDERETLLGVLSEQVCEPIRTMIYSAPLEDARHLVNHYDRLRQEVEAQATDVLRRRSKLKESDISEEAYIKLKNSESRLAELKSSMKTLGKEATKAMLEVDDQQQNVTSQRLRALVEAERSYHRNALDILDKLHAEMIAEEEAIGASPKSLPLHLEDSASLPQEEPISKPSGEVKSNPLGKIKGSRREEVKSNPQEVTKPNPKDEMKSSPQEETKSNHQKEIKSSPQEEIKKSNGSDDHHNHQLLSQNDSYFLAKVVHPFDAQAPGELSLAVDDYVIVRQVAGTGWSEGEYKGKAGWFPSAYVEKQEKAPASKIVESNAK

SEQ ID NO: 160 - protein, 299 aa, Arabidopsis thaliana
  peptide (1)..(299): Ceres Seq. ID no. 13592770
  misc_feature (231)..(285): Pfam Name: Pfam Description:  SH3 domain
  misc_feature (1)..(127): NCBI GI NO: 38344978 NR Description: OSJNBa0011L07.8
  misc_feature (190)..(293): NCBI GI NO: 38344978 NR Description: OSJNBa0011L07.8
  misc_feature (1)..(133): NCBI GI NO: 22093679 NR Description: putative SH3
  misc_feature (207)..(293): NCBI GI NO: 22093679 NR Description: putative SH3
  misc_feature (1)..(131): NCBI GI NO: 21928139 NR Description: AT4g18060/F15J5_30 [Arabidopsis thaliana]
  misc_feature (225)..(291): NCBI GI NO: 21928139 NR Description: AT4g18060/F15J5_30 [Arabidopsis thaliana]
  misc_feature (1)..(131): NCBI GI NO: 22328762 NR Description: SH3 domain-containing protein 3
  misc_feature (1)..(299): NCBI GI NO: 15221714 NR Description: SH3 domain-containing protein 1
  misc_feature (1)..(129): NCBI GI NO: 18418491 NR Description: SH3 domain-containing protein 2
  misc_feature (184)..(295): NCBI GI NO: 18418491 NR Description: SH3 domain-containing protein 2
MIYSAPLEDARHLVNHYDRLRQEVEAQATDVLRRRSKLKESDISEEAYIKLKNSESRLAELKSSMKTLGKEATKAMLEVDDQQQNVTSQRLRALVEAERSYHRNALDILDKLHAEMIAEEEAIGASPKSLPLHLEDSASLPQEEPISKPSGEVKSNPLGKIKGSRREEVKSNPQEVTKPNPKDEMKSSPQEETKSNHQKEIKSSPQEEIKKSNGSDDHHNHQLLSQNDSYFLAKVVHPFDAQAPGELSLAVDDYVIVRQVAGTGWSEGEYKGKAGWFPSAYVEKQEKAPASKIVESNAK

SEQ ID NO: 161 - protein, 235 aa, Arabidopsis thaliana
  peptide (1)..(235): Ceres Seq. ID no. 13592771
  misc_feature (167)..(221): Pfam Name: Pfam Description:  SH3 domain
  misc_feature (1)..(235): NCBI GI NO: 15221714 NR Description: SH3 domain-containing protein 1
  misc_feature (1)..(65): NCBI GI NO: 18418491 NR Description: SH3 domain-containing protein 2
  misc_feature (120)..(231): NCBI GI NO: 18418491 NR Description: SH3 domain-containing protein 2
  misc_feature (1)..(63): NCBI GI NO: 38344978 NR Description: OSJNBa0011L07.8
  misc_feature (126)..(229): NCBI GI NO: 38344978 NR Description: OSJNBa0011L07.8
  misc_feature (1)..(69): NCBI GI NO: 22093679 NR Description: putative SH3
  misc_feature (143)..(229): NCBI GI NO: 22093679 NR Description: putative SH3
  misc_feature (1)..(67): NCBI GI NO: 21928139 NR Description: AT4g18060/F15J5_30 [Arabidopsis thaliana]
  misc_feature (161)..(227): NCBI GI NO: 21928139 NR Description: AT4g18060/F15J5_30 [Arabidopsis thaliana]
  misc_feature (1)..(67): NCBI GI NO: 22328762 NR Description: SH3 domain-containing protein 3
MKTLGKEATKAMLEVDDQQQNVTSQRLRALVEAERSYHRNALDILDKLHAEMIAEEEAIGASPKSLPLHLEDSASLPQEEPISKPSGEVKSNPLGKIKGSRREEVKSNPQEVTKPNPKDEMKSSPQEETKSNHQKEIKSSPQEEIKKSNGSDDHHNHQLLSQNDSYFLAKVVHPFDAQAPGELSLAVDDYVIVRQVAGTGWSEGEYKGKAGWFPSAYVEKQEKAPASKIVESNAK

SEQ ID NO: 162 - DNA, 1905 bp, Arabidopsis thaliana
  misc_feature (1)..(1905): Ceres Seq. ID no. 13486771
acatcctaatcgaaaatccattaattctgctgctgcaaattctatcgaactggtgagttttgttaatctctttcctcgttcgtccttgtctgtatatcagatcgatctctattaccgttttagcttgttcttgatctttgtcaacataaaaacaatcaaacaaagtttcttctatgagttctggtctgaacgaagatttcctcgattgtatcgtgcgtttagaggagacacatgttcaacaaggcttcgatgagggttacgaagaaggtcttgtgtccggtcgtgaagacgctcgtcatctgggtttgaaactcgggttcgagacaggcgagctgattggattctacagaggttgctctgctctttggaattcagctctccgtattgatcctacacgcttctctcctcagctccataagcatctcaatgatttccatgtcttgctcgataaattcccgcttttggatcccgaggacgaagctaaagacgggatcaaggatgatctcagagtcaaattcagcatcatttgtgcatctctcggcttttccaagaaacaatttgagtataaaggatacccgaatccttcctccaatctcgacttttaagacctccctccatcaaaacactcttgtattgtatgtatggctttcaaagtttctctcgtttcctcaaagttkgtatttttaagagaagtgtgtgtgtagacaatctatgttttattggcttgtccttttttctggacatgtgaatgctgaccacaagtctaaatctggtggataacttcttttttagccttataatgaacaaacaaactcacatctgtagatatatatttgtataggtggtcggaggagatgttgagagaaatgcttggttgttgcaaggtttacatatctgaagcgcggaataagacggccctcgaagccattgagagagctttaaagccttttccaccagctgcaattgtcaacaagtttgaagatgcggcttatggcagggttggttacactgttgtatcctcgcttgctaacgggtcgtcttcttccttgaagaatgcggtgtttgctatggttaagactgctctcgacactatcaatcttgagttgcactgtggatcccatccccgccttggagtggttgaccacatatgctttcaccccttatctcaaacctctatagaacaagtttcttccgttgccaattcccttgcaatggatatcggctccattcttcgagttcctacatatctctatggagcagcagaaaaggagcagtgcaccctggattcgatcagaagaaagctggggtacttcaaggcaaacagggagggacatgaatgggcaggtgggtttgacctggagatggtgccactgaagccagacgcagggccacaagaggtgagcaaagccaaaggggttgtagcggttggggcgtgtgggtgggtaagtaactataacgtgcctgtcatgtcaaacgatctcaaggcagtgaggagaatagcgaggaagacgagcgagagaggagggggcttggcttcagtgcagacaatggcgctggtgcacggggaaggagtcatagaggttgcctgtaacttgttgaatccaagccaagtggggggagatgaagtacagggactgatcgagaggcttggcagagaggaaggtctgcttgtgggaaaagggtattatacggactatacacctgaccagatcgttgaaagatatatggacttgctcaacaattcataaatttcaaagtaaaaaaagtaaaaacagtatgatgttgtcattcttagaacgtattattaccgatatcgatcatttatcttcattttgtgtttagatgtgatatacattgccatgagtgacaattgaaattagcaaagattaaataaaaagtgaaatg

SEQ ID NO: 163 - protein, 297 aa, Arabidopsis thaliana
  peptide (1)..(297): Ceres Seq. ID no. 15218567
  misc_feature (199)..(249): Pfam Name: Pfam Description:  Formiminotransferase domain
  misc_feature (1)..(297): NCBI GI NO: 25411995 NR Description: hypothetical protein At2g20830
  misc_feature (1)..(297): NCBI GI NO: 18399493 NR Description: expressed protein [Arabidopsis thaliana]
  misc_feature (5)..(290): NCBI GI NO: 5734618 NR Description: Similar to Arabidopsis thaliana chromosome II BAC F5H14genomic sequence
  misc_feature (5)..(290): NCBI GI NO: 34898040 NR Description: OSJNBa0038F22.18
  misc_feature (142)..(297): NCBI GI NO: 34897974 NR Description: hypothetical protein~similar to Oryza sativa chromosome 6
  misc_feature (5)..(55): NCBI GI NO: 34897974 NR Description: hypothetical protein~similar to Oryza sativa chromosome 6
  misc_feature (14)..(249): NCBI GI NO: 15643606 NR Description: formiminotransferase- cyclodeaminase/formiminotetrahydrofolate cyclodeaminase
  misc_feature (9)..(249): NCBI GI NO: 28211902 NR Description: glutamate formiminotransferase
  misc_feature (9)..(247): NCBI GI NO: 20806959 NR Description: Glutamate formiminotransferase
  misc_feature (9)..(249): NCBI GI NO: 13540922 NR Description: Glutamate formiminotransferase
MLREMLGCCKVYISEARNKTALEAIERALKPFPPAAIVNKFEDAAYGRVGYTVVSSLANGSSSSLKNAVFAMVKTALDTINLELHCGSHPRLGVVDHICFHPLSQTSIEQVSSVANSLAMDIGSILRVPTYLYGAAEKEQCTLDSIRRKLGYFKANREGHEWAGGFDLEMVPLKPDAGPQEVSKAKGVVAVGACGWVSNYNVPVMSNDLKAVRRIARKTSERGGGLASVQTMALVHGEGVIEVACNLLNPSQVGGDEVQGLIERLGREEGLLVGKGYYTDYTPDQIVERYMDLLNNS

SEQ ID NO: 164 - protein, 293 aa, Arabidopsis thaliana
  peptide (1)..(293): Ceres Seq. ID no. 15218568
  misc_feature (195)..(245): Pfam Name: Pfam Description:  Formiminotransferase domain
  misc_feature (1)..(293): NCBI GI NO: 25411995 NR Description: hypothetical protein At2g20830
  misc_feature (1)..(293): NCBI GI NO: 18399493 NR Description: expressed protein [Arabidopsis thaliana]
  misc_feature (1)..(286): NCBI GI NO: 5734618 NR Description: Similar to Arabidopsis thaliana chromosome II BAC F5H14genomic sequence
  misc_feature (1)..(286): NCBI GI NO: 34898040 NR Description: OSJNBa0038F22.18
  misc_feature (138)..(293): NCBI GI NO: 34897974 NR Description: hypothetical protein~similar to Oryza sativa chromosome 6
  misc_feature (1)..(51): NCBI GI NO: 34897974 NR Description: hypothetical protein~similar to Oryza sativa chromosome 6
  misc_feature (10)..(245): NCBI GI NO: 15643606 NR Description: formiminotransferase- cyclodeaminase/formiminotetrahydrofolate cyclodeaminase
  misc_feature (5)..(245): NCBI GI NO: 28211902 NR Description: glutamate formiminotransferase
  misc_feature (5)..(243): NCBI GI NO: 20806959 NR Description: Glutamate formiminotransferase
  misc_feature (5)..(245): NCBI GI NO: 13540922 NR Description: Glutamate formiminotransferase
MLGCCKVYISEARNKTALEAIERALKPFPPAAIVNKFEDAAYGRVGYTVVSSLANGSSSSLKNAVFAMVKTALDTINLELHCGSHPRLGVVDHICFHPLSQTSIEQVSSVANSLAMDIGSILRVPTYLYGAAEKEQCTLDSIRRKLGYFKANREGHEWAGGFDLEMVPLKPDAGPQEVSKAKGVVAVGACGWVSNYNVPVMSNDLKAVRRIARKTSERGGGLASVQTMALVHGEGVIEVACNLLNPSQVGGDEVQGLIERLGREEGLLVGKGYYTDYTPDQIVERYMDLLNNS

SEQ ID NO: 165 - protein, 226 aa, Arabidopsis thaliana
  peptide (1)..(226): Ceres Seq. ID no. 15218569
  misc_feature (128)..(178): Pfam Name: Pfam Description:  Formiminotransferase domain
  misc_feature (1)..(226): NCBI GI NO: 25411995 NR Description: hypothetical protein At2g20830
  misc_feature (1)..(226): NCBI GI NO: 18399493 NR Description: expressed protein [Arabidopsis thaliana]
  misc_feature (1)..(219): NCBI GI NO: 5734618 NR Description: Similar to Arabidopsis thaliana chromosome II BAC F5H14genomic sequence
  misc_feature (1)..(219): NCBI GI NO: 34898040 NR Description: OSJNBa0038F22.18
  misc_feature (71)..(226): NCBI GI NO: 34897974 NR Description: hypothetical protein~similar to Oryza sativa chromosome 6
  misc_feature (1)..(178): NCBI GI NO: 15643606 NR Description: formiminotransferase- cyclodeaminase/formiminotetrahydrofolate cyclodeaminase
  misc_feature (1)..(178): NCBI GI NO: 28211902 NR Description: glutamate formiminotransferase
  misc_feature (1)..(176): NCBI GI NO: 20806959 NR Description: Glutamate formiminotransferase
  misc_feature (1)..(178): NCBI GI NO: 13540922 NR Description: Glutamate formiminotransferase
  misc_feature (1)..(176): NCBI GI NO: 34540165 NR Description: formiminotransferase- cyclodeaminase-related protein
MVKTALDTINLELHCGSHPRLGVVDHICFHPLSQTSIEQVSSVANSLAMDIGSILRVPTYLYGAAEKEQCTLDSIRRKLGYFKANREGHEWAGGFDLEMVPLKPDAGPQEVSKAKGVVAVGACGWVSNYNVPVMSNDLKAVRRIARKTSERGGGLASVQTMALVHGEGVIEVACNLLNPSQVGGDEVQGLIERLGREEGLLVGKGYYTDYTPDQIVERYMDLLNNS

SEQ ID NO: 166 - DNA, 1690 bp, Arabidopsis thaliana
  misc_feature (1)..(1690): Ceres Seq. ID no. 13647016
tttcttctcttcctcctacattctcgactctctctttttattagggttttcaattttaatcaaaaaaaaaccctcaaatctcatttttggatttggtttcttctgcgatctctgagattcaatttcttctatcaaaggaaacaaaaaacttcatctttccgaagattttttttccttccttctggagctcttttgaatcaggtgaatttctaattgaatctgaaagtttacgatgaacaatttgatatgatgataagttttgtttgatggagctttcaccaacaagcagtgacaagaaaacaatgaagagatggtttttcatagataaacgagttggatagagtgttattgaagataaagaaagcaaaaaacagaagttcttgcattgaagcattggttttagagtttattgaagcattgtttagagttttgattaatggatttaaactcaaaccacaaatcctctgttcttaaagatccttcaccatcagttaaccaatcaagactcggcgtgtctagtagatttatgatgagtcaatggaagaaacctgcgaaactcgatgatgttagatccaatggttggttagatgcaatgatttcatcttctccaccgcgtaagaagcttgtcaaagattttaatgttgaagttgctcctgaagatgattttgctcaacgtgcttggatggtgaaatatccttcggcgattagctcgtttgcgcatattgcagctcaagcaaagaagaaaaagattgctgtatttctagattatgatggtactctttctccaatagttgatgatcctgatcgtgccatcatgtctgatgcaatgcgttctgcggttaaagatgtcgcgagttacttcccaaccgcaataattagcggtagaagccgtgacaaggtttatcagttggtaggactaacagaactttattacgcgggtagtcatggaatggacataatgacttcttctgatggtccgaattgtttcaaatccactgaccaacagggtaaggaagtgaatctgtttcagcccgcgagagaattcataccggttatcgacgaggtttttagaacccttgttgagaaaatgaaagatatcaaaggtgcaaaagtagagaaccacaagttctgtgcatctgtacattaccgtaacgttgacgaaaaggattggcctattattgctcagcgtgttcatgaccacttgaaacaataccctcgtttgcgtctaactcatgggaggaaggttttagaggttcgtcctgtgatagactggaacaaaggaagagcggtcgagtttctattagaatctctcggattaagcaataaagacgatttgcttcctatctacattggtgatgacacaaccgatgaagatgcgttcaaggtactgagagatgggaaccgaggtttcggcatcctagtatcgtctataccgaaagaaagcaatgcgttttactcccttagagatccatccgaggtgaagaagtttctaaagactttggtgaaatgggcaaagttggagaagaattctactggtttttgaataatatagtggaattttatgattaaatgcttatttacacttttttttgtttctttaatcttttttcatctctacccagttttagtcacagcttaatttatgattttccatttatctggtggaagttaagttattaaagttacatgt

SEQ ID NO: 167 - protein, 368 aa, Arabidopsis thaliana
  peptide (1)..(368): Ceres Seq. ID no. 13647017
  misc_feature (108)..(346): Pfam Name: Pfam Description:  Trehalose-phosphatase
  misc_feature (1)..(368): NCBI GI NO: 15234552 NR Description: trehalose-6-phosphate phosphatase, putative
  misc_feature (1)..(368): NCBI GI NO: 15235713 NR Description: trehalose-6-phosphate phosphatase, putative
  misc_feature (5)..(360): NCBI GI NO: 30696058 NR Description: trehalose-6-phosphate phosphatase (TPPA)
  misc_feature (5)..(360): NCBI GI NO: 30696054 NR Description: trehalose-6-phosphate phosphatase (TPPA)
  misc_feature (38)..(358): NCBI GI NO: 37536726 NR Description: putative trehalose-6-phosphate phosphatase
  misc_feature (36)..(361): NCBI GI NO: 18399940 NR Description: trehalose-6-phosphate phosphatase, putative
  misc_feature (36)..(361): NCBI GI NO: 21554408 NR Description: trehalose-phosphatase, putative
  misc_feature (36)..(361): NCBI GI NO: 25354597 NR Description: probable trehalose-phosphatase
  misc_feature (45)..(362): NCBI GI NO: 30683008 NR Description: trehalose-6-phosphate phosphatase, putative
  misc_feature (50)..(360): NCBI GI NO: 15218205 NR Description: trehalose-6-phosphate phosphatase (TPPB)
MDLNSNHKSSVLKDPSPSVNQSRLGVSSRFMMSQWKKPAKLDDVRSNGWLDAMISSSPPRKKLVKDFNVEVAPEDDFAQRAWMVKYPSAISSFAHIAAQAKKKKIAVFLDYDGTLSPIVDDPDRAIMSDAMRSAVKDVASYFPTAIISGRSRDKVYQLVGLTELYYAGSHGMDIMTSSDGPNCFKSTDQQGKEVNLFQPAREFIPVIDEVFRTLVEKMKDIKGAKVENHKFCASVHYRNVDEKDWPIIAQRVHDHLKQYPRLRLTHGRKVLEVRPVIDWNKGRAVEFLLESLGLSNKDDLLPIYIGDDTTDEDAFKVLRDGNRGFGILVSSIPKESNAFYSLRDPSEVKKFLKTLVKWAKLEKNSTGF

SEQ ID NO: 168 - protein, 338 aa, Arabidopsis thaliana
  peptide (1)..(338): Ceres Seq. ID no. 13647018
  misc_feature (78)..(316): Pfam Name: Pfam Description:  Trehalose-phosphatase
  misc_feature (1)..(338): NCBI GI NO: 15234552 NR Description: trehalose-6-phosphate phosphatase, putative
  misc_feature (1)..(338): NCBI GI NO: 15235713 NR Description: trehalose-6-phosphate phosphatase, putative
  misc_feature (1)..(330): NCBI GI NO: 30696058 NR Description: trehalose-6-phosphate phosphatase (TPPA)
  misc_feature (1)..(330): NCBI GI NO: 30696054 NR Description: trehalose-6-phosphate phosphatase (TPPA)
  misc_feature (8)..(328): NCBI GI NO: 37536726 NR Description: putative trehalose-6-phosphate phosphatase
  misc_feature (6)..(331): NCBI GI NO: 18399940 NR Description: trehalose-6-phosphate phosphatase, putative
  misc_feature (6)..(331): NCBI GI NO: 21554408 NR Description: trehalose-phosphatase, putative
  misc_feature (6)..(331): NCBI GI NO: 25354597 NR Description: probable trehalose-phosphatase
  misc_feature (15)..(332): NCBI GI NO: 30683008 NR Description: trehalose-6-phosphate phosphatase, putative
  misc_feature (20)..(330): NCBI GI NO: 15218205 NR Description: trehalose-6-phosphate phosphatase (TPPB)
MMSQWKKPAKLDDVRSNGWLDAMISSSPPRKKLVKDFNVEVAPEDDFAQRAWMVKYPSAISSFAHIAAQAKKKKIAVFLDYDGTLSPIVDDPDRAIMSDAMRSAVKDVASYFPTAIISGRSRDKVYQLVGLTELYYAGSHGMDIMTSSDGPNCFKSTDQQGKEVNLFQPAREFIPVIDEVFRTLVEKMKDIKGAKVENHKFCASVHYRNVDEKDWPIIAQRVHDHLKQYPRLRLTHGRKVLEVRPVIDWNKGRAVEFLLESLGLSNKDDLLPIYIGDDTTDEDAFKVLRDGNRGFGILVSSIPKESNAFYSLRDPSEVKKFLKTLVKWAKLEKNSTGF

SEQ ID NO: 169 - protein, 337 aa, Arabidopsis thaliana
  peptide (1)..(337): Ceres Seq. ID no. 13647019
  misc_feature (77)..(315): Pfam Name: Pfam Description:  Trehalose-phosphatase
  misc_feature (1)..(329): NCBI GI NO: 30696054 NR Description: trehalose-6-phosphate phosphatase (TPPA)
  misc_feature (7)..(327): NCBI GI NO: 37536726 NR Description: putative trehalose-6-phosphate phosphatase
  misc_feature (5)..(330): NCBI GI NO: 18399940 NR Description: trehalose-6-phosphate phosphatase, putative
  misc_feature (5)..(330): NCBI GI NO: 21554408 NR Description: trehalose-phosphatase, putative
  misc_feature (5)..(330): NCBI GI NO: 25354597 NR Description: probable trehalose-phosphatase
  misc_feature (14)..(331): NCBI GI NO: 30683008 NR Description: trehalose-6-phosphate phosphatase, putative
  misc_feature (19)..(329): NCBI GI NO: 15218205 NR Description: trehalose-6-phosphate phosphatase (TPPB)
  misc_feature (1)..(337): NCBI GI NO: 15234552 NR Description: trehalose-6-phosphate phosphatase, putative
  misc_feature (1)..(337): NCBI GI NO: 15235713 NR Description: trehalose-6-phosphate phosphatase, putative
  misc_feature (1)..(329): NCBI GI NO: 30696058 NR Description: trehalose-6-phosphate phosphatase (TPPA)
MSQWKKPAKLDDVRSNGWLDAMISSSPPRKKLVKDFNVEVAPEDDFAQRAWMVKYPSAISSFAHIAAQAKKKKIAVFLDYDGTLSPIVDDPDRAIMSDAMRSAVKDVASYFPTAIISGRSRDKVYQLVGLTELYYAGSHGMDIMTSSDGPNCFKSTDQQGKEVNLFQPAREFIPVIDEVFRTLVEKMKDIKGAKVENHKFCASVHYRNVDEKDWPIIAQRVHDHLKQYPRLRLTHGRKVLEVRPVIDWNKGRAVEFLLESLGLSNKDDLLPIYIGDDTTDEDAFKVLRDGNRGFGILVSSIPKESNAFYSLRDPSEVKKFLKTLVKWAKLEKNSTGF

SEQ ID NO: 170 - DNA, 1009 bp, Arabidopsis thaliana
  misc_feature (1)..(1009): Ceres Seq. ID no. 13648400
gagaataatctcctctctctctaacaaactcgcaaactcacatttgtggtactctcagtgttagacaagtccgatcaagtttaagcagtcatggcggttttgcttcctctgtttcttctctctttcatgtttacctattcaaacgcggcggtttgtgtgtgcaaggacgctaacgagctggatcttcagaaggtgatagacttcgcatgtggaggaggtgctgactgtgcacagattcagacgaccggagcttgttatcaaccaaacaccctcaagaaccactgtgacgttgccgttaacagctactatcaacagaaagcttccaccggtgccacatgtgacttcaacggcgccgccgtcatctccacttcccctccttcgactacgtcaagctgtttatctagttctagttccaacggaacccccactgccggatatccatccaccggaaattcaaccacagcaagtccaggcaccacaaatccatccacaggcaattcaacaaacagcacactacccactaatgataagccgacttcatctacgataacgtttcctgacagtactactatgggaccatctagcagcacgagtggtgatcccaacggtggagaagagctatccgtcagaaccacgacgatcatcttactgactaccatcgctgccgtggcattgagggtttaggtaagatcatctcaagatgatgacgaggacgcttatttgttgtggacggctgagataatgccaagttaattagagcctatctttcttcccaccgaattttaatctttaatttccaattaggattgtgactctcgctcgtcttcttaagtattttggtttatagaaaatcttaatcaagagcttttttcttgctttcttttgtaaatccagaaaaaatgagatgctctttgggttgtattagttttacttataattatgccttcgccaataaagataacatgtttctcgaaaaaaaaaaaaaaaaaaactcgagggggggcccggt

SEQ ID NO: 171 - protein, 197 aa, Arabidopsis thaliana
  peptide (1)..(197): Ceres Seq. ID no. 13648401
  misc_feature (92)..(195): Pfam Name: Pfam Description:  Mucin-like glycoprotein
  misc_feature (1)..(197): NCBI GI NO: 15222715 NR Description: glycosyl hydrolase family 17
  misc_feature (1)..(190): NCBI GI NO: 18409239 NR Description: expressed protein [Arabidopsis thaliana]
  misc_feature (1)..(190): NCBI GI NO: 21553768 NR Description: unknown [Arabidopsis thaliana]
  misc_feature (1)..(190): NCBI GI NO: 25404810 NR Description: unknown protein, 45065-49536
  misc_feature (1)..(155): NCBI GI NO: 18394637 NR Description: glycosyl hydrolase family 17
  misc_feature (1)..(187): NCBI GI NO: 30683485 NR Description: expressed protein [Arabidopsis thaliana]
  misc_feature (1)..(191): NCBI GI NO: 22775658 NR Description: contains ESTs C91599
  misc_feature (1)..(133): NCBI GI NO: 22325443 NR Description: glycosyl hydrolase family 17
  misc_feature (1)..(160): NCBI GI NO: 21592859 NR Description: unknown [Arabidopsis thaliana]
  misc_feature (1)..(152): NCBI GI NO: 15241485 NR Description: glycosyl hydrolase family 17
MAVLLPLFLLSFMFTYSNAAVCVCKDANELDLQKVIDFACGGGADCAQIQTTGACYQPNTLKNHCDVAVNSYYQQKASTGATCDFNGAAVISTSPPSTTSSCLSSSSSNGTPTAGYPSTGNSTTASPGTTNPSTGNSTNSTLPTNDKPTSSTITFPDSTTMGPSSSTSGDPNGGEELSVRTTTIILLTTIAAVALRV

SEQ ID NO: 172 - protein, 185 aa, Arabidopsis thaliana
  peptide (1)..(185): Ceres Seq. ID no. 13648402
  misc_feature (80)..(183): Pfam Name: Pfam Description:  Mucin-like glycoprotein
  misc_feature (1)..(185): NCBI GI NO: 15222715 NR Description: glycosyl hydrolase family 17
  misc_feature (1)..(178): NCBI GI NO: 18409239 NR Description: expressed protein [Arabidopsis thaliana]
  misc_feature (1)..(178): NCBI GI NO: 21553768 NR Description: unknown [Arabidopsis thaliana]
  misc_feature (1)..(178): NCBI GI NO: 25404810 NR Description: unknown protein, 45065-49536
  misc_feature (1)..(143): NCBI GI NO: 18394637 NR Description: glycosyl hydrolase family 17
  misc_feature (1)..(175): NCBI GI NO: 30683485 NR Description: expressed protein [Arabidopsis thaliana]
  misc_feature (1)..(179): NCBI GI NO: 22775658 NR Description: contains ESTs C91599
  misc_feature (1)..(121): NCBI GI NO: 22325443 NR Description: glycosyl hydrolase family 17
  misc_feature (1)..(148): NCBI GI NO: 21592859 NR Description: unknown [Arabidopsis thaliana]
  misc_feature (1)..(140): NCBI GI NO: 15241485 NR Description: glycosyl hydrolase family 17
MFTYSNAAVCVCKDANELDLQKVIDFACGGGADCAQIQTTGACYQPNTLKNHCDVAVNSYYQQKASTGATCDFNGAAVISTSPPSTTSSCLSSSSSNGTPTAGYPSTGNSTTASPGTTNPSTGNSTNSTLPTNDKPTSSTITFPDSTTMGPSSSTSGDPNGGEELSVRTTTIILLTTIAAVALRV

SEQ ID NO: 173 - DNA, 643 bp, Arabidopsis thaliana
  misc_feature (1)..(643): Ceres Seq. ID no. 13648014
ggtcaacacgaaaaagatctaaacatctaccaaacacaatccaaatatatatgtaaaaatgcaaaacctctcaatactacttgtgtgtagcttttgcatacttggccatgtatctagcgctggaatcaggattggtaacgaactcaaaaacaaaaaactcttatggatgagatgttattccaaagatgacgttataggtccattaataataccgatcggagggcataggttcaattattttggtaccaacatatttgctacgactcgtttcatgtgtaccttgagacaagtgcctaattatagacaccatcaaaactttacagcatttaaactttacagtgcttcagatgatggaggcgtatgggattggagagaaagagaagatgggatctatctaaagataaaagctgagagaggtgttaatagaccggtttttatgcataaaaaatatgattggatatattaaaaacgttaacaagctatttgaatgtaagaagatttaaatttttaatattcaatgagagtgtaaaatgataataacattatttgtattgtgttgagtatatcatttatgtataaaatctaaaatttgtatgttatacatttcattatttgtaaatctataataaaacaaatgttattc

SEQ ID NO: 174 - protein, 135 aa, Arabidopsis thaliana
  peptide (1)..(135): Ceres Seq. ID no. 13648015
  misc_feature (21)..(122): Pfam Name: Pfam Description:  Plant self-incompatibility protein S1
  misc_feature (1)..(122): NCBI GI NO: 15231635 NR Description: self-incompatibility protein-related
  misc_feature (1)..(135): NCBI GI NO: 25405865 NR Description: protein F9C16.21 [imported] - Arabidopsis thaliana
  misc_feature (1)..(134): NCBI GI NO: 15232231 NR Description: self-incompatibility protein-related
  misc_feature (7)..(134): NCBI GI NO: 9279785 NR Description: gb|AAC28191
  misc_feature (1)..(134): NCBI GI NO: 15231636 NR Description: self-incompatibility protein-related
  misc_feature (1)..(123): NCBI GI NO: 15236527 NR Description: RNA-binding protein-related [Arabidopsis thaliana]
  misc_feature (14)..(129): NCBI GI NO: 18400665 NR Description: self-incompatibility protein-related
  misc_feature (14)..(129): NCBI GI NO: 25412258 NR Description: hypothetical protein At2g24870
  misc_feature (1)..(101): NCBI GI NO: 18400667 NR Description: self-incompatibility protein-related
  misc_feature (1)..(92): NCBI GI NO: 25412260 NR Description: hypothetical protein At2g24880
MQNLSILLVCSFCILGHVSSAGIRIGNELKNKKLLWMRCYSKDDVIGPLIIPIGGHRFNYFGTNIFATTRFMCTLRQVPNYRHHQNFTAFKLYSASDDGGVWDWREREDGIYLKIKAERGVNRPVFMHKKYDWIY

SEQ ID NO: 175 - protein, 99 aa, Arabidopsis thaliana
  peptide (1)..(99): Ceres Seq. ID no. 13648016
  misc_feature (1)..(86): Pfam Name: Pfam Description:  Plant self-incompatibility protein S1
  misc_feature (1)..(86): NCBI GI NO: 15231635 NR Description: self-incompatibility protein-related
  misc_feature (1)..(99): NCBI GI NO: 25405865 NR Description: protein F9C16.21 [imported] - Arabidopsis thaliana
  misc_feature (1)..(98): NCBI GI NO: 15232231 NR Description: self-incompatibility protein-related
  misc_feature (1)..(98): NCBI GI NO: 9279785 NR Description: gb|AAC28191
  misc_feature (1)..(98): NCBI GI NO: 15231636 NR Description: self-incompatibility protein-related
  misc_feature (1)..(87): NCBI GI NO: 15236527 NR Description: RNA-binding protein-related [Arabidopsis thaliana]
  misc_feature (1)..(93): NCBI GI NO: 18400665 NR Description: self-incompatibility protein-related
  misc_feature (1)..(93): NCBI GI NO: 25412258 NR Description: hypothetical protein At2g24870
  misc_feature (1)..(65): NCBI GI NO: 18400667 NR Description: self-incompatibility protein-related
  misc_feature (1)..(56): NCBI GI NO: 25412260 NR Description: hypothetical protein At2g24880
MRCYSKDDVIGPLIIPIGGHRFNYFGTNIFATTRFMCTLRQVPNYRHHQNFTAFKLYSASDDGGVWDWREREDGIYLKIKAERGVNRPVFMHKKYDWIY

SEQ ID NO: 176 - DNA, 1146 bp, Arabidopsis thaliana
  misc_feature (1)..(1146): Ceres Seq. ID no. 13648017
gaattcttactaaaaaaacacaacgaactcaaatcttcaatcttcatcttactctctaattgctttcctattccgatctctgtttcttcataaagtctcaatctttttttctctatggccggaactaaagattctcatgtagtggagattccagtagatgaagagcataaagagagacaacaacaacaacagttggttgcggtctcaaatccgggaatgggaatactcaaagtgattcagcagcatccgttgtctgaaatctcagagagtccaggacatttgttgcttttgaagttatggcaaagagaagaagatttgttctgtcgtcgtgttcttcttaaagaatcaagactagagtcaatcaaaagagagatctttcagctttgttgtttcttcctagtcttccatgggttcttcttcacacttgtctactcttcttcttgttctgatgatgctgacgtggtgaaaagtaatgcggtttgcaagaaatggtggataccttctgcagtgtcattagctacttcattggttctggtgtttcttgttcaagctaagctgtttgtgttctggaaagtttacagaggtgttaatagggagaggaatgataatagaacgcttacacggtgtgttttggagttgaggatgaaagggtcgagctttgatttgtcgaaagagccgatgagtgggaagaggatgaagagttcaagcgttgagatcaagtggaaacctgttacttggttctctcagtatttgataactattgttcttctttgctctgcagggttgttcttcccggtctcaaagttcatcctctgcggattttgacaaactcttcctattcactgtttgttcggactctgcattctttcttcaaccttcattgtggggatgatgcttttggtccgatcttaccattggcctctgttctagctttgagagagtagctgtcaaatctcccagactgaagattcgccggagggaataagaacaacctgtaacttttagcagtactcacacatagtagaaaattgatgtaattcgggattagaattctgatcttgatcttattaatttcattcttcgttaataataaacaacattgcttgtatagtaacaaatttttgcaataaataaaatgccagattc

SEQ ID NO: 177 - protein, 236 aa, Arabidopsis thaliana
  peptide (1)..(236): Ceres Seq. ID no. 13648018
  misc_feature (1)..(236): NCBI GI NO: 30696692 NR Description: expressed protein [Arabidopsis thaliana]
  misc_feature (1)..(228): NCBI GI NO: 9758632 NR Description: dbj|BAA81760
  misc_feature (8)..(234): NCBI GI NO: 5257261 NR Description: hypothetical protein
  misc_feature (31)..(234): NCBI GI NO: 15230623 NR Description: hypothetical protein [Arabidopsis thaliana]
  misc_feature (43)..(222): NCBI GI NO: 34897044 NR Description: hypothetical protein
MAGTKDSHVVEIPVDEEHKERQQQQQLVAVSNPGMGILKVIQQHPLSEISESPGHLLLLKLWQREEDLFCRRVLLKESRLESIKREIFQLCCFFLVFHGFFFTLVYSSSCSDDADVVKSNAVCKKWWIPSAVSLATSLVLVFLVQAKLFVFWKVYRGVNRERNDNRTLTRCVLELRMKGSSFDLSKEPMSGKRMKSSSVEIKWKPVTWFSQYLITIVLLCSAGLFFPVSKFILCGF

SEQ ID NO: 178 - protein, 202 aa, Arabidopsis thaliana
  peptide (1)..(202): Ceres Seq. ID no. 13648019
  misc_feature (1)..(202): NCBI GI NO: 30696692 NR Description: expressed protein [Arabidopsis thaliana]
  misc_feature (1)..(194): NCBI GI NO: 9758632 NR Description: dbj|BAA81760
  misc_feature (1)..(200): NCBI GI NO: 5257261 NR Description: hypothetical protein
  misc_feature (1)..(200): NCBI GI NO: 15230623 NR Description: hypothetical protein [Arabidopsis thaliana]
  misc_feature (9)..(188): NCBI GI NO: 34897044 NR Description: hypothetical protein
MGILKVIQQHPLSEISESPGHLLLLKLWQREEDLFCRRVLLKESRLESIKREIFQLCCFFLVFHGFFFTLVYSSSCSDDADVVKSNAVCKKWWIPSAVSLATSLVLVFLVQAKLFVFWKVYRGVNRERNDNRTLTRCVLELRMKGSSFDLSKEPMSGKRMKSSSVEIKWKPVTWFSQYLITIVLLCSAGLFFPVSKFILCGF

SEQ ID NO: 179 - DNA, 1289 bp, Arabidopsis thaliana
  misc_feature (1)..(1289): Ceres Seq. ID no. 14302919
ggtactgctgcacaagtgtagaggcagtggcacaacatctttaagaaagagagagagaaagagtcatttattcatttcctcgcttaaaaatcttgagcacccagacagaattcttctttcttctttctggggttgagaaaaatgagtgaaagagatgatggattggggctaagtttgagcttgagtttaggttttaatcaaaaggacccgtcctcgaggttaaatccaatgcctctggcttcttatgcatcttcatcacacatgcagcatatgcagcagagcaattataaccatcctcaaaagattcagaacacttggattaacatgtttcagtcatcagagagaaactcggacatgagatcgtttctccggggaatagacgtaaacagagctccatcgacggtggtggttgacgtggaggatgaaggcgccggagtttcgtctccgaacagcaccgtctcaagcgtgatgagcgggaagaggagcgagcgagagctaatggctgcggcagctgcagttggaggaggaggtagagtagaagataatgagattgagagagcttcttgctcgctcggcggtggtagcgacgatgaagacggtagcgggaacggagatgactgttcgaggaagaaactccgattgtctaaagaacaagctttggttcttgaagaaacttttaaagaacatagtacactcaatccgaagcaaaagatggctttggctaagcaattgaatctgaggacgagacaagttgaagtgtggttccaaaaccgaagggcaaggacgaagctgaagcaaacggaagtagactgtgaatatcttaagagatgttgcgagaatctaacggatgagaatcggagattgcaaaaggaagtgagtgagcttagggctttaaagctttctccacacttatacatgcacatgaaacctcccactactctcacaatgtgtccttcttgcgagcgagtcgctgttacgtcatcttcgtcatcggtggctcctcctgtgatgaattcatcgtctccgatgggtccgatgagtccgatgagtccgtgggctgccatgcctctacggcaacgacctgctgctggttctcattagagtttaattagtctaaagataataggtttggtgatttgtttttattatatcgttgaacggacttggaagttcttttcaagagttggtcccatgctcttctttcctttgttttattcagtttctatttatagctgaattctggataatggaaaatctactaatattattgtccaattattagtttgggg

SEQ ID NO: 180 - protein, 319 aa, Arabidopsis thaliana
  peptide (1)..(319): Ceres Seq. ID no. 14302920
  misc_feature (1)..(120): Pfam Name: Pfam Description:  HD-ZIP protein N terminus
  misc_feature (1)..(319): NCBI GI NO: 15232311 NR Description: homeobox-leucine zipper protein HAT3
  misc_feature (1)..(319): NCBI GI NO: 25453563 NR Description: homeobox protein HAT3
  misc_feature (1)..(313): NCBI GI NO: 15225368 NR Description: homeobox-leucine zipper protein Athb-4
  misc_feature (12)..(315): NCBI GI NO: 18034437 NR Description: homeodomain leucine zipper protein CPHB-3
  misc_feature (59)..(283): NCBI GI NO: 15236076 NR Description: homeobox-leucine zipper protein HAT1
  misc_feature (59)..(283): NCBI GI NO: 21592922 NR Description: homeobox-leucine zipper protein HAT1
  misc_feature (133)..(308): NCBI GI NO: 25457630 NR Description: homeobox protein THOM1 [imported] - tomato
  misc_feature (71)..(283): NCBI GI NO: 15238078 NR Description: homeobox-leucine zipper protein HAT2
  misc_feature (133)..(301): NCBI GI NO: 7446242 NR Description: homeobox-leucine zipper protein homolog h1
  misc_feature (50)..(306): NCBI GI NO: 8919876 NR Description: hypothetical protein [Capsella rubella]
MSERDDGLGLSLSLSLGFNQKDPSSRLNPMPLASYASSSHMQHMQQSNYNHPQKIQNTWINMFQSSERNSDMRSFLRGIDVNRAPSTVVVDVEDEGAGVSSPNSTVSSVMSGKRSERELMAAAAAVGGGGRVEDNEIERASCSLGGGSDDEDGSGNGDDCSRKKLRLSKEQALVLEETFKEHSTLNPKQKMALAKQLNLRTRQVEVWFQNRRARTKLKQTEVDCEYLKRCCENLTDENRRLQKEVSELRALKLSPHLYMHMKPPTTLTMCPSCERVAVTSSSSSVAPPVMNSSSPMGPMSPMSPWAAMPLRQRPAAGSH

SEQ ID NO: 181 - protein, 290 aa, Arabidopsis thaliana
  peptide (1)..(290): Ceres Seq. ID no. 14302921
  misc_feature (1)..(91): Pfam Name: Pfam Description:  HD-ZIP protein N terminus
  misc_feature (104)..(272): NCBI GI NO: 7446242 NR Description: homeobox-leucine zipper protein homolog h1
  misc_feature (21)..(277): NCBI GI NO: 8919876 NR Description: hypothetical protein [Capsella rubella]
  misc_feature (1)..(290): NCBI GI NO: 15232311 NR Description: homeobox-leucine zipper protein HAT3
  misc_feature (1)..(290): NCBI GI NO: 25453563 NR Description: homeobox protein HAT3
  misc_feature (1)..(284): NCBI GI NO: 15225368 NR Description: homeobox-leucine zipper protein Athb-4
  misc_feature (1)..(286): NCBI GI NO: 18034437 NR Description: homeodomain leucine zipper protein CPHB-3
  misc_feature (30)..(254): NCBI GI NO: 15236076 NR Description: homeobox-leucine zipper protein HAT1
  misc_feature (30)..(254): NCBI GI NO: 21592922 NR Description: homeobox-leucine zipper protein HAT1
  misc_feature (104)..(279): NCBI GI NO: 25457630 NR Description: homeobox protein THOM1 [imported] - tomato
  misc_feature (42)..(254): NCBI GI NO: 15238078 NR Description: homeobox-leucine zipper protein HAT2
MPLASYASSSHMQHMQQSNYNHPQKIQNTWINMFQSSERNSDMRSFLRGIDVNRAPSTVVVDVEDEGAGVSSPNSTVSSVMSGKRSERELMAAAAAVGGGGRVEDNEIERASCSLGGGSDDEDGSGNGDDCSRKKLRLSKEQALVLEETFKEHSTLNPKQKMALAKQLNLRTRQVEVWFQNRRARTKLKQTEVDCEYLKRCCENLTDENRRLQKEVSELRALKLSPHLYMHMKPPTTLTMCPSCERVAVTSSSSSVAPPVMNSSSPMGPMSPMSPWAAMPLRQRPAAGSH

SEQ ID NO: 182 - protein, 279 aa, Arabidopsis thaliana
  peptide (1)..(279): Ceres Seq. ID no. 14302922
  misc_feature (1)..(80): Pfam Name: Pfam Description:  HD-ZIP protein N terminus
  misc_feature (1)..(279): NCBI GI NO: 15232311 NR Description: homeobox-leucine zipper protein HAT3
  misc_feature (1)..(279): NCBI GI NO: 25453563 NR Description: homeobox protein HAT3
  misc_feature (1)..(273): NCBI GI NO: 15225368 NR Description: homeobox-leucine zipper protein Athb-4
  misc_feature (1)..(275): NCBI GI NO: 18034437 NR Description: homeodomain leucine zipper protein CPHB-3
  misc_feature (19)..(243): NCBI GI NO: 15236076 NR Description: homeobox-leucine zipper protein HAT1
  misc_feature (19)..(243): NCBI GI NO: 21592922 NR Description: homeobox-leucine zipper protein HAT1
  misc_feature (93)..(268): NCBI GI NO: 25457630 NR Description: homeobox protein THOM1 [imported] - tomato
  misc_feature (31)..(243): NCBI GI NO: 15238078 NR Description: homeobox-leucine zipper protein HAT2
  misc_feature (93)..(261): NCBI GI NO: 7446242 NR Description: homeobox-leucine zipper protein homolog h1
  misc_feature (10)..(266): NCBI GI NO: 8919876 NR Description: hypothetical protein [Capsella rubella]
MQHMQQSNYNHPQKIQNTWINMFQSSERNSDMRSFLRGIDVNRAPSTVVVDVEDEGAGVSSPNSTVSSVMSGKRSERELMAAAAAVGGGGRVEDNEIERASCSLGGGSDDEDGSGNGDDCSRKKLRLSKEQALVLEETFKEHSTLNPKQKMALAKQLNLRTRQVEVWFQNRRARTKLKQTEVDCEYLKRCCENLTDENRRLQKEVSELRALKLSPHLYMHMKPPTTLTMCPSCERVAVTSSSSSVAPPVMNSSSPMGPMSPMSPWAAMPLRQRPAAGSH

SEQ ID NO: 183 - DNA, 664 bp, Arabidopsis thaliana
  misc_feature (1)..(664): Ceres Seq. ID no. 14302927
gatcacaaatatcatcttactaaaataaaaatccaatggatccatcagaatttcccttcgatatcgaagcttacaaaagacaatttcatatcaaagagaggtatatcatcaaccggtttagagagcgtcacaaaaaaattgaagaagattatccacgtcgcaataaaagaacatatatcaagagggatcatgtagcaccaaactaaaggttgattgacaactactttgctattcaacctacgtatgatgatgcaatgtttcgacggtgattccggatgcgaaaacatgtttttcttcgaatcgttggagccttatcaagaaatgacgactacttcacccaacgtgttgacgaaacaaataaagaaggtatatctccactagcaaaatgtatcacggccatgcggatgttagcatatggtatggcgtcagacacggtggatgaatacatcaaaataggaggttctacaacattagagtgcttgcgtagattctgtaatggaatcatacaattgtacgagcaagaatatcttagagcttgtcgcatctggtccccatctttttgttttctactgcgttgaatccacgtatgattttttgctttttcaacaccctcattgtaagagttcaacagttaaataaattattcaacatctccattgcacat

SEQ ID NO: 184 - protein, 100 aa, Arabidopsis thaliana
  peptide (1)..(100): Ceres Seq. ID no. 14302928
  misc_feature (13)..(87): NCBI GI NO: 22325602 NR Description: ribosomal protein -related [Arabidopsis thaliana]
  misc_feature (1)..(89): NCBI GI NO: 29824487 NR Description: hypothetical protein
  misc_feature (1)..(86): NCBI GI NO: 37534864 NR Description: contains similarity to ribosomal protein
  misc_feature (1)..(86): NCBI GI NO: 34907790 NR Description: P0703B11.15
  misc_feature (1)..(86): NCBI GI NO: 37536886 NR Description: hypothetical protein
  misc_feature (1)..(86): NCBI GI NO: 34913402 NR Description: B1074C08.24
  misc_feature (1)..(86): NCBI GI NO: 18855038 NR Description: putative ribosomal protein [Oryza sativa]
  misc_feature (1)..(86): NCBI GI NO: 38344363 NR Description: OSJNBb0032D24.14
  misc_feature (1)..(86): NCBI GI NO: 22830897 NR Description: B [Oryza sativa (japonica cultivar-group)]
  misc_feature (1)..(86): NCBI GI NO: 27575887 NR Description: TPA: putative transposase
MRKHVFLRIVGALSRNDDYFTQRVDETNKEGISPLAKCITAMRMLAYGMASDTVDEYIKIGGSTTLECLRRFCNGIIQLYEQEYLRACRIWSPSFCFLLR

SEQ ID NO: 185 - protein, 64 aa, Arabidopsis thaliana
  peptide (1)..(64): Ceres Seq. ID no. 14302929
DHKYHLTKIKIQWIHQNFPSISKLTKDNFISKRGISSTGLESVTKKLKKIIHVAIKEHISRGIM

SEQ ID NO: 186 - protein, 59 aa, Arabidopsis thaliana
  peptide (1)..(59): Ceres Seq. ID no. 14302930
  misc_feature (1)..(46): NCBI GI NO: 22325602 NR Description: ribosomal protein -related [Arabidopsis thaliana]
  misc_feature (1)..(48): NCBI GI NO: 29824487 NR Description: hypothetical protein
  misc_feature (1)..(45): NCBI GI NO: 37534864 NR Description: contains similarity to ribosomal protein
  misc_feature (1)..(45): NCBI GI NO: 34907790 NR Description: P0703B11.15
  misc_feature (1)..(45): NCBI GI NO: 37536886 NR Description: hypothetical protein
  misc_feature (1)..(45): NCBI GI NO: 34913402 NR Description: B1074C08.24
  misc_feature (1)..(45): NCBI GI NO: 18855038 NR Description: putative ribosomal protein [Oryza sativa]
  misc_feature (1)..(45): NCBI GI NO: 38344363 NR Description: OSJNBb0032D24.14
  misc_feature (1)..(45): NCBI GI NO: 22830897 NR Description: B [Oryza sativa (japonica cultivar-group)]
  misc_feature (1)..(45): NCBI GI NO: 27575887 NR Description: TPA: putative transposase
MRMLAYGMASDTVDEYIKIGGSTTLECLRRFCNGIIQLYEQEYLRACRIWSPSFCFLLR

SEQ ID NO: 187 - DNA, 1050 bp, Arabidopsis thaliana
  misc_feature (1)..(1050): Ceres Seq. ID no. 13647648
gaatactttgtctgtttcttcttcctgtggcttctgggtctttgtcaacatcaaagctctttactttttcaacttactttatcgtgcgtctgtacggaccacaaaaggctctctctttatttctctgtgagatttttttaggatctgagagagccaaagatcatggaggaaagccaagaacttgccttgacccagttgagaaaatcggtcgagaaactctcttcttctactgagggatatgacaaaccaacattgatgaggttcctggtggcaagatcaatggacccagtcaaggcagcaaagatgtttgtagattggcaaaaatggagagcctccatggttcctccaactggattcatccctgagtcagaagtgcaggatgaattggaattcagaaaggtctgtcttcagggtccgaccaaatccggacacccattggtgcttgtcataacctctaagcattttgcttctaaggatccagctaacttcaagaagtttgttgtttatgcgctagacaaaacaatcgcaagtggcaacaatggcaaagaagttggaggtgagaaattagtagccgttattgatctggcaaacattacatacaagaaccttgatgctcgtggattgatcactggctttcaattcttacaatcttactacccggaacgccttgcaaaatgctacattttgcatatgcccggattcttcgtgaccgtttggaaattcgtctgccgttttctagagaaagcaactcaggaaaagattgtgatagttacggatggagaagaacagagaaaattcgaggaagagatcggagcagatgctttaccggaagagtacggtggccgagctaagctcacagcaatccaagatgttcttcttcctcaggctgctccagtaactctaacaaacaataatgtttagctctttatttttggaagcattaacctgaatatttgtaatggtcagaacataactagtggtacatctctaaatttccgaaaaaaaaaaaaaaaaaaactcgaggggggggcccggtacccaattcgccct

SEQ ID NO: 188 - protein, 252 aa, Arabidopsis thaliana
  peptide (1)..(252): Ceres Seq. ID no. 13647649
  misc_feature (161)..(227): Pfam Name: Pfam Description:  CRAL/TRIO domain
  misc_feature (21)..(251): NCBI GI NO: 25402783 NR Description: protein F10B6.22 [imported] - Arabidopsis thaliana
  misc_feature (1)..(35): NCBI GI NO: 25402783 NR Description: protein F10B6.22 [imported] - Arabidopsis thaliana
  misc_feature (21)..(252): NCBI GI NO: 30684014 NR Description: SEC14 cytosolic factor, putative
  misc_feature (1)..(236): NCBI GI NO: 15223439 NR Description: SEC14 cytosolic factor, putative
  misc_feature (1)..(236): NCBI GI NO: 7488696 NR Description: polyphosphoinositide binding protein Ssh2
  misc_feature (1)..(236): NCBI GI NO: 17226662 NR Description: polyphosphoinositide binding protein
  misc_feature (3)..(228): NCBI GI NO: 34907052 NR Description: sec14 like protein
  misc_feature (44)..(236): NCBI GI NO: 19347976 NR Description: putative polyphosphoinositide binding protein
  misc_feature (3)..(228): NCBI GI NO: 2286121 NR Description: sec14 like protein [Oryza sativa]
  misc_feature (9)..(233): NCBI GI NO: 27573358 NR Description: putative phosphatidylinositol/phosphatidylcholine transferprotein
MEESQELALTQLRKSVEKLSSSTEGYDKPTLMRFLVARSMDPVKAAKMFVDWQKWRASMVPPTGFIPESEVQDELEFRKVCLQGPTKSGHPLVLVITSKHFASKDPANFKKFVVYALDKTIASGNNGKEVGGEKLVAVIDLANITYKNLDARGLITGFQFLQSYYPERLAKCYILHMPGFFVTVWKFVCRFLEKATQEKIVIVTDGEEQRKFEEEIGADALPEEYGGRAKLTAIQDVLLPQAAPVTLTNNNV

SEQ ID NO: 189 - protein, 221 aa, Arabidopsis thaliana
  peptide (1)..(221): Ceres Seq. ID no. 13647650
  misc_feature (130)..(196): Pfam Name: Pfam Description:  CRAL/TRIO domain
  misc_feature (1)..(220): NCBI GI NO: 25402783 NR Description: protein F10B6.22 [imported] - Arabidopsis thaliana
  misc_feature (1)..(221): NCBI GI NO: 30684014 NR Description: SEC14 cytosolic factor, putative
  misc_feature (1)..(205): NCBI GI NO: 15223439 NR Description: SEC14 cytosolic factor, putative
  misc_feature (1)..(205): NCBI GI NO: 7488696 NR Description: polyphosphoinositide binding protein Ssh2
  misc_feature (1)..(205): NCBI GI NO: 17226662 NR Description: polyphosphoinositide binding protein
  misc_feature (1)..(197): NCBI GI NO: 34907052 NR Description: sec14 like protein
  misc_feature (13)..(205): NCBI GI NO: 19347976 NR Description: putative polyphosphoinositide binding protein
  misc_feature (1)..(197): NCBI GI NO: 2286121 NR Description: sec14 like protein [Oryza sativa]
  misc_feature (1)..(202): NCBI GI NO: 27573358 NR Description: putative phosphatidylinositol/phosphatidylcholine transferprotein
  misc_feature (1)..(196): NCBI GI NO: 28829093 NR Description: similar to hypothetical protein
MRFLVARSMDPVKAAKMFVDWQKWRASMVPPTGFIPESEVQDELEFRKVCLQGPTKSGHPLVLVITSKHFASKDPANFKKFVVYALDKTIASGNNGKEVGGEKLVAVIDLANITYKNLDARGLITGFQFLQSYYPERLAKCYILHMPGFFVTVWKFVCRFLEKATQEKIVIVTDGEEQRKFEEEIGADALPEEYGGRAKLTAIQDVLLPQAAPVTLTNNNV

SEQ ID NO: 190 - protein, 213 aa, Arabidopsis thaliana
  peptide (1)..(213): Ceres Seq. ID no. 13647651
  misc_feature (122)..(188): Pfam Name: Pfam Description:  CRAL/TRIO domain
  misc_feature (1)..(212): NCBI GI NO: 25402783 NR Description: protein F10B6.22 [imported] - Arabidopsis thaliana
  misc_feature (1)..(213): NCBI GI NO: 30684014 NR Description: SEC14 cytosolic factor, putative
  misc_feature (1)..(197): NCBI GI NO: 15223439 NR Description: SEC14 cytosolic factor, putative
  misc_feature (1)..(197): NCBI GI NO: 7488696 NR Description: polyphosphoinositide binding protein Ssh2
  misc_feature (1)..(197): NCBI GI NO: 17226662 NR Description: polyphosphoinositide binding protein
  misc_feature (1)..(189): NCBI GI NO: 34907052 NR Description: sec14 like protein
  misc_feature (5)..(197): NCBI GI NO: 19347976 NR Description: putative polyphosphoinositide binding protein
  misc_feature (1)..(189): NCBI GI NO: 2286121 NR Description: sec14 like protein [Oryza sativa]
  misc_feature (1)..(194): NCBI GI NO: 27573358 NR Description: putative phosphatidylinositol/phosphatidylcholine transferprotein
  misc_feature (1)..(188): NCBI GI NO: 28829093 NR Description: similar to hypothetical protein
MDPVKAAKMFVDWQKWRASMVPPTGFIPESEVQDELEFRKVCLQGPTKSGHPLVLVITSKHFASKDPANFKKFVVYALDKTIASGNNGKEVGGEKLVAVIDLANITYKNLDARGLITGFQFLQSYYPERLAKCYILHMPGFFVTVWKFVCRFLEKATQEKIVIVTDGEEQRKFEEEIGADALPEEYGGRAKLTAIQDVLLPQAAPVTLTNNNV

SEQ ID NO: 191 - DNA, 1491 bp, Arabidopsis thaliana
  misc_feature (1)..(1491): Ceres Seq. ID no. 14309794
tcttcatacaacattttagctttactttttctctttactcttctctctctctttctctttctctttctctttcactcgttctctctcactcactctcttcacacacagatccaagatggcctcttcaatggctagcaatgatttccagctccctccacgtttcttcactgttttcgtctcccatttcagctcagagttcatggtgatcccagtttcctactacgatcacattccacatcgtttccccaagactgtgattctccgaggacctggtggatgctcctggaaggtagcgacggagataaaggatgatgaagtgcttttttcacaaggatggcccaaatttgttcgggataatactcttaacgatggagactttttgacctttgcctataatggagctcacatattcgaggtcagtatctttcgcggctacgacgcatgtaaagagattagcgaagtcactgaattggaagaggaagaagaagacagtgttatatctctgagcagtgaagacacagacactggtgctaaatctgagatgaagaatacagtcccggaaggcagagacaaaggaaagtcaaaagtggaagttgtggaggattctgatgacgatgaggaggaggatagtgtttattctgaaagcagtgaagaaacagagacagacactgattctgaattcaaggtggccaagccaacaataccaaaaagccagaagaaaggaaagaagaaagaacaagttgtggagtcctctgatgacgaggaagacgaagaggaggacagtgacagtgattacattgaaacgtttggtcaattggatattgaagagaattccatcagtgaggaggacagttcttatgctcctgataaagaagacacagccactgcctcttttgtcaaaccaaaggttgcaaataaggttgctaatctgaagaggaaagaggcggcaaagaagaggaagaaagtcgatcccatgatcaagaatcctgagagatacctcgatgatcctaagaatatccatttcgagacaaacgtgaagaataggttatacgagctgttggttcatgcacaactggtgaaagactattgcttgaggtttggagactatgttaactacatcgacaggttcgggaaactaagtgctaaaacagccaaatggaaggatcagcgtgtttgtatcaaaagatggatgcgcatatgcaagaggaacaagttgaagaaagaagaccgcattttgtgtgagctcttgcgcaagggaactttcgtttacgcaatcaaactccatgtcatccgcggtaaggatctgtagacgctagcagtatgagtagaggaagagatttggctacttaattatctctctgatttccatcttgttgtgtgatcaagcaaacttatgtgtttcattattgtctacttcagattgtatgaccttctctcttgttctctcatgaatctatttctgaatacaatatctaatctttgagctaaaag

SEQ ID NO: 192 - protein, 397 aa, Arabidopsis thaliana
  peptide (1)..(397): Ceres Seq. ID no. 14309795
  misc_feature (112)..(323): Pfam Name: eIF3c_N Pfam Description: Eukaryotic translation initiation factor 3 subunit 8 N-terminus
  misc_feature (1)..(397): NCBI GI NO: 15235362 NR Description: transcriptional factor B3 family
  misc_feature (212)..(393): NCBI GI NO: 15230649 NR Description: transcriptional factor B3 family
  misc_feature (3)..(206): NCBI GI NO: 15230649 NR Description: transcriptional factor B3 family
  misc_feature (5)..(171): NCBI GI NO: 15230669 NR Description: transcriptional factor B3 family
  misc_feature (7)..(234): NCBI GI NO: 11357788 NR Description: hypothetical protein F4P12
  misc_feature (222)..(393): NCBI GI NO: 18409814 NR Description: transcriptional factor B3 family
  misc_feature (222)..(393): NCBI GI NO: 11357788 NR Description: hypothetical protein F4P12
  misc_feature (208)..(393): NCBI GI NO: 15242851 NR Description: transcriptional factor B3 family
  misc_feature (7)..(184): NCBI GI NO: 18409814 NR Description: transcriptional factor B3 family
  misc_feature (7)..(227): NCBI GI NO: 15238624 NR Description: transcriptional factor B3 family
MASSMASNDFQLPPRFFTVFVSHFSSEFMVIPVSYYDHIPHRFPKTVILRGPGGCSWKVATEIKDDEVLFSQGWPKFVRDNTLNDGDFLTFAYNGAHIFEVSIFRGYDACKEISEVTELEEEEEDSVISLSSEDTDTGAKSEMKNTVPEGRDKGKSKVEVVEDSDDDEEEDSVYSESSEETETDTDSEFKVAKPTIPKSQKKGKKKEQVVESSDDEEDEEEDSDSDYIETFGQLDIEENSISEEDSSYAPDKEDTATASFVKPKVANKVANLKRKEAAKKRKKVDPMIKNPERYLDDPKNIHFETNVKNRLYELLVHAQLVKDYCLRFGDYVNYIDRFGKLSAKTAKWKDQRVCIKRWMRICKRNKLKKEDRILCELLRKGTFVYAIKLHVIRGKDL

SEQ ID NO: 193 - protein, 393 aa, Arabidopsis thaliana
  peptide (1)..(393): Ceres Seq. ID no. 14309796
  misc_feature (108)..(319): Pfam Name: eIF3c_N Pfam Description: Eukaryotic translation initiation factor 3 subunit 8 N-terminus
  misc_feature (1)..(393): NCBI GI NO: 15235362 NR Description: transcriptional factor B3 family
  misc_feature (208)..(389): NCBI GI NO: 15230649 NR Description: transcriptional factor B3 family
  misc_feature (1)..(202): NCBI GI NO: 15230649 NR Description: transcriptional factor B3 family
  misc_feature (1)..(167): NCBI GI NO: 15230669 NR Description: transcriptional factor B3 family
  misc_feature (3)..(230): NCBI GI NO: 11357788 NR Description: hypothetical protein F4P12
  misc_feature (218)..(389): NCBI GI NO: 18409814 NR Description: transcriptional factor B3 family
  misc_feature (218)..(389): NCBI GI NO: 11357788 NR Description: hypothetical protein F4P12
  misc_feature (204)..(389): NCBI GI NO: 15242851 NR Description: transcriptional factor B3 family
  misc_feature (3)..(180): NCBI GI NO: 18409814 NR Description: transcriptional factor B3 family
  misc_feature (3)..(223): NCBI GI NO: 15238624 NR Description: transcriptional factor B3 family
MASNDFQLPPRFFTVFVSHFSSEFMVIPVSYYDHIPHRFPKTVILRGPGGCSWKVATEIKDDEVLFSQGWPKFVRDNTLNDGDFLTFAYNGAHIFEVSIFRGYDACKEISEVTELEEEEEDSVISLSSEDTDTGAKSEMKNTVPEGRDKGKSKVEVVEDSDDDEEEDSVYSESSEETETDTDSEFKVAKPTIPKSQKKGKKKEQVVESSDDEEDEEEDSDSDYIETFGQLDIEENSISEEDSSYAPDKEDTATASFVKPKVANKVANLKRKEAAKKRKKVDPMIKNPERYLDDPKNIHFETNVKNRLYELLVHAQLVKDYCLRFGDYVNYIDRFGKLSAKTAKWKDQRVCIKRWMRICKRNKLKKEDRILCELLRKGTFVYAIKLHVIRGKDL

SEQ ID NO: 194 - protein, 369 aa, Arabidopsis thaliana
  peptide (1)..(369): Ceres Seq. ID no. 14309797
  misc_feature (84)..(295): Pfam Name: eIF3c_N Pfam Description: Eukaryotic translation initiation factor 3 subunit 8 N-terminus
  misc_feature (1)..(369): NCBI GI NO: 15235362 NR Description: transcriptional factor B3 family
  misc_feature (184)..(365): NCBI GI NO: 15230649 NR Description: transcriptional factor B3 family
  misc_feature (1)..(178): NCBI GI NO: 15230649 NR Description: transcriptional factor B3 family
  misc_feature (1)..(143): NCBI GI NO: 15230669 NR Description: transcriptional factor B3 family
  misc_feature (1)..(206): NCBI GI NO: 11357788 NR Description: hypothetical protein F4P12
  misc_feature (194)..(365): NCBI GI NO: 18409814 NR Description: transcriptional factor B3 family
  misc_feature (194)..(365): NCBI GI NO: 11357788 NR Description: hypothetical protein F4P12
  misc_feature (180)..(365): NCBI GI NO: 15242851 NR Description: transcriptional factor B3 family
  misc_feature (1)..(156): NCBI GI NO: 18409814 NR Description: transcriptional factor B3 family
  misc_feature (1)..(199): NCBI GI NO: 15238624 NR Description: transcriptional factor B3 family
MVIPVSYYDHIPHRFPKTVILRGPGGCSWKVATEIKDDEVLFSQGWPKFVRDNTLNDGDFLTFAYNGAHIFEVSIFRGYDACKEISEVTELEEEEEDSVISLSSEDTDTGAKSEMKNTVPEGRDKGKSKVEVVEDSDDDEEEDSVYSESSEETETDTDSEFKVAKPTIPKSQKKGKKKEQVVESSDDEEDEEEDSDSDYIETFGQLDIEENSISEEDSSYAPDKEDTATASFVKPKVANKVANLKRKEAAKKRKKVDPMIKNPERYLDDPKNIHFETNVKNRLYELLVHAQLVKDYCLRFGDYVNYIDRFGKLSAKTAKWKDQRVCIKRWMRICKRNKLKKEDRILCELLRKGTFVYAIKLHVIRGKDL

SEQ ID NO: 195 - DNA, 579 bp, Arabidopsis thaliana
  misc_feature (1)..(579): Ceres Seq. ID no. 12606011
aaaaaaaaaattcatttcgtttccgatcgcacttcttctcaagtaaatttaatagacgtttgttgggtgatttaagaagatgggtcagatccagtactccgacaaatatttcgatgatactttcgaatacaggcacgttgtacttcctccggaagttgctaagcttttacctaagaatcgtattctttcggaaagtgaatggagagccatcggagtgcagcaaagtcgtggatgggttcattacgcgattcatcgtcctgagccacatatcatgctctttaggaggcctcttaactaccagcaggagcaccaagctcagattgctaagtagaagaattatgcaaaattctccctaatctctgtttatgtctctcgtaaacgaggttttaaaatactactctgatgttttgttcctgtagttttttttattgtgttcatgaattctcttcagtggagaatcatgtgagtttggtagaacaacttttaatgttatgttaagtctggtcctttgctagactttggttggatccacgtttgaacttcttcatggttaagaatgaagacgttatttctcatgct

SEQ ID NO: 196 - protein, 117 aa, Arabidopsis thaliana
  peptide (1)..(117): Ceres Seq. ID no. 12606012
KKNSFRFRSHFFSSKFNRRLLGDLRRWVRSSTPTNISMILSNTGTLYFLRKLLSFYLRIVFFRKVNGEPSECSKVVDGFITRFIVLSHISCSLGGLLTTSRSTKLRLLSRRIMQNSP

SEQ ID NO: 197 - protein, 83 aa, Arabidopsis thaliana
  peptide (1)..(83): Ceres Seq. ID no. 12606013
  misc_feature (1)..(72): Pfam Name: Pfam Description:  Cyclin-dependent kinase regulatory subunit
  misc_feature (1)..(83): NCBI GI NO: 15226297 NR Description: CDK-subunit 2; protein id: At2g27970.1
  misc_feature (1)..(80): NCBI GI NO: 15226294 NR Description: CDK-subunit 1; protein id: At2g27960
  misc_feature (1)..(82): NCBI GI NO: 15451612 NR Description: Putative cyclin-dependent kinase regulatory subunit
  misc_feature (1)..(82): NCBI GI NO: 40641585 NR Description: putative cyclin-dependent kinase regulatory subunit
  misc_feature (1)..(83): NCBI GI NO: 27435806 NR Description: CKS1 protein
  misc_feature (4)..(69): NCBI GI NO: 2493727 NR Description: PROBABLE CYCLIN-DEPENDENT KINASES REGULATORY SUBUNIT
  misc_feature (4)..(77): NCBI GI NO: 18158610 NR Description: CDC28 protein kinase 1-like protein
  misc_feature (3)..(71): NCBI GI NO: 4502857 NR Description: CDC28 protein kinase 1B
  misc_feature (3)..(71): NCBI GI NO: 12847359 NR Description: unnamed protein product [Mus musculus]
  misc_feature (3)..(71): NCBI GI NO: 30585357 NR Description: Homo sapiens CDC28 protein kinase regulatory subunit 1B
MGQIQYSDKYFDDTFEYRHVVLPPEVAKLLPKNRILSESEWRAIGVQQSRGWVHYAIHRPEPHIMLFRRPLNYQQEHQAQIAK

SEQ ID NO: 198 - protein, 80 aa, Arabidopsis thaliana
  peptide (1)..(80): Ceres Seq. ID no. 12606014
MILSNTGTLYFLRKLLSFYLRIVFFRKVNGEPSECSKVVDGFITRFIVLSHISCSLGGLLTTSRSTKLRLLSRRIMQNSP

SEQ ID NO: 199 - DNA, 950 bp, Arabidopsis thaliana
  misc_feature (1)..(950): Ceres Seq. ID no. 13647678
gtcgttttagcttcccgacttcacttctaatctcagactctgcgacgctctttacaaaccgccggaaaaccgccatgaactttgtcgtcagacgggtaggctccattttgccgtcgatacgtcacggcggcgtttcccagattcgactcgcgagaacagaggcaggtcagccgagacggcgaaacaagttgccttctcttccgctaaagaagaaggaagagaaatccgagtggtggatagtagacggagagatgcacgagatcggtgatcacgtccctcctcgtgagcgtttcacaatccccagggacaacattccgaacaaacgccgtaagcagctccgtgaccagttcatgcgccgcactcgcctcgtccttaaagaatcggaacatgagccatggtgcaaaaagtatatggaactatataacgagcttagagaaaactgggagaggctttattgggatgaagggtattcaaagaaactcgcaagtgatcatgcaaattatgaatccgctgaagaagacgatgaagattttaatccatacaggaacaggcggtctttcagcgatcaaacaaaggagcaagggtttaatagaactacacaaggtgataattgggagaaagtcagtcaaatcagggataagtttgagtatgatagagaaaggaggatgagagataaagcctttgcaccaatgaatgcagcaccagaatctcaagaatctagggacttgaattggaatgcacaaagacggccatttgatcctgatagattcgcaagggattgaatacccttaacatcacatggtagagcaggcgaagaatgagcaggctgctctgaagaaatagaataatataagtttgggtttagtttttactttatgcagtgaatatactttcatgtaagcaaattgcgtgctgcagatttttccaagttttcctgtattagttttttt

SEQ ID NO: 200 - protein, 259 aa, Arabidopsis thaliana
  peptide (1)..(259): Ceres Seq. ID no. 13647679
  misc_feature (25)..(259): NCBI GI NO: 15231465 NR Description: expressed protein [Arabidopsis thaliana]
  misc_feature (28)..(217): NCBI GI NO: 26452083 NR Description: unknown protein [Arabidopsis thaliana]
RFSFPTSLLISDSATLFTNRRKTAMNFVVRRVGSILPSIRHGGVSQIRLARTEAGQPRRRNKLPSLPLKKKEEKSEWWIVDGEMHEIGDHVPPRERFTIPRDNIPNKRRKQLRDQFMRRTRLVLKESEHEPWCKKYMELYNELRENWERLYWDEGYSKKLASDHANYESAEEDDEDFNPYRNRRSFSDQTKEQGFNRTTQGDNWEKVSQIRDKFEYDRERRMRDKAFAPMNAAPESQESRDLNWNAQRRPFDPDRFARD

SEQ ID NO: 201 - protein, 235 aa, Arabidopsis thaliana
  peptide (1)..(235): Ceres Seq. ID no. 13647680
  misc_feature (1)..(235): NCBI GI NO: 15231465 NR Description: expressed protein [Arabidopsis thaliana]
  misc_feature (4)..(193): NCBI GI NO: 26452083 NR Description: unknown protein [Arabidopsis thaliana]
MNFVVRRVGSILPSIRHGGVSQIRLARTEAGQPRRRNKLPSLPLKKKEEKSEWWIVDGEMHEIGDHVPPRERFTIPRDNIPNKRRKQLRDQFMRRTRLVLKESEHEPWCKKYMELYNELRENWERLYWDEGYSKKLASDHANYESAEEDDEDFNPYRNRRSFSDQTKEQGFNRTTQGDNWEKVSQIRDKFEYDRERRMRDKAFAPMNAAPESQESRDLNWNAQRRPFDPDRFARD

SEQ ID NO: 202 - protein, 176 aa, Arabidopsis thaliana
  peptide (1)..(176): Ceres Seq. ID no. 13647681
  misc_feature (1)..(176): NCBI GI NO: 15231465 NR Description: expressed protein [Arabidopsis thaliana]
  misc_feature (1)..(134): NCBI GI NO: 26452083 NR Description: unknown protein [Arabidopsis thaliana]
MHEIGDHVPPRERFTIPRDNIPNKRRKQLRDQFMRRTRLVLKESEHEPWCKKYMELYNELRENWERLYWDEGYSKKLASDHANYESAEEDDEDFNPYRNRRSFSDQTKEQGFNRTTQGDNWEKVSQIRDKFEYDRERRMRDKAFAPMNAAPESQESRDLNWNAQRRPFDPDRFARD

SEQ ID NO: 203 - DNA, 1824 bp, Arabidopsis thaliana
  misc_feature (1)..(1824): Ceres Seq. ID no. 13648124
gttttgtatagaaagctgagaaaggttatttttttacattacagaagtaagggatacaaagttgttagttcatcttctctccgctcagaagaagaaaaacttaaaaaaattcaacgtctgaatatggctaatccacttctctattctccgatcaacccacaattcttccaaccacttcttcccggtttcgccaaccacctggacattcctgtggcgttcttcttgaagtacttagtgggaactaacgtaggaaaaacggctgagctcagatcagatgcatcggagatgacatggaaagtgaagatagacggccggagactctctaatggttgggaagatttcacaatcgcacatgatctccgagttggtgacattgttgttttcagacaagaaggagagttagtgttccatgtcacagctttaggaccaagttgctgtgagattcaatacggagaagatacccttgaagaggataaaattgagaaactttgtgatacagagaatgtttcaagtaagaaaaagagtctaaagagagaagctgagtctgcaccagacaattcactagattcttgttttgtggccactgtcacgggttcgaatctaaagcgcgatacattgtatatcccgaaagagtttgcattgtcaaatggtctgatgaacaaatatcagattgtgttaatgaatgaagaaggagaatcatggaagatagacttgagacgcgaggcatataattacggccggttttacatgagaagaggctggagaagtttctgtattgctaatgggaagaaacctggagacgtttttgcattcagattggtcaaaaatgaagaaacacctgtgatacagttgttccctatgaccattgaagatttagacaaacttcagagccttccaagacacaagattcgaaaaacagaagcagctccttcttcaccagacctttcttcttttgtagccactgttacggcttcaaatctaagccgcgatagactgtatcttcccaagacgttcattatgtcaaatggtttgttgaagaaatttcagatgtgtctaatgaatgaagagggagaatcatggacgatagatgtgaaacatgaggcacatacaggccggtttttaacgataagaggttggagaagattctgtgtggctaatgggaagaaaccaggagacttgctcaaattcaaattagtccataacgaagaaacacctgtgctccagttgttacccttgaaaagtgaagatctacacaaacttgatcctagcaatgacacaaggcatggacagagtttagaagttaccaaaaaagagtttcttggcacagaagccacagaaaatgagtttcttggcgcagaagtttaccgcaatgactcctttaaagctagcgagaaagatactcttccttttgctgaacctatcaatgaagatgtaaggcaaggacaatgttcacaagctattaaacaagaatatgtttccacagaagagaaaaactcaacaagccaaaaccgatttgtgaccttaacacttacacattcaagtaaacttaatcttccgtttgaattcatgaaggggaatggaatcaaaaaggcggggaagataacgatggttgatagatacgatgcaaaatggcggacgtcactactgatggacaagatcggagcaatgagtttaggaagaggttcaaaaggtttctgtgaggttaatggtgttgagatgaatgagtcgtttgtcttggagttgatttgggaagacacagttcctcttcttaagttttgttccaaagtttgagaaccatattaacaatgtctaggatcatcgctc

SEQ ID NO: 204 - protein, 596 aa, Arabidopsis thaliana
  peptide (1)..(596): Ceres Seq. ID no. 13648125
  misc_feature (191)..(291): Pfam Name: Pfam Description:  B3 DNA binding domain
  misc_feature (161)..(576): NCBI GI NO: 15224604 NR Description: transcriptional factor B3 family
  misc_feature (42)..(177): NCBI GI NO: 15224604 NR Description: transcriptional factor B3 family
  misc_feature (52)..(290): NCBI GI NO: 26450115 NR Description: unknown protein [Arabidopsis thaliana]
  misc_feature (308)..(415): NCBI GI NO: 26450115 NR Description: unknown protein [Arabidopsis thaliana]
  misc_feature (498)..(596): NCBI GI NO: 26450115 NR Description: unknown protein [Arabidopsis thaliana]
  misc_feature (46)..(439): NCBI GI NO: 25403268 NR Description: protein T24P13.6 [imported] - Arabidopsis thaliana
  misc_feature (457)..(596): NCBI GI NO: 25403268 NR Description: protein T24P13.6 [imported] - Arabidopsis thaliana
  misc_feature (69)..(290): NCBI GI NO: 15224180 NR Description: transcriptional factor B3 family
  misc_feature (308)..(416): NCBI GI NO: 15224180 NR Description: transcriptional factor B3 family
  misc_feature (498)..(596): NCBI GI NO: 15224180 NR Description: transcriptional factor B3 family
VLYRKLRKVIFLHYRSKGYKVVSSSSLRSEEEKLKKIQRLNMANPLLYSPINPQFFQPLLPGFANHLDIPVAFFLKYLVGTNVGKTAELRSDASEMTWKVKIDGRRLSNGWEDFTIAHDLRVGDIVVFRQEGELVFHVTALGPSCCEIQYGEDTLEEDKIEKLCDTENVSSKKKSLKREAESAPDNSLDSCFVATVTGSNLKRDTLYIPKEFALSNGLMNKYQIVLMNEEGESWKIDLRREAYNYGRFYMRRGWRSFCIANGKKPGDVFAFRLVKNEETPVIQLFPMTIEDLDKLQSLPRHKIRKTEAAPSSPDLSSFVATVTASNLSRDRLYLPKTFIMSNGLLKKFQMCLMNEEGESWTIDVKHEAHTGRFLTIRGWRRFCVANGKKPGDLLKFKLVHNEETPVLQLLPLKSEDLHKLDPSNDTRHGQSLEVTKKEFLGTEATENEFLGAEVYRNDSFKASEKDTLPFAEPINEDVRQGQCSQAIKQEYVSTEEKNSTSQNRFVTLTLTHSSKLNLPFEFMKGNGIKKAGKITMVDRYDAKWRTSLLMDKIGAMSLGRGSKGFCEVNGVEMNESFVLELIWEDTVPLLKFCSKV

SEQ ID NO: 205 - protein, 555 aa, Arabidopsis thaliana
  peptide (1)..(555): Ceres Seq. ID no. 13648126
  misc_feature (150)..(250): Pfam Name: Pfam Description:  B3 DNA binding domain
  misc_feature (120)..(535): NCBI GI NO: 15224604 NR Description: transcriptional factor B3 family
  misc_feature (1)..(136): NCBI GI NO: 15224604 NR Description: transcriptional factor B3 family
  misc_feature (11)..(249): NCBI GI NO: 26450115 NR Description: unknown protein [Arabidopsis thaliana]
  misc_feature (267)..(374): NCBI GI NO: 26450115 NR Description: unknown protein [Arabidopsis thaliana]
  misc_feature (457)..(555): NCBI GI NO: 26450115 NR Description: unknown protein [Arabidopsis thaliana]
  misc_feature (5)..(398): NCBI GI NO: 25403268 NR Description: protein T24P13.6 [imported] - Arabidopsis thaliana
  misc_feature (416)..(555): NCBI GI NO: 25403268 NR Description: protein T24P13.6 [imported] - Arabidopsis thaliana
  misc_feature (28)..(249): NCBI GI NO: 15224180 NR Description: transcriptional factor B3 family
  misc_feature (267)..(375): NCBI GI NO: 15224180 NR Description: transcriptional factor B3 family
  misc_feature (457)..(555): NCBI GI NO: 15224180 NR Description: transcriptional factor B3 family
MANPLLYSPINPQFFQPLLPGFANHLDIPVAFFLKYLVGTNVGKTAELRSDASEMTWKVKIDGRRLSNGWEDFTIAHDLRVGDIVVFRQEGELVFHVTALGPSCCEIQYGEDTLEEDKIEKLCDTENVSSKKKSLKREAESAPDNSLDSCFVATVTGSNLKRDTLYIPKEFALSNGLMNKYQIVLMNEEGESWKIDLRREAYNYGRFYMRRGWRSFCIANGKKPGDVFAFRLVKNEETPVIQLFPMTIEDLDKLQSLPRHKIRKTEAAPSSPDLSSFVATVTASNLSRDRLYLPKTFIMSNGLLKKFQMCLMNEEGESWTIDVKHEAHTGRFLTIRGWRRFCVANGKKPGDLLKFKLVHNEETPVLQLLPLKSEDLHKLDPSNDTRHGQSLEVTKKEFLGTEATENEFLGAEVYRNDSFKASEKDTLPFAEPINEDVRQGQCSQAIKQEYVSTEEKNSTSQNRFVTLTLTHSSKLNLPFEFMKGNGIKKAGKITMVDRYDAKWRTSLLMDKIGAMSLGRGSKGFCEVNGVEMNESFVLELIWEDTVPLLKFCSKV

SEQ ID NO: 206 - protein, 501 aa, Arabidopsis thaliana
  peptide (1)..(501): Ceres Seq. ID no. 13648127
  misc_feature (96)..(196): Pfam Name: Pfam Description:  B3 DNA binding domain
  misc_feature (66)..(481): NCBI GI NO: 15224604 NR Description: transcriptional factor B3 family
  misc_feature (1)..(82): NCBI GI NO: 15224604 NR Description: transcriptional factor B3 family
  misc_feature (1)..(195): NCBI GI NO: 26450115 NR Description: unknown protein [Arabidopsis thaliana]
  misc_feature (213)..(320): NCBI GI NO: 26450115 NR Description: unknown protein [Arabidopsis thaliana]
  misc_feature (403)..(501): NCBI GI NO: 26450115 NR Description: unknown protein [Arabidopsis thaliana]
  misc_feature (1)..(344): NCBI GI NO: 25403268 NR Description: protein T24P13.6 [imported] - Arabidopsis thaliana
  misc_feature (362)..(501): NCBI GI NO: 25403268 NR Description: protein T24P13.6 [imported] - Arabidopsis thaliana
  misc_feature (1)..(195): NCBI GI NO: 15224180 NR Description: transcriptional factor B3 family
  misc_feature (213)..(321): NCBI GI NO: 15224180 NR Description: transcriptional factor B3 family
  misc_feature (403)..(501): NCBI GI NO: 15224180 NR Description: transcriptional factor B3 family
MTWKVKIDGRRLSNGWEDFTIAHDLRVGDIVVFRQEGELVFHVTALGPSCCEIQYGEDTLEEDKIEKLCDTENVSSKKKSLKREAESAPDNSLDSCFVATVTGSNLKRDTLYIPKEFALSNGLMNKYQIVLMNEEGESWKIDLRREAYNYGRFYMRRGWRSFCIANGKKPGDVFAFRLVKNEETPVIQLFPMTIEDLDKLQSLPRHKIRKTEAAPSSPDLSSFVATVTASNLSRDRLYLPKTFIMSNGLLKKFQMCLMNEEGESWTIDVKHEAHTGRFLTIRGWRRFCVANGKKPGDLLKFKLVHNEETPVLQLLPLKSEDLHKLDPSNDTRHGQSLEVTKKEFLGTEATENEFLGAEVYRNDSFKASEKDTLPFAEPINEDVRQGQCSQAIKQEYVSTEEKNSTSQNRFVTLTLTHSSKLNLPFEFMKGNGIKKAGKITMVDRYDAKWRTSLLMDKIGAMSLGRGSKGFCEVNGVEMNESFVLELIWEDTVPLLKFCSKV

SEQ ID NO: 207 - DNA, 931 bp, Arabidopsis thaliana
  misc_feature (1)..(931): Ceres Seq. ID no. 13593410
gcacaatggcggccaacctgatttctcccccggtggcttgcccgtgcgttacttcctgagagggggtagtcaatgggcttcctccccggagaaaaaaatggatggtcacgaagagaaacagagtctctgctgtcacggccatgattgtggagccactttctgttgtttcttcttcagcaattcagattcatcaatggtgggaacaaaaccctaattcgttactgttaatgacggaggctactggtggttattcgttggctagctattatacgtctttgggtttgtttgttatctctgttcctggtctttggtctctaatcaaacgctctgttaaatcaaagatagtgagaaagacgtttgttgttaatgacgtcaagaaggagccaaagcaagtagctggagagattctatctttcttcacaaggaagaatttcaatatcactgatcgtggagaaacaatcacatttgaaggaaagatggttccaagtagaggacaagctgctctgcttacgttttgtacatgtataagcttagcaagtgttggtcttgtcttaaccattacagttcctgattttggaaacaattggttcttcatcattctccttagtccactcgcaggagtgtattactggaaaaaggcgtcgaggaaagaggagataaaagtgaagatgatggtgggatcaaaagggagattggatgagattgtggttcaaggagatgatgttcaggtcgaagaaatgaggaaagagcttcagcttaatgagaaaggcatggtttatgtcaaaggtctctttgagagatcatcataatgataacattttagcctcccatttttgccttttggggaatgtgtctatacttgttttattaaggttgagattaatgactttttaactcatttcccatacttcatactaaacgaatcgatttg

SEQ ID NO: 208 - protein, 235 aa, Arabidopsis thaliana
  peptide (1)..(235): Ceres Seq. ID no. 13593411
  misc_feature (1)..(235): NCBI GI NO: 18405058 NR Description: expressed protein [Arabidopsis thaliana]
  misc_feature (1)..(121): NCBI GI NO: 1402889 NR Description: unknown [Arabidopsis thaliana]
  misc_feature (171)..(235): NCBI GI NO: 1402889 NR Description: unknown [Arabidopsis thaliana]
  misc_feature (57)..(210): NCBI GI NO: 37523332 NR Description: hypothetical protein glr3763
  misc_feature (61)..(219): NCBI GI NO: 17231472 NR Description: hypothetical protein [Nostoc sp. PCC 7120]
  misc_feature (57)..(219): NCBI GI NO: 23123893 NR Description: hypothetical protein [Nostoc punctiforme]
  misc_feature (57)..(190): NCBI GI NO: 16332307 NR Description: unknown protein [Synechocystis sp. PCC 6803]
  misc_feature (62)..(190): NCBI GI NO: 23039442 NR Description: hypothetical protein
  misc_feature (55)..(208): NCBI GI NO: 22298167 NR Description: ORF_ID:tll0625~hypothetical protein
MVTKRNRVSAVTAMIVEPLSVVSSSAIQIHQWWEQNPNSLLLMTEATGGYSLASYYTSLGLFVISVPGLWSLIKRSVKSKIVRKTFVVNDVKKEPKQVAGEILSFFTRKNFNITDRGETITFEGKMVPSRGQAALLTFCTCISLASVGLVLTITVPDFGNNWFFIILLSPLAGVYYWKKASRKEEIKVKMMVGSKGRLDEIVVQGDDVQVEEMRKELQLNEKGMVYVKGLFERSS

SEQ ID NO: 209 - protein, 222 aa, Arabidopsis thaliana
  peptide (1)..(222): Ceres Seq. ID no. 13593412
  misc_feature (1)..(222): NCBI GI NO: 18405058 NR Description: expressed protein [Arabidopsis thaliana]
  misc_feature (1)..(108): NCBI GI NO: 1402889 NR Description: unknown [Arabidopsis thaliana]
  misc_feature (158)..(222): NCBI GI NO: 1402889 NR Description: unknown [Arabidopsis thaliana]
  misc_feature (44)..(197): NCBI GI NO: 37523332 NR Description: hypothetical protein glr3763
  misc_feature (48)..(206): NCBI GI NO: 17231472 NR Description: hypothetical protein [Nostoc sp. PCC 7120]
  misc_feature (44)..(206): NCBI GI NO: 23123893 NR Description: hypothetical protein [Nostoc punctiforme]
  misc_feature (44)..(177): NCBI GI NO: 16332307 NR Description: unknown protein [Synechocystis sp. PCC 6803]
  misc_feature (49)..(177): NCBI GI NO: 23039442 NR Description: hypothetical protein
  misc_feature (42)..(195): NCBI GI NO: 22298167 NR Description: ORF_ID:tll0625~hypothetical protein
MIVEPLSVVSSSAIQIHQWWEQNPNSLLLMTEATGGYSLASYYTSLGLFVISVPGLWSLIKRSVKSKIVRKTFVVNDVKKEPKQVAGEILSFFTRKNFNITDRGETITFEGKMVPSRGQAALLTFCTCISLASVGLVLTITVPDFGNNWFFIILLSPLAGVYYWKKASRKEEIKVKMMVGSKGRLDEIVVQGDDVQVEEMRKELQLNEKGMVYVKGLFERSS

SEQ ID NO: 210 - protein, 193 aa, Arabidopsis thaliana
  peptide (1)..(193): Ceres Seq. ID no. 13593413
  misc_feature (1)..(193): NCBI GI NO: 18405058 NR Description: expressed protein [Arabidopsis thaliana]
  misc_feature (1)..(79): NCBI GI NO: 1402889 NR Description: unknown [Arabidopsis thaliana]
  misc_feature (129)..(193): NCBI GI NO: 1402889 NR Description: unknown [Arabidopsis thaliana]
  misc_feature (15)..(168): NCBI GI NO: 37523332 NR Description: hypothetical protein glr3763
  misc_feature (19)..(177): NCBI GI NO: 17231472 NR Description: hypothetical protein [Nostoc sp. PCC 7120]
  misc_feature (15)..(177): NCBI GI NO: 23123893 NR Description: hypothetical protein [Nostoc punctiforme]
  misc_feature (15)..(148): NCBI GI NO: 16332307 NR Description: unknown protein [Synechocystis sp. PCC 6803]
  misc_feature (20)..(148): NCBI GI NO: 23039442 NR Description: hypothetical protein
  misc_feature (13)..(166): NCBI GI NO: 22298167 NR Description: ORF_ID:tll0625~hypothetical protein
MTEATGGYSLASYYTSLGLFVISVPGLWSLIKRSVKSKIVRKTFVVNDVKKEPKQVAGEILSFFTRKNFNITDRGETITFEGKMVPSRGQAALLTFCTCISLASVGLVLTITVPDFGNNWFFIILLSPLAGVYYWKKASRKEEIKVKMMVGSKGRLDEIVVQGDDVQVEEMRKELQLNEKGMVYVKGLFERSS

SEQ ID NO: 211 - DNA, 857 bp, Arabidopsis thaliana
  misc_feature (1)..(857): Ceres Seq. ID no. 13647395
gaaactctctttttgtctctattgttgaaaaaatggaagtgagaggcccagtgatatggatgttcttaatgtgttgcatatttggtcacttaattgtaagtcataagaatgacttagtggaagccaaaagcttttcaaaatctgaagatttggaaatcgagaagagactacagactatcaacaaacccgccgtcaagatcatcaagactattgatggagaaatatacggatgtgtggatttcttcaagcaaccagcatttgatcatccttctatgaagaatcacacataccattacaagatgcgtctaatctggaaagaaatgggagaaagagagacaaacaatactgcttttggttacttatgggagaatggtgtgggttgtcccattggtacagtccctatggaaagagtcaccaaagacgatattttaagattagactcatttggtgataatcataaaccctgtggttcctggaacactaccacttatgatcctaataatgttgttcattacaaccaacatcgttttgcggtagctcgaacgaagaacataggaaggaggttcaatggagcaacgatggaactttgtataaccgctcctaaggttaagccaacccaattcagtgcttcaagacttcacattcagatgggaagggatttcctccaagccggtttgactgtaaatccagtattgtacaaggacaagcaacctcgaacttttgtctatacagatgtgagtcagtcacattattctagtcaattctttttctaatattttttttgaatatatatatatatgaaagaattaacatggatggaaaaaaaaaaaaaaaaaaaactcgagggggggcccggt

SEQ ID NO: 212 - protein, 256 aa, Arabidopsis thaliana
  peptide (1)..(256): Ceres Seq. ID no. 13647396
  misc_feature (11)..(244): NCBI GI NO: 22328636 NR Description: hypothetical protein [Arabidopsis thaliana]
  misc_feature (17)..(244): NCBI GI NO: 15218449 NR Description: expressed protein [Arabidopsis thaliana]
  misc_feature (17)..(227): NCBI GI NO: 25345694 NR Description: protein F14N23.7 [imported] - Arabidopsis thaliana
  misc_feature (225)..(252): NCBI GI NO: 25345694 NR Description: protein F14N23.7 [imported] - Arabidopsis thaliana
  misc_feature (17)..(252): NCBI GI NO: 30683101 NR Description: expressed protein [Arabidopsis thaliana]
  misc_feature (69)..(226): NCBI GI NO: 7485045 NR Description: hypothetical protein - Arabidopsis thaliana
  misc_feature (17)..(70): NCBI GI NO: 7485045 NR Description: hypothetical protein - Arabidopsis thaliana
  misc_feature (61)..(252): NCBI GI NO: 11358466 NR Description: IB1C3-1 protein
  misc_feature (11)..(132): NCBI GI NO: 22328638 NR Description: hypothetical protein [Arabidopsis thaliana]
  misc_feature (182)..(224): NCBI GI NO: 22328638 NR Description: hypothetical protein [Arabidopsis thaliana]
NSLFVSIVEKMEVRGPVIWMFLMCCIFGHLIVSHKNDLVEAKSFSKSEDLEIEKRLQTINKPAVKIIKTIDGEIYGCVDFFKQPAFDHPSMKNHTYHYKMRLIWKEMGERETNNTAFGYLWENGVGCPIGTVPMERVTKDDILRLDSFGDNHKPCGSWNTTTYDPNNVVHYNQHRFAVARTKNIGRRFNGATMELCITAPKVKPTQFSASRLHIQMGRDFLQAGLTVNPVLYKDKQPRTFVYTDVSQSHYSSQFFF

SEQ ID NO: 213 - protein, 246 aa, Arabidopsis thaliana
  peptide (1)..(246): Ceres Seq. ID no. 13647397
  misc_feature (1)..(234): NCBI GI NO: 22328636 NR Description: hypothetical protein [Arabidopsis thaliana]
  misc_feature (7)..(234): NCBI GI NO: 15218449 NR Description: expressed protein [Arabidopsis thaliana]
  misc_feature (7)..(217): NCBI GI NO: 25345694 NR Description: protein F14N23.7 [imported] - Arabidopsis thaliana
  misc_feature (215)..(242): NCBI GI NO: 25345694 NR Description: protein F14N23.7 [imported] - Arabidopsis thaliana
  misc_feature (7)..(242): NCBI GI NO: 30683101 NR Description: expressed protein [Arabidopsis thaliana]
  misc_feature (59)..(216): NCBI GI NO: 7485045 NR Description: hypothetical protein - Arabidopsis thaliana
  misc_feature (7)..(60): NCBI GI NO: 7485045 NR Description: hypothetical protein - Arabidopsis thaliana
  misc_feature (51)..(242): NCBI GI NO: 11358466 NR Description: IB1C3-1 protein
  misc_feature (1)..(122): NCBI GI NO: 22328638 NR Description: hypothetical protein [Arabidopsis thaliana]
  misc_feature (172)..(214): NCBI GI NO: 22328638 NR Description: hypothetical protein [Arabidopsis thaliana]
MEVRGPVIWMFLMCCIFGHLIVSHKNDLVEAKSFSKSEDLEIEKRLQTINKPAVKIIKTIDGEIYGCVDFFKQPAFDHPSMKNHTYHYKMRLIWKEMGERETNNTAFGYLWENGVGCPIGTVPMERVTKDDILRLDSFGDNHKPCGSWNTTTYDPNNVVHYNQHRFAVARTKNIGRRFNGATMELCITAPKVKPTQFSASRLHIQMGRDFLQAGLTVNPVLYKDKQPRTFVYTDVSQSHYSSQFFF

SEQ ID NO: 214 - protein, 237 aa, Arabidopsis thaliana
  peptide (1)..(237): Ceres Seq. ID no. 13647398
  misc_feature (1)..(225): NCBI GI NO: 22328636 NR Description: hypothetical protein [Arabidopsis thaliana]
  misc_feature (1)..(225): NCBI GI NO: 15218449 NR Description: expressed protein [Arabidopsis thaliana]
  misc_feature (1)..(208): NCBI GI NO: 25345694 NR Description: protein F14N23.7 [imported] - Arabidopsis thaliana
  misc_feature (206)..(233): NCBI GI NO: 25345694 NR Description: protein F14N23.7 [imported] - Arabidopsis thaliana
  misc_feature (1)..(233): NCBI GI NO: 30683101 NR Description: expressed protein [Arabidopsis thaliana]
  misc_feature (50)..(207): NCBI GI NO: 7485045 NR Description: hypothetical protein - Arabidopsis thaliana
  misc_feature (1)..(51): NCBI GI NO: 7485045 NR Description: hypothetical protein - Arabidopsis thaliana
  misc_feature (42)..(233): NCBI GI NO: 11358466 NR Description: IB1C3-1 protein
  misc_feature (1)..(113): NCBI GI NO: 22328638 NR Description: hypothetical protein [Arabidopsis thaliana]
  misc_feature (163)..(205): NCBI GI NO: 22328638 NR Description: hypothetical protein [Arabidopsis thaliana]
MFLMCCIFGHLIVSHKNDLVEAKSFSKSEDLEIEKRLQTINKPAVKIIKTIDGEIYGCVDFFKQPAFDHPSMKNHTYHYKMRLIWKEMGERETNNTAFGYLWENGVGCPIGTVPMERVTKDDILRLDSFGDNHKPCGSWNTTTYDPNNVVHYNQHRFAVARTKNIGRRFNGATMELCITAPKVKPTQFSASRLHIQMGRDFLQAGLTVNPVLYKDKQPRTFVYTDVSQSHYSSQFFF

SEQ ID NO: 215 - DNA, 551 bp, Arabidopsis thaliana
  misc_feature (1)..(551): Ceres Seq. ID no. 13648206
agctcactagtcccccccccccccccgccaaaattaaacctcaccgacggattcaattctctcgttctcaggccgtcttcatcgccggagcgttttcttacgaaaagaatgggcttctggacattgttaaaaggtctgctgctctttgcaaatgcactggcaatcctcaacgaagaccgtttccttgttccaagaggatggacactcggagaactccaccaaaccggtagaagaaactctcccaaaggccaaatcattggtctgatccatgcctgccagtacatgaggctacccctcatgctcattaacacagcagtcatcgtcttgaagcttatctccggttgaagattttgtgtagatgaagataaactacattgcgttcttcaaatgattgtgattagttacaaatctattttgtgtaggagttggaatttgtttttgtcatccctcgcactcaagtttggtgtgcattctacaacattcttctcatatttttacatgccaaatcaaaccaaaaaaaaaaaaaaaaaaaactcgagggggggcccggt

SEQ ID NO: 216 - protein, 114 aa, Arabidopsis thaliana
  peptide (1)..(114): Ceres Seq. ID no. 13648207
  misc_feature (37)..(114): NCBI GI NO: 26450605 NR Description: unknown protein [Arabidopsis thaliana]
  misc_feature (37)..(114): NCBI GI NO: 18404604 NR Description: expressed protein [Arabidopsis thaliana]
  misc_feature (38)..(114): NCBI GI NO: 19114695 NR Description: hypothetical protein [Schizosaccharomyces pombe]
  misc_feature (40)..(114): NCBI GI NO: 7705819 NR Description: HSPC039 protein [Homo sapiens]
  misc_feature (40)..(114): NCBI GI NO: 24662435 NR Description: CG32069-PA [Drosophila melanogaster]
SSLVPPPPPPKLNLTDGFNSLVLRPSSSPERFLTKRMGFWTLLKGLLLFANALAILNEDRFLVPRGWTLGELHQTGRRNSPKGQIIGLIHACQYMRLPLMLINTAVIVLKLISG

SEQ ID NO: 217 - protein, 78 aa, Arabidopsis thaliana
  peptide (1)..(78): Ceres Seq. ID no. 13648208
  misc_feature (1)..(78): NCBI GI NO: 26450605 NR Description: unknown protein [Arabidopsis thaliana]
  misc_feature (1)..(78): NCBI GI NO: 18404604 NR Description: expressed protein [Arabidopsis thaliana]
  misc_feature (2)..(78): NCBI GI NO: 19114695 NR Description: hypothetical protein [Schizosaccharomyces pombe]
  misc_feature (4)..(78): NCBI GI NO: 7705819 NR Description: HSPC039 protein [Homo sapiens]
  misc_feature (4)..(78): NCBI GI NO: 24662435 NR Description: CG32069-PA [Drosophila melanogaster]
MGFWTLLKGLLLFANALAILNEDRFLVPRGWTLGELHQTGRRNSPKGQIIGLIHACQYMRLPLMLINTAVIVLKLISG

SEQ ID NO: 218 - protein, 75 aa, Arabidopsis thaliana
  peptide (1)..(75): Ceres Seq. ID no. 13648209
LTSPPPPPAKIKPHRRIQFSRSQAVFIAGAFSYEKNGLLDIVKRSAALCKCTGNPQRRPFPCSKRMDTRRTPPNR

SEQ ID NO: 219 - DNA, 1233 bp, Arabidopsis thaliana
  misc_feature (1)..(1233): Ceres Seq. ID no. 12605597
aaagatatgcccaattgaagcaaaagccagaacagcttttaaattgcaatggtctcttcggttttatccatccctccacaaacttgtctacttccacgattacccatctctgattctgtcaattgcaaatcgaaaatagtgtactatcgctccacaagtgtccgaggaagctccgtcaagagacaatcaacggccagaactcgaagtttcactgagacaaatcgtcgaacaccttccgtgcaatccaaacatgaattctgggaagacccagatgatggtagcgacagtgaaagcgaatatgaaggagacgaagaaggtggtattggaaatgatttagattacgagagtgattgggaagatgactcgagagcccagaagcttactactacagacaattacgaggaagagcttgcaaaagaggttgaacaacttcttgaacctgaagaaagagtaattcttcagcaaaatgagaaaccaaatctcaagatgatctcaacaaagagttggaagccacttcagacacttgctctgtcaatgcagattcagttaatggataatcttattgaaaacggactagacattgatgatgttgacaaggacaaccaaaccgctcttcacaaagcaatcattggtaaaaaagaagcggtgattagtcatcttttgaggaaaggagctaataatcatcttcaagatcgtggcggtgcagctgcgattcatcatgcagcacaagaaggagcatcgcagccggtagtaatactattcaagtacaacgtagtcgtcaatgttgcagataatgaaggatgatgtccgttgcatataatagttcaaagcagaagtcgtggcatcacaaagatattgttgtccaacggtggtgataatacaacacgacggaaggatgagaaattatctttggacttggctctgtgctttggaagagatttcaagtcatatgatctggtcaagctattgaagattatgcccaccggggatatatagaaagagctggtgagattttgaatgatcaggttgagattactaaactgcatttgccattgcttggtttgattgtaatctacaccggtataagtggttaaggtagaagaaacccgattgagtttgtaattactgcttttatatattcgtggatgaacttgttattcgggtgtgtgtatcataatgtgcataacaaagatacacattgttatgtcatatatattaaattacaagcattgc

SEQ ID NO: 220 - protein, 251 aa, Arabidopsis thaliana
  peptide (1)..(251): Ceres Seq. ID no. 12605598
  misc_feature (184)..(216): Pfam Name: Pfam Description:  Ankyrin repeat
  misc_feature (1)..(251): NCBI GI NO: 15242597 NR Description: ankyrin repeat protein EMB506
  misc_feature (70)..(251): NCBI GI NO: 26450056 NR Description: unknown protein [Arabidopsis thaliana]
  misc_feature (70)..(251): NCBI GI NO: 30698188 NR Description: expressed protein [Arabidopsis thaliana]
  misc_feature (123)..(251): NCBI GI NO: 22758264 NR Description: Putative ankyrin-repeat protein
  misc_feature (110)..(251): NCBI GI NO: 322461 NR Description: ankyrin-repeat protein - Arabidopsis thaliana
  misc_feature (171)..(251): NCBI GI NO: 28373666 NR Description: Chain A
  misc_feature (153)..(251): NCBI GI NO: 18644714 NR Description: cyclin-dependent kinase inhibitor 2c
  misc_feature (153)..(251): NCBI GI NO: 18777724 NR Description: cyclin dependent kinase inhibitor 2C
  misc_feature (153)..(251): NCBI GI NO: 4506217 NR Description: proteasome 26S non-ATPase subunit 10 isoform 1
  misc_feature (153)..(251): NCBI GI NO: 39654744 NR Description: Chain A, X-Ray Structure Of Human Gankyrin
MVSSVLSIPPQTCLLPRLPISDSVNCKSKIVYYRSTSVRGSSVKRQSTARTRSFTETNRRTPSVQSKHEFWEDPDDGSDSESEYEGDEEGGIGNDLDYESDWEDDSRAQKLTTTDNYEEELAKEVEQLLEPEERVILQQNEKPNLKMISTKSWKPLQTLALSMQIQLMDNLIENGLDIDDVDKDNQTALHKAIIGKKEAVISHLLRKGANNHLQDRGGAAAIHHAAQEGASQPVVILFKYNVVVNVADNEG

SEQ ID NO: 221 - DNA, 672 bp, Arabidopsis thaliana
  misc_feature (1)..(672): Ceres Seq. ID no. 14304353
gagagagagcactagtccccccccccccgatgcatcacttgtttctccataataagagagttttaagcatttgaaacaaaaaaaatggcttccaaggctttggttctgttgggtctctttgctgttcttctcgtcgtctcagaagtagccgcggcatcttctgccacagtgaattcagagagtaaggaaactgtgaaacctgatcaacgtggctacggtgacaatggaggaaattacaataacggaggaggttaccagggaggagggggtaattaccaaggaggaggaggtaattaccaaggaggaggaggtaattaccaaggaggaggaggaagataccaaggaggaggaggacggtaccaaggaggaggaggacgataccaaggaggcggtgggcgacaaggaggagggggaagtgggggaagttactgccgccacggctgctgctacagaggttacaacggctgctcaagatgctgctcgtatgccggagaagctgttcagactcagcccggtcactaaaacaatatattaaccaatcaccaccatgcatgtattgcattatgtatgtatgattttaagtaaaccatggtgcgtttgtaatgaactgcctcaagtttttgaggcactatagattaagaagagaactatgggaataaagtttgattatgc

SEQ ID NO: 222 - protein, 145 aa, Arabidopsis thaliana
  peptide (1)..(145): Ceres Seq. ID no. 14304354
  misc_feature (40)..(119): Pfam Name: Pfam Description:  Dehydrin
  misc_feature (1)..(145): NCBI GI NO: 15224548 NR Description: glycine-rich protein (GRP) [Arabidopsis thaliana]
  misc_feature (1)..(145): NCBI GI NO: 259447 NR Description: glycine-rich protein; atGRP [Arabidopsis thaliana]
  misc_feature (1)..(145): NCBI GI NO: 81625 NR Description: glycine-rich protein 3 precursor
  misc_feature (1)..(77): NCBI GI NO: 24417446 NR Description: unknown [Arabidopsis thaliana]
  misc_feature (65)..(145): NCBI GI NO: 4206767 NR Description: glycine-rich protein 3 short isoform
  misc_feature (1)..(144): NCBI GI NO: 30678191 NR Description: glycine-rich protein [Arabidopsis thaliana]
  misc_feature (65)..(145): NCBI GI NO: 18396043 NR Description: glycine-rich protein [Arabidopsis thaliana]
  misc_feature (65)..(145): NCBI GI NO: 20466662 NR Description: unknown protein [Arabidopsis thaliana]
  misc_feature (8)..(139): NCBI GI NO: 13443598 NR Description: glycine-rich protein 1 [Cicer arietinum]
  misc_feature (57)..(145): NCBI GI NO: 18266043 NR Description: glycine-rich protein [Brassica oleracea]
MASKALVLLGLFAVLLVVSEVAAASSATVNSESKETVKPDQRGYGDNGGNYNNGGGYQGGGGNYQGGGGNYQGGGGNYQGGGGRYQGGGGRYQGGGGRYQGGGGRQGGGGSGGSYCRHGCCYRGYNGCSRCCSYAGEAVQTQPGH

SEQ ID NO: 223 - protein, 103 aa, Arabidopsis thaliana
  peptide (1)..(103): Ceres Seq. ID no. 14304355
  misc_feature (24)..(101): NCBI GI NO: 25411166 NR Description: hypothetical protein At2g05380
MEEITITEEVTREEGVITKEEEVITKEEEVITKEEEEDTKEEEDGTKEEEDDTKEAVGDKEEGEVGEVTAATAAATEVTTAAQDAARMPEKLFRLSPVTKTIY

SEQ ID NO: 224 - DNA, 1347 bp, Arabidopsis thaliana
  misc_feature (1)..(1347): Ceres Seq. ID no. 13648367
gagaagaaaaatagtgctttgagaagaagaaaaaaaccgttgccctagaattaaaatccacttctcagtgtcataggcgtcgtcggtttgggaattttataaagttggtctcttttgaattcatcagtttcgtcattctccttcaaatctggaaaccaaagcgagtgtgttttgctctcttgaatcgaattttgagcagaaaatggaagctctctacgccaagctctacgacaaatacaccaaactccagaagaagaaatattccgaatacgatgagattaataaggaacaagaagagaaattccttacctttgtttcagcctcagaggagttgatggaacatttgagtggtgaaaatcagagttctctggagatggttgagaagttgaggaatgaaatcatttcaatcagatctggcagggacgacaagtttctggagtgtcaaaagcttctcatggaagaagaactaaagaacaaatcactttctgaagaagttgtcaagctaaaagaagaagttgtcaagctaaaagagctggtccaagaggaacatcctcgcaactatgaagatcaaagtggaaaaaaacaaaagagaaagactcctgaaagtgctcgagttacaacgagaagcatgataaaacgtagcagactgtcagaagatttggtggaaacggatatggtatcacctgacattagcaaacatcataaagcaaaggagcctctcttggtttctcagccacaatgctgcagaacaacctacgatggatcaagtagttctgctagttgtacatttcaagctcttggcaaacacttgctaggaatgaaattatcaactaataataagggcaaacgcgcctgcattgtagcctcacacccaacaaccggtttatccttcagcctaacttttataaataacccaaatggtgaagaatctgagctgctttacaagcctgcatcactcggaacatttcaaagagtggcaccggaatggatgagagaagttataaagttcagcacaagtatgtgtcccatcttctttgaaagagtctctcgagtcattaagctcaattgttgatcggtaccgtatgtacatctccctccccttatcttgtgtagtcatctctgatggcttcttagtgtgatgtttctcaataggtttgaaaagctagggaagttatcattgtatctatagaaatgtgtctctctttaactttggaattagtttcaaagatagtgtgtccttgtgatgaatcatattgtaacaagatcttgatttatcctttgctctcgataccctctcctcttgtagacctcataaatctctgatctattgagcattttacatgattc

SEQ ID NO: 225 - protein, 289 aa, Arabidopsis thaliana
  peptide (1)..(289): Ceres Seq. ID no. 13648368
  misc_feature (1)..(289): NCBI GI NO: 22331190 NR Description: expressed protein [Arabidopsis thaliana]
  misc_feature (161)..(285): NCBI GI NO: 13194678 NR Description: unknown [Pennisetum ciliare]
MEALYAKLYDKYTKLQKKKYSEYDEINKEQEEKFLTFVSASEELMEHLSGENQSSLEMVEKLRNEIISIRSGRDDKFLECQKLLMEEELKNKSLSEEVVKLKEEVVKLKELVQEEHPRNYEDQSGKKQKRKTPESARVTTRSMIKRSRLSEDLVETDMVSPDISKHHKAKEPLLVSQPQCCRTTYDGSSSSASCTFQALGKHLLGMKLSTNNKGKRACIVASHPTTGLSFSLTFINNPNGEESELLYKPASLGTFQRVAPEWMREVIKFSTSMCPIFFERVSRVIKLNC

SEQ ID NO: 226 - protein, 245 aa, Arabidopsis thaliana
  peptide (1)..(245): Ceres Seq. ID no. 13648369
  misc_feature (1)..(245): NCBI GI NO: 22331190 NR Description: expressed protein [Arabidopsis thaliana]
  misc_feature (117)..(241): NCBI GI NO: 13194678 NR Description: unknown [Pennisetum ciliare]
MEHLSGENQSSLEMVEKLRNEIISIRSGRDDKFLECQKLLMEEELKNKSLSEEVVKLKEEVVKLKELVQEEHPRNYEDQSGKKQKRKTPESARVTTRSMIKRSRLSEDLVETDMVSPDISKHHKAKEPLLVSQPQCCRTTYDGSSSSASCTFQALGKHLLGMKLSTNNKGKRACIVASHPTTGLSFSLTFINNPNGEESELLYKPASLGTFQRVAPEWMREVIKFSTSMCPIFFERVSRVIKLNC

SEQ ID NO: 227 - protein, 232 aa, Arabidopsis thaliana
  peptide (1)..(232): Ceres Seq. ID no. 13648370
  misc_feature (1)..(232): NCBI GI NO: 22331190 NR Description: expressed protein [Arabidopsis thaliana]
  misc_feature (104)..(228): NCBI GI NO: 13194678 NR Description: unknown [Pennisetum ciliare]
MVEKLRNEIISIRSGRDDKFLECQKLLMEEELKNKSLSEEVVKLKEEVVKLKELVQEEHPRNYEDQSGKKQKRKTPESARVTTRSMIKRSRLSEDLVETDMVSPDISKHHKAKEPLLVSQPQCCRTTYDGSSSSASCTFQALGKHLLGMKLSTNNKGKRACIVASHPTTGLSFSLTFINNPNGEESELLYKPASLGTFQRVAPEWMREVIKFSTSMCPIFFERVSRVIKLNC

SEQ ID NO: 228 - DNA, 778 bp, Arabidopsis thaliana
  misc_feature (1)..(778): Ceres Seq. ID no. 13648212
agagctcactagtccccccccccccccccgaagataatgtatctaggtttgcttatgattatacatgtgatatttaatacatggcacaggttcgtcgagtttcacagccataggtacaatagaaggcaaattcgattgtggttatctggtaaaagttaagttgggctcagagattcttaacggcgttctttatcattcggcccagcccggcccatcatcatctccaaccgctgttctaaacaatgccgttgtaccttatgttgaaactgggaggagacggcgtcgtttaggtaaaagacgaagaagcagacgcagagaagatccgaattacccgaaaccgaaccggagcggttacaatttcttctttgctgagaaacattgcaagctcaaatcactttatcccaacaaggagagagagtttacgaaacttatcggagaatcgtggagcaatctctctaccgaagaacgaatggtttatcaagacattggattgaaggataaggaaaggtatcagagggagttgaatgagtacagagaaacgttgaggcttagggatggtgacatgacaaacggcaaggctttttaggtgatttatttaaaacggcaactcgttttgttgtaggtcgtttctctcttttaagattggacgcctcgccgtttcttttattttctagcttattgtagttgtccatgcttgcttaactaggctcagtgagaggctagacttgccaaacttgaagagtctttatttatttaagaattttagatgttctaatgt

SEQ ID NO: 229 - protein, 40 aa, Arabidopsis thaliana
  peptide (1)..(40): Ceres Seq. ID no. 13648213
MYLGLLMIIHVIFNTWHRFVEFHSHRYNRRQIRLWLSGKS

SEQ ID NO: 230 - protein, 38 aa, Arabidopsis thaliana
  peptide (1)..(38): Ceres Seq. ID no. 13648214
  misc_feature (1)..(38): NCBI GI NO: 15222957 NR Description: expressed protein [Arabidopsis thaliana]
  misc_feature (1)..(32): NCBI GI NO: 32490476 NR Description: glutathione S-transferase GST 16 - like protein
  misc_feature (1)..(23): NCBI GI NO: 15220344 NR Description: expressed protein [Arabidopsis thaliana]
  misc_feature (1)..(24): NCBI GI NO: 18399977 NR Description: expressed protein [Arabidopsis thaliana]
  misc_feature (1)..(28): NCBI GI NO: 25405992 NR Description: protein F20N2.8 [imported] - Arabidopsis thaliana
  misc_feature (1)..(28): NCBI GI NO: 15222755 NR Description: hypothetical protein [Arabidopsis thaliana]
  misc_feature (1)..(37): NCBI GI NO: 19114226 NR Description: nonhistone chromosomal protein
  misc_feature (1)..(22): NCBI GI NO: 27882654 NR Description: Similar to high mobility group box 3
  misc_feature (1)..(23): NCBI GI NO: 730136 NR Description: HIGH MOBILITY GROUP PROTEIN HOMOLOG NHP1
  misc_feature (1)..(21): NCBI GI NO: 790198 NR Description: high mobility group protein
MVYQDIGLKDKERYQRELNEYRETLRLRDGDMTNGKAF

SEQ ID NO: 231 - protein, 34 aa, Arabidopsis thaliana
  peptide (1)..(34): Ceres Seq. ID no. 13648215
MIIHVIFNTWHRFVEFHSHRYNRRQIRLWLSGKS

SEQ ID NO: 232 - DNA, 408 bp, Arabidopsis thaliana
  misc_feature (1)..(408): Ceres Seq. ID no. 12606252
ggaaacgaattctctctctctcagcttatagatacccaaattaagaagaagtgaaagatgcatcctccacttacaccacatagacatccaatgtgtctggagataattgaggaatttcaaaagtgtcatatagaccatccgattgggaaattctttggagaatgtacagagctgaaagtaaagcttgatcgatgtttccgccaagagaaagctgtgaagcggaaggtaaatttcgaacaaagcaagaaacttcaagaaagactgaaagctataaggaaagaagaaaccgcagagacttgagcattgttgtataataatcctataaagaacatgtgcgtgtgtctatttcaaaagaacacatttctaaattgatccacaaagaagagttttgatactcttttgcctcgt

SEQ ID NO: 233 - protein, 80 aa, Arabidopsis thaliana
  peptide (1)..(80): Ceres Seq. ID no. 12606253
  misc_feature (1)..(79): NCBI GI NO: 19112798 NR Description: very hypothetical protein
  misc_feature (1)..(69): NCBI GI NO: 33457314 NR Description: RIKEN cDNA 1110046L09 [Mus musculus]
  misc_feature (1)..(69): NCBI GI NO: 26378936 NR Description: unnamed protein product [Mus musculus]
MHPPLTPHRHPMCLEIIEEFQKCHIDHPIGKFFGECTELKVKLDRCFRQEKAVKRKVNFEQSKKLQERLKAIRKEETAET

SEQ ID NO: 234 - protein, 69 aa, Arabidopsis thaliana
  peptide (1)..(69): Ceres Seq. ID no. 12606254
  misc_feature (1)..(68): NCBI GI NO: 19112798 NR Description: very hypothetical protein
  misc_feature (1)..(58): NCBI GI NO: 33457314 NR Description: RIKEN cDNA 1110046L09 [Mus musculus]
  misc_feature (1)..(58): NCBI GI NO: 26378936 NR Description: unnamed protein product [Mus musculus]
MCLEIIEEFQKCHIDHPIGKFFGECTELKVKLDRCFRQEKAVKRKVNFEQSKKLQERLKAIRKEETAET

SEQ ID NO: 235 - protein, 40 aa, Arabidopsis thaliana
  peptide (1)..(40): Ceres Seq. ID no. 12606255
MFPPRESCEAEGKFRTKQETSRKTESYKERRNRRDLSIVV

SEQ ID NO: 236 - DNA, 452 bp, Arabidopsis thaliana
  misc_feature (1)..(452): Ceres Seq. ID no. 12605645
gagacctgcgagaaacaaaaaataataaaagtaaacaaaactaccaaaaaaaaaaaaacagaaaaaaacctttcaggtctcaactagcaatggagatgaagaagattgcctgcggagtcgttttcgctgctgcttccatgaccgccgtcatggctgcagaggtcggagcacctgcaccaggacccgccgcaagtggagcctccgtagctgttccggctcttggctctttggttggagcttcccttgtgtctctcttcgcctactacttgaactaagcttttctatttaaagcaaaaaaagaagaaatatcgatgtctctgtcaatttctatgatgtccaattttgtgtgtgttgtttagacaggcaaagtgaataaaaacgaaagataatttgattacggtcagacatgtttttatgtaatgctgattaataaataaatattatataccctg

SEQ ID NO: 237 - protein, 90 aa, Arabidopsis thaliana
  peptide (1)..(90): Ceres Seq. ID no. 12605646
  misc_feature (30)..(90): NCBI GI NO: 15230372 NR Description: arabinogalactan-protein, putative
  misc_feature (30)..(90): NCBI GI NO: 20279095 NR Description: arabinogalactan-peptide AGP23
  misc_feature (30)..(77): NCBI GI NO: 4455102 NR Description: pollen-specific protein BAN102 [Brassica rapa]
DLRETKNNKSKQNYQKKKNRKKPFRSQLAMEMKKIACGVVFAAASMTAVMAAEVGAPAPGPAASGASVAVPALGSLVGASLVSLFAYYLN

SEQ ID NO: 238 - protein, 61 aa, Arabidopsis thaliana
  peptide (1)..(61): Ceres Seq. ID no. 12605647
  misc_feature (1)..(61): NCBI GI NO: 15230372 NR Description: arabinogalactan-protein, putative
  misc_feature (1)..(61): NCBI GI NO: 20279095 NR Description: arabinogalactan-peptide AGP23
  misc_feature (1)..(48): NCBI GI NO: 4455102 NR Description: pollen-specific protein BAN102 [Brassica rapa]
MEMKKIACGVVFAAASMTAVMAAEVGAPAPGPAASGASVAVPALGSLVGASLVSLFAYYLN

SEQ ID NO: 239 - protein, 59 aa, Arabidopsis thaliana
  peptide (1)..(59): Ceres Seq. ID no. 12605648
  misc_feature (1)..(59): NCBI GI NO: 15230372 NR Description: arabinogalactan-protein, putative
  misc_feature (1)..(59): NCBI GI NO: 20279095 NR Description: arabinogalactan-peptide AGP23
  misc_feature (1)..(46): NCBI GI NO: 4455102 NR Description: pollen-specific protein BAN102 [Brassica rapa]
MKKIACGVVFAAASMTAVMAAEVGAPAPGPAASGASVAVPALGSLVGASLVSLFAYYLN

SEQ ID NO: 240 - DNA, 1324 bp, Arabidopsis thaliana
  misc_feature (1)..(1324): Ceres Seq. ID no. 14307631
ggagagtagaagaagcagaagcagtaatggtacgagcttcatcgtcgaagaaaggaggatcaaaaggaggagacaaagacgacgcagagtcaaaacagaggaagagattaaaaaccctagctctcgataaccaattgctctctgattctccggcgaaatctcattcctctctcaaaccttcaaagcaagttctcaaacaccatggcaccgacatcatccgcaaatctcagcgcaagaatcgctttctcttctctttccctggtcttctcgctcctatctccgccgctaccatcggcgatctcgatcgattatctaccaaaaaccctgtcctctaccttaatttccctcagggtcggatgaaactttttggaacgattttgtatccgaagaacaggtacttgactcttcaattttccagaggaggcaaaaatgtcttatgtgatgattattttgataacatgattgtgttctctgagtcatggtggattgggacaaaagaggagaatcctgaagaagctcgtcttgatttccctaaagaactagctcaggcagagaatactgagtttgatttccaaggcggtgctggaggagcagcttccgtcaagacgatggcaactcctgaaactggtagccaaccaacagagacagactcacctgaagttgacatggaggatgttttgtctgaggatggagaattcttggacgataagatccaagtaacaccaccagtccaattaacaccaccaatccaagtaacaccagtccgacagtctcagagaaattctgggaagaaattcaactttgcagaaacttccccagaggcctcctctggtgaaagtgaaggcaatacatctgatgaagatgagaaacctctgttggaacctgaatcttcaacaagaggtcgtgaggaatctcaagatggtaatggtgttactgcatcagcaagcaagttgcctacagaacttccggctaaaaaggaaaaaccaaaaagcaaagacagtaagctcgttcaagctactttgtctaaccttttcaagaaagctgaggagaaaacagctggaacttccaaggcgaaatcatcctcaaaagcttaaagaactcttttccagaagaaaatagaggtctgttgtttcttttgctgtgagaatatacagttttcagttcttttagttatgtttgagtgagatgagtaatgagaaattgctacaagactgatgattatgtttcacaaatcaagaattggataatgtattcatcatgcttaatcgatcgatagtttgtgttcaccgagcaatgtataaatcatctctgctcattttaatac

SEQ ID NO: 241 - protein, 363 aa, Arabidopsis thaliana
  peptide (1)..(363): Ceres Seq. ID no. 14307632
  misc_feature (9)..(363): NCBI GI NO: 18402164 NR Description: root hairless 1 (RHL1) [Arabidopsis thaliana]
  misc_feature (9)..(363): NCBI GI NO: 3811320 NR Description: ROOT HAIRLESS 1 [Arabidopsis thaliana]
  misc_feature (21)..(326): NCBI GI NO: 34394443 NR Description: putative root hairless 1
RVEEAEAVMVRASSSKKGGSKGGDKDDAESKQRKRLKTLALDNQLLSDSPAKSHSSLKPSKQVLKHHGTDIIRKSQRKNRFLFSFPGLLAPISAATIGDLDRLSTKNPVLYLNFPQGRMKLFGTILYPKNRYLTLQFSRGGKNVLCDDYFDNMIVFSESWWIGTKEENPEEARLDFPKELAQAENTEFDFQGGAGGAASVKTMATPETGSQPTETDSPEVDMEDVLSEDGEFLDDKIQVTPPVQLTPPIQVTPVRQSQRNSGKKFNFAETSPEASSGESEGNTSDEDEKPLLEPESSTRGREESQDGNGVTASASKLPTELPAKKEKPKSKDSKLVQATLSNLFKKAEEKTAGTSKAKSSSKA

SEQ ID NO: 242 - protein, 355 aa, Arabidopsis thaliana
  peptide (1)..(355): Ceres Seq. ID no. 14307633
  misc_feature (1)..(355): NCBI GI NO: 18402164 NR Description: root hairless 1 (RHL1) [Arabidopsis thaliana]
  misc_feature (1)..(355): NCBI GI NO: 3811320 NR Description: ROOT HAIRLESS 1 [Arabidopsis thaliana]
  misc_feature (13)..(318): NCBI GI NO: 34394443 NR Description: putative root hairless 1
MVRASSSKKGGSKGGDKDDAESKQRKRLKTLALDNQLLSDSPAKSHSSLKPSKQVLKHHGTDIIRKSQRKNRFLFSFPGLLAPISAATIGDLDRLSTKNPVLYLNFPQGRMKLFGTILYPKNRYLTLQFSRGGKNVLCDDYFDNMIVFSESWWIGTKEENPEEARLDFPKELAQAENTEFDFQGGAGGAASVKTMATPETGSQPTETDSPEVDMEDVLSEDGEFLDDKIQVTPPVQLTPPIQVTPVRQSQRNSGKKFNFAETSPEASSGESEGNTSDEDEKPLLEPESSTRGREESQDGNGVTASASKLPTELPAKKEKPKSKDSKLVQATLSNLFKKAEEKTAGTSKAKSSSKA

SEQ ID NO: 243 - protein, 245 aa, Arabidopsis thaliana
  peptide (1)..(245): Ceres Seq. ID no. 14307634
  misc_feature (1)..(245): NCBI GI NO: 18402164 NR Description: root hairless 1 (RHL1) [Arabidopsis thaliana]
  misc_feature (1)..(245): NCBI GI NO: 3811320 NR Description: ROOT HAIRLESS 1 [Arabidopsis thaliana]
  misc_feature (1)..(208): NCBI GI NO: 34394443 NR Description: putative root hairless 1
MKLFGTILYPKNRYLTLQFSRGGKNVLCDDYFDNMIVFSESWWIGTKEENPEEARLDFPKELAQAENTEFDFQGGAGGAASVKTMATPETGSQPTETDSPEVDMEDVLSEDGEFLDDKIQVTPPVQLTPPIQVTPVRQSQRNSGKKFNFAETSPEASSGESEGNTSDEDEKPLLEPESSTRGREESQDGNGVTASASKLPTELPAKKEKPKSKDSKLVQATLSNLFKKAEEKTAGTSKAKSSSKA

SEQ ID NO: 244 - DNA, 1114 bp, Arabidopsis thaliana
  misc_feature (1)..(1114): Ceres Seq. ID no. 13647714
aaaacaaacgcaggaggcctggaaaaaagaaagataacgggactcgagagattgagattacggagccacccactttcatggagtctacactctcagctttctcaaccgtcaaggcaacagcgatggctcgaagtagtggtggtccttcattacctctcctcactatttctaaagcacttaaccgccactttaccggcgccagacacctccatcctttattgctcgctcgctgttctccctccgtgcgacgtcttggtgggtttcatggcagtcgatttacttcgtcgaattcagctttgagaagcttgggagctgctgttttgccggtaatccgacaccgtttagagtgtttgtcgagctcatcgccgtctttcaggagtatctcaagtggcggcggttctggatttggggggtataatggtggaagcggcggtggtggtggcggaggatcggagagtggtgattccaagtcaaaactgggtgctaatgcaagtgatggtgtctctgttccgtcgtcagatatcattattctcgatgttggagggatgacatgtggagggtgttcagcaagtgtgaagaagatactggaaagccaacctcaagttgcttcagctagtgttaatctcaccaccgagacggcaattgtgtggcctgtaccggaagctaaaagtgtacctgattggcaaaagagtttaggcgagacgcttgcaaaccatctgaccaattgcgggtttcagtctactcctcgaggggaagttcctgaagatattgcaggagagtttgcaccttgatagtacaaaagatttttccagcagcaatcattattgatatgatgattaagagcagctgctcatggcgaatggattgtaaacctaaatttctggtgctagtagttccatttatgttgattttgttgtcagtccttgtgatctaagggcgtgtatttatcttctgttgtcgattgctgacataccttctccgaaccagacagcataactctgtagtgatgatcttgttctattatggtcgattttccaaaagaatacattgaaagctataaaattccatattaaagaaaaaaaaaaaaaaaaaaactcgagggggggcccggtac

SEQ ID NO: 245 - protein, 262 aa, Arabidopsis thaliana
  peptide (1)..(262): Ceres Seq. ID no. 13647715
  misc_feature (26)..(262): NCBI GI NO: 18418230 NR Description: metal-transporting P-type ATPase (PAA1), putative
  misc_feature (26)..(255): NCBI GI NO: 12643855 NR Description: Potential copper-transporting ATPase PAA1
  misc_feature (26)..(255): NCBI GI NO: 2668492 NR Description: metal-transporting P-type ATPase
  misc_feature (105)..(255): NCBI GI NO: 3549654 NR Description: metal-transporting P-type ATPase (fragment)
  misc_feature (125)..(246): NCBI GI NO: 33146620 NR Description: metal-transporting P-type ATPase-like protein
  misc_feature (154)..(262): NCBI GI NO: 33113965 NR Description: putative metal-transporting ATPase [Zea mays]
  misc_feature (168)..(249): NCBI GI NO: 26453112 NR Description: putative metal-transporting ATPase
  misc_feature (168)..(249): NCBI GI NO: 22326934 NR Description: ATPase, E1-E2 type family [Arabidopsis thaliana]
  misc_feature (168)..(249): NCBI GI NO: 31616607 NR Description: Paa2 P-type ATPase [Arabidopsis thaliana]
NKRRRPGKKKDNGTREIEITEPPTFMESTLSAFSTVKATAMARSSGGPSLPLLTISKALNRHFTGARHLHPLLLARCSPSVRRLGGFHGSRFTSSNSALRSLGAAVLPVIRHRLECLSSSSPSFRSISSGGGSGFGGYNGGSGGGGGGGSESGDSKSKLGANASDGVSVPSSDIIILDVGGMTCGGCSASVKKILESQPQVASASVNLTTETAIVWPVPEAKSVPDWQKSLGETLANHLTNCGFQSTPRGEVPEDIAGEFAP

SEQ ID NO: 246 - protein, 237 aa, Arabidopsis thaliana
  peptide (1)..(237): Ceres Seq. ID no. 13647716
  misc_feature (1)..(237): NCBI GI NO: 18418230 NR Description: metal-transporting P-type ATPase (PAA1), putative
  misc_feature (1)..(230): NCBI GI NO: 12643855 NR Description: Potential copper-transporting ATPase PAA1
  misc_feature (1)..(230): NCBI GI NO: 2668492 NR Description: metal-transporting P-type ATPase
  misc_feature (80)..(230): NCBI GI NO: 3549654 NR Description: metal-transporting P-type ATPase (fragment)
  misc_feature (100)..(221): NCBI GI NO: 33146620 NR Description: metal-transporting P-type ATPase-like protein
  misc_feature (129)..(237): NCBI GI NO: 33113965 NR Description: putative metal-transporting ATPase [Zea mays]
  misc_feature (143)..(224): NCBI GI NO: 26453112 NR Description: putative metal-transporting ATPase
  misc_feature (143)..(224): NCBI GI NO: 22326934 NR Description: ATPase, E1-E2 type family [Arabidopsis thaliana]
  misc_feature (143)..(224): NCBI GI NO: 31616607 NR Description: Paa2 P-type ATPase [Arabidopsis thaliana]
MESTLSAFSTVKATAMARSSGGPSLPLLTISKALNRHFTGARHLHPLLLARCSPSVRRLGGFHGSRFTSSNSALRSLGAAVLPVIRHRLECLSSSSPSFRSISSGGGSGFGGYNGGSGGGGGGGSESGDSKSKLGANASDGVSVPSSDIIILDVGGMTCGGCSASVKKILESQPQVASASVNLTTETAIVWPVPEAKSVPDWQKSLGETLANHLTNCGFQSTPRGEVPEDIAGEFAP

SEQ ID NO: 247 - protein, 222 aa, Arabidopsis thaliana
  peptide (1)..(222): Ceres Seq. ID no. 13647717
  misc_feature (1)..(222): NCBI GI NO: 18418230 NR Description: metal-transporting P-type ATPase (PAA1), putative
  misc_feature (1)..(215): NCBI GI NO: 12643855 NR Description: Potential copper-transporting ATPase PAA1
  misc_feature (1)..(215): NCBI GI NO: 2668492 NR Description: metal-transporting P-type ATPase
  misc_feature (65)..(215): NCBI GI NO: 3549654 NR Description: metal-transporting P-type ATPase (fragment)
  misc_feature (85)..(206): NCBI GI NO: 33146620 NR Description: metal-transporting P-type ATPase-like protein
  misc_feature (114)..(222): NCBI GI NO: 33113965 NR Description: putative metal-transporting ATPase [Zea mays]
  misc_feature (128)..(209): NCBI GI NO: 26453112 NR Description: putative metal-transporting ATPase
  misc_feature (128)..(209): NCBI GI NO: 22326934 NR Description: ATPase, E1-E2 type family [Arabidopsis thaliana]
  misc_feature (128)..(209): NCBI GI NO: 31616607 NR Description: Paa2 P-type ATPase [Arabidopsis thaliana]
MARSSGGPSLPLLTISKALNRHFTGARHLHPLLLARCSPSVRRLGGFHGSRFTSSNSALRSLGAAVLPVIRHRLECLSSSSPSFRSISSGGGSGFGGYNGGSGGGGGGGSESGDSKSKLGANASDGVSVPSSDIIILDVGGMTCGGCSASVKKILESQPQVASASVNLTTETAIVWPVPEAKSVPDWQKSLGETLANHLTNCGFQSTPRGEVPEDIAGEFAP

SEQ ID NO: 248 - DNA, 1631 bp, Arabidopsis thaliana
  misc_feature (1)..(1631): Ceres Seq. ID no. 13648575
gagagatctttcatcttctaaatcgaagatggttcctaagatcgcatcaatggcgtctactagacctctcagttcacttccttacttgttcctctccttgtctctcctcttcgtcgtctcgcttctcttcttcttctccaattccttaatctccaatccaaatccgagcatttcacacaatactctccaaaacggtatcaatgtctatgtagctgagcttccaagatccctaaactatggtcttctcgacaaatactggtcctcttctactccagattcacgtatacccaccgacccagatcacccgacccgtaaaacccatttacccaaacccgatacacacccaccgtacccagagaatccgttgatcaagcaatacagtgctgagtactggatcatgggagacctagaaacctcaccagagaaacgaattggatcttttgctaaaagggttttcagtgaatctgacgctgatgtagtcttcgtgcccttctttgccacgttaagtgcagagatggagcttggaaatggtaaaggttcgtttagaaagaagtccggtaacgaagattatcaaagacagagacaagtgcttgattttctcaagaacactaaagcttggaaacgatctaatggtcgtgatcacgtttttgttctaactgaccctgttgcaatgtggcatgttcgtgaggagattgctttatctattcttcttgtggtggattttggaggatggtttaggcaagattctaagtcgtctaatgggactagcttgccggagaggattgagcatactcaagtctctgtcattaaggatgtgattgttccatatacgcatctgcttcctagattggatttgtctcagaaccagagacgtcatagccttctttatttcaaaggagctaagcacagacatcggggagggttaatcagagaaaaactatgggacttgttggtcaatgagcctggcgttgtcatggaagaaggttttcctaatgcaacaggaaaggaacagtcaataagaggaatgagaaactcagagttctgcttacatccagctggtgacactcccacttcatgccgtctctttgatgccattcaaagtctatgtatccctgtgattgtcagtgacaccatagagctcccgtttgagggaataatcgattactcagaattctcggtttttgcctctgtaagtgatgcattaacacctaagtggttggctaatcatctcagaaggttctctgaaagagagaaggaaacattgagaagtagaatagcaaaggttcagtcagtttttgtgtatgataatgggcatgccgatgggattggacctattgaaccagatggtgcggtgaatcacatatggaagaaggttcagcagaaggtgccaatggtgaaggaagcagtgattagggagaggagaaaaccagcaggggcttccgttccacttcgatgtcaatgtatctaaataatgcaaccaatccaaaagatagaaagtgttcctttgattttgttggtcttttcttttgtacttgtttcgtttacgaacattgttatggccactttaaaatccatgttccttagggttcaaagaaaaaaaaaaaaaaaaaaaactcgagggggggcccggt

SEQ ID NO: 249 - protein, 488 aa, Arabidopsis thaliana
  peptide (1)..(488): Ceres Seq. ID no. 13648576
  misc_feature (68)..(425): Pfam Name: Pfam Description:  Exostosin family
  misc_feature (10)..(488): NCBI GI NO: 18399194 NR Description: Exostosin family [Arabidopsis thaliana]
  misc_feature (33)..(487): NCBI GI NO: 32488405 NR Description: OSJNBa0043A12.35
  misc_feature (125)..(488): NCBI GI NO: 34899802 NR Description: OJ1092_A07.9
  misc_feature (115)..(474): NCBI GI NO: 22330483 NR Description: Exostosin family [Arabidopsis thaliana]
  misc_feature (115)..(474): NCBI GI NO: 19386797 NR Description: OJ1485_B09.5
  misc_feature (185)..(488): NCBI GI NO: 30686300 NR Description: Exostosin family [Arabidopsis thaliana]
  misc_feature (115)..(362): NCBI GI NO: 7487224 NR Description: hypothetical protein T1F15
  misc_feature (337)..(462): NCBI GI NO: 7487224 NR Description: hypothetical protein T1F15
  misc_feature (160)..(487): NCBI GI NO: 15241619 NR Description: Exostosin family [Arabidopsis thaliana]
  misc_feature (113)..(474): NCBI GI NO: 18410670 NR Description: Exostosin family [Arabidopsis thaliana]
RDLSSSKSKMVPKIASMASTRPLSSLPYLFLSLSLLFVVSLLFFFSNSLISNPNPSISHNTLQNGINVYVAELPRSLNYGLLDKYWSSSTPDSRIPTDPDHPTRKTHLPKPDTHPPYPENPLIKQYSAEYWIMGDLETSPEKRIGSFAKRVFSESDADVVFVPFFATLSAEMELGNGKGSFRKKSGNEDYQRQRQVLDFLKNTKAWKRSNGRDHVFVLTDPVAMWHVREEIALSILLVVDFGGWFRQDSKSSNGTSLPERIEHTQVSVIKDVIVPYTHLLPRLDLSQNQRRHSLLYFKGAKHRHRGGLIREKLWDLLVNEPGVVMEEGFPNATGKEQSIRGMRNSEFCLHPAGDTPTSCRLFDAIQSLCIPVIVSDTIELPFEGIIDYSEFSVFASVSDALTPKWLANHLRRFSEREKETLRSRIAKVQSVFVYDNGHADGIGPIEPDGAVNHIWKKVQQKVPMVKEAVIRERRKPAGASVPLRCQCI

SEQ ID NO: 250 - protein, 479 aa, Arabidopsis thaliana
  peptide (1)..(479): Ceres Seq. ID no. 13648577
  misc_feature (59)..(416): Pfam Name: Pfam Description:  Exostosin family
  misc_feature (1)..(479): NCBI GI NO: 18399194 NR Description: Exostosin family [Arabidopsis thaliana]
  misc_feature (24)..(478): NCBI GI NO: 32488405 NR Description: OSJNBa0043A12.35
  misc_feature (116)..(479): NCBI GI NO: 34899802 NR Description: OJ1092_A07.9
  misc_feature (106)..(465): NCBI GI NO: 22330483 NR Description: Exostosin family [Arabidopsis thaliana]
  misc_feature (106)..(465): NCBI GI NO: 19386797 NR Description: OJ1485_B09.5
  misc_feature (176)..(479): NCBI GI NO: 30686300 NR Description: Exostosin family [Arabidopsis thaliana]
  misc_feature (106)..(353): NCBI GI NO: 7487224 NR Description: hypothetical protein T1F15
  misc_feature (328)..(453): NCBI GI NO: 7487224 NR Description: hypothetical protein T1F15
  misc_feature (151)..(478): NCBI GI NO: 15241619 NR Description: Exostosin family [Arabidopsis thaliana]
  misc_feature (104)..(465): NCBI GI NO: 18410670 NR Description: Exostosin family [Arabidopsis thaliana]
MVPKIASMASTRPLSSLPYLFLSLSLLFVVSLLFFFSNSLISNPNPSISHNTLQNGINVYVAELPRSLNYGLLDKYWSSSTPDSRIPTDPDHPTRKTHLPKPDTHPPYPENPLIKQYSAEYWIMGDLETSPEKRIGSFAKRVFSESDADVVFVPFFATLSAEMELGNGKGSFRKKSGNEDYQRQRQVLDFLKNTKAWKRSNGRDHVFVLTDPVAMWHVREEIALSILLVVDFGGWFRQDSKSSNGTSLPERIEHTQVSVIKDVIVPYTHLLPRLDLSQNQRRHSLLYFKGAKHRHRGGLIREKLWDLLVNEPGVVMEEGFPNATGKEQSIRGMRNSEFCLHPAGDTPTSCRLFDAIQSLCIPVIVSDTIELPFEGIIDYSEFSVFASVSDALTPKWLANHLRRFSEREKETLRSRIAKVQSVFVYDNGHADGIGPIEPDGAVNHIWKKVQQKVPMVKEAVIRERRKPAGASVPLRCQCI

SEQ ID NO: 251 - protein, 472 aa, Arabidopsis thaliana
  peptide (1)..(472): Ceres Seq. ID no. 13648578
  misc_feature (52)..(409): Pfam Name: Pfam Description:  Exostosin family
  misc_feature (1)..(472): NCBI GI NO: 18399194 NR Description: Exostosin family [Arabidopsis thaliana]
  misc_feature (17)..(471): NCBI GI NO: 32488405 NR Description: OSJNBa0043A12.35
  misc_feature (109)..(472): NCBI GI NO: 34899802 NR Description: OJ1092_A07.9
  misc_feature (99)..(458): NCBI GI NO: 22330483 NR Description: Exostosin family [Arabidopsis thaliana]
  misc_feature (99)..(458): NCBI GI NO: 19386797 NR Description: OJ1485_B09.5
  misc_feature (169)..(472): NCBI GI NO: 30686300 NR Description: Exostosin family [Arabidopsis thaliana]
  misc_feature (99)..(346): NCBI GI NO: 7487224 NR Description: hypothetical protein T1F15
  misc_feature (321)..(446): NCBI GI NO: 7487224 NR Description: hypothetical protein T1F15
  misc_feature (144)..(471): NCBI GI NO: 15241619 NR Description: Exostosin family [Arabidopsis thaliana]
  misc_feature (97)..(458): NCBI GI NO: 18410670 NR Description: Exostosin family [Arabidopsis thaliana]
MASTRPLSSLPYLFLSLSLLFVVSLLFFFSNSLISNPNPSISHNTLQNGINVYVAELPRSLNYGLLDKYWSSSTPDSRIPTDPDHPTRKTHLPKPDTHPPYPENPLIKQYSAEYWIMGDLETSPEKRIGSFAKRVFSESDADVVFVPFFATLSAEMELGNGKGSFRKKSGNEDYQRQRQVLDFLKNTKAWKRSNGRDHVFVLTDPVAMWHVREEIALSILLVVDFGGWFRQDSKSSNGTSLPERIEHTQVSVIKDVIVPYTHLLPRLDLSQNQRRHSLLYFKGAKHRHRGGLIREKLWDLLVNEPGVVMEEGFPNATGKEQSIRGMRNSEFCLHPAGDTPTSCRLFDAIQSLCIPVIVSDTIELPFEGIIDYSEFSVFASVSDALTPKWLANHLRRFSEREKETLRSRIAKVQSVFVYDNGHADGIGPIEPDGAVNHIWKKVQQKVPMVKEAVIRERRKPAGASVPLRCQCI

SEQ ID NO: 252 - DNA, 1196 bp, Arabidopsis thaliana
  misc_feature (1)..(1196): Ceres Seq. ID no. 14307619
ggtggataagcttctcactttcagttcaattggatagccggaaaggctctcctccaagtggcgtttatatggaggtgacaaatacgagcagcatcatgtggttcttcagggacaaaggtttcgatgatccgagtatcgacaagatgttgagaaaatgcaaacagttggaaaaggctcaaagcgatgtggcatcagaaaactgggactacctgagtaacattgttggtatccaagagagaaaactcccttacatcgtctcccgatgccccaaaatcctgactttacgcctcgatgagagactcatccccatggtcgagtgcctctccagtcttggaaggaatcctcgtgaagttgcttccgccattaccaaatttcctccaatactctctcatagcgtggaggagaaactctgtccccttcttgctttctttcaagcgttgggtgtgcctgagactcaacttggcaaaatgatactttttaacccaaggcttatcagctacagcatcgacaccaagctgacagtgatcgtcagctttcttgctagcttggccttgatcaagatgggatgattggcaaagttctggtgaagaacccatttcttatggggtacagtgttgataaaaggttacggcctaccactgaattcttgaaatcatccgttggcctgagtgaggatggcattaagtcggtggtcatgaatttcccacaacttttgtgcagagacgttaacaagattctcaaaccaaattatgattatttgaaggagtgtgggtttggagattcccagatagcaaccatggtcactggttatccccaaatcttgattaagagtgttaagaattcactacagcctaggatcagattcctcgtccaggtgatgggaagaggcatggatgaagtggcttcttatcctgaattctttcaccatggattgaagaagaaggtcgaatcgaggtttaaacttgtcaaaaagaacaacattgactgcagccttagagaaatgctggactgtaacacaaagaaattccatgagaagtttggcttttcggaggtaactgcaagctcctagcttttatatctctctctagttttttccttcatcaggctctctctgtaagctgttttcagcttgtgcaccaatttctagcacgagctttaccttgagtgattgtgatatcaatagagtgttttcttcc

SEQ ID NO: 253 - protein, 188 aa, Arabidopsis thaliana
  peptide (1)..(188): Ceres Seq. ID no. 14307620
  misc_feature (32)..(188): Pfam Name: Pfam Description:  mTERF
  misc_feature (23)..(188): NCBI GI NO: 15233700 NR Description: expressed protein [Arabidopsis thaliana]
  misc_feature (26)..(188): NCBI GI NO: 34905080 NR Description: P0686C03.23
  misc_feature (72)..(187): NCBI GI NO: 33589698 NR Description: At1g78930 [Arabidopsis thaliana]
  misc_feature (72)..(187): NCBI GI NO: 30699372 NR Description: expressed protein [Arabidopsis thaliana]
  misc_feature (72)..(187): NCBI GI NO: 7487916 NR Description: hypothetical protein YUP8H12R
  misc_feature (93)..(164): NCBI GI NO: 33589698 NR Description: At1g78930 [Arabidopsis thaliana]
  misc_feature (93)..(164): NCBI GI NO: 30699372 NR Description: expressed protein [Arabidopsis thaliana]
  misc_feature (69)..(179): NCBI GI NO: 15236230 NR Description: expressed protein [Arabidopsis thaliana]
  misc_feature (93)..(164): NCBI GI NO: 7487916 NR Description: hypothetical protein YUP8H12R
  misc_feature (68)..(188): NCBI GI NO: 15236230 NR Description: expressed protein [Arabidopsis thaliana]
WISFSLSVQLDSRKGSPPSGVYMEVTNTSSIMWFFRDKGFDDPSIDKMLRKCKQLEKAQSDVASENWDYLSNIVGIQERKLPYIVSRCPKILTLRLDERLIPMVECLSSLGRNPREVASAITKFPPILSHSVEEKLCPLLAFFQALGVPETQLGKMILFNPRLISYSIDTKLTVIVSFLASLALIKMG

SEQ ID NO: 254 - protein, 167 aa, Arabidopsis thaliana
  peptide (1)..(167): Ceres Seq. ID no. 14307621
  misc_feature (1)..(156): Pfam Name: Pfam Description:  mTERF
  misc_feature (1)..(166): NCBI GI NO: 15233700 NR Description: expressed protein [Arabidopsis thaliana]
  misc_feature (1)..(159): NCBI GI NO: 34905080 NR Description: P0686C03.23
  misc_feature (1)..(167): NCBI GI NO: 33589698 NR Description: At1g78930 [Arabidopsis thaliana]
  misc_feature (1)..(167): NCBI GI NO: 30699372 NR Description: expressed protein [Arabidopsis thaliana]
  misc_feature (1)..(167): NCBI GI NO: 7487916 NR Description: hypothetical protein YUP8H12R
  misc_feature (5)..(163): NCBI GI NO: 15236230 NR Description: expressed protein [Arabidopsis thaliana]
  misc_feature (1)..(157): NCBI GI NO: 15227089 NR Description: hypothetical protein [Arabidopsis thaliana]
  misc_feature (1)..(157): NCBI GI NO: 18406426 NR Description: expressed protein [Arabidopsis thaliana]
  misc_feature (1)..(155): NCBI GI NO: 15227524 NR Description: hypothetical protein [Arabidopsis thaliana]
  misc_feature (1)..(155): NCBI GI NO: 28204784 NR Description: hypothetical protein [Arabidopsis thaliana]
MIGKVLVKNPFLMGYSVDKRLRPTTEFLKSSVGLSEDGIKSVVMNFPQLLCRDVNKILKPNYDYLKECGFGDSQIATMVTGYPQILIKSVKNSLQPRIRFLVQVMGRGMDEVASYPEFFHHGLKKKVESRFKLVKKNNIDCSLREMLDCNTKKFHEKFGFSEVTASS

SEQ ID NO: 255 - protein, 166 aa, Arabidopsis thaliana
  peptide (1)..(166): Ceres Seq. ID no. 14307622
  misc_feature (10)..(166): Pfam Name: Pfam Description:  mTERF
  misc_feature (1)..(166): NCBI GI NO: 15233700 NR Description: expressed protein [Arabidopsis thaliana]
  misc_feature (4)..(166): NCBI GI NO: 34905080 NR Description: P0686C03.23
  misc_feature (50)..(165): NCBI GI NO: 33589698 NR Description: At1g78930 [Arabidopsis thaliana]
  misc_feature (50)..(165): NCBI GI NO: 30699372 NR Description: expressed protein [Arabidopsis thaliana]
  misc_feature (50)..(165): NCBI GI NO: 7487916 NR Description: hypothetical protein YUP8H12R
  misc_feature (71)..(142): NCBI GI NO: 33589698 NR Description: At1g78930 [Arabidopsis thaliana]
  misc_feature (71)..(142): NCBI GI NO: 30699372 NR Description: expressed protein [Arabidopsis thaliana]
  misc_feature (47)..(157): NCBI GI NO: 15236230 NR Description: expressed protein [Arabidopsis thaliana]
  misc_feature (71)..(142): NCBI GI NO: 7487916 NR Description: hypothetical protein YUP8H12R
  misc_feature (46)..(166): NCBI GI NO: 15236230 NR Description: expressed protein [Arabidopsis thaliana]
MEVTNTSSIMWFFRDKGFDDPSIDKMLRKCKQLEKAQSDVASENWDYLSNIVGIQERKLPYIVSRCPKILTLRLDERLIPMVECLSSLGRNPREVASAITKFPPILSHSVEEKLCPLLAFFQALGVPETQLGKMILFNPRLISYSIDTKLTVIVSFLASLALIKMG

SEQ ID NO: 256 - DNA, 558 bp, Arabidopsis thaliana
  misc_feature (1)..(558): Ceres Seq. ID no. 13647754
accagagagagagagagagagagagagctcactagtccccccccccccccccccgaattatcctaaattcagatcataaaaaagctaacttttaatttctttctttctgagaaattggttctcatcgttggaatcgaaaaatgggacgaatcggtttagtagtgactgatctggtattgtcgttcatgtggatatgggcaggagttctggtcaacattttagtccatggagttcttggatttagccggaccgatccttccggtgagatcgttcgttatctcttctctatcatctccatgttcatcttcgcctaccttcaacaagccaccaaaggcgggctttataatcctttgaccgctttggctgctggagtctccggtggcttcagcagtttcatcttctccgtcttcgttcgaatccccgtcgaggtttgtttcgttgactttttttggtttaattgaaattgactcttcgttagagagaggtctcagggtttgtgtaatgttgtaaaatgtcaaattagagaaaaaaaaagagaatttagctgatgggttcttc

SEQ ID NO: 257 - protein, 106 aa, Arabidopsis thaliana
  peptide (1)..(106): Ceres Seq. ID no. 13647755
  misc_feature (10)..(97): Pfam Name: Pfam Description:  Major intrinsic protein
  misc_feature (1)..(97): NCBI GI NO: 15230175 NR Description: expressed protein [Arabidopsis thaliana]
  misc_feature (6)..(97): NCBI GI NO: 13447817 NR Description: small basic membrane integral protein ZmSIP2-1
MGRIGLVVTDLVLSFMWIWAGVLVNILVHGVLGFSRTDPSGEIVRYLFSIISMFIFAYLQQATKGGLYNPLTALAAGVSGGFSSFIFSVFVRIPVEVCFVDFFWFN

SEQ ID NO: 258 - protein, 91 aa, Arabidopsis thaliana
  peptide (1)..(91): Ceres Seq. ID no. 13647756
  misc_feature (1)..(82): Pfam Name: Pfam Description:  Major intrinsic protein
  misc_feature (1)..(82): NCBI GI NO: 15230175 NR Description: expressed protein [Arabidopsis thaliana]
  misc_feature (1)..(82): NCBI GI NO: 13447817 NR Description: small basic membrane integral protein ZmSIP2-1
MWIWAGVLVNILVHGVLGFSRTDPSGEIVRYLFSIISMFIFAYLQQATKGGLYNPLTALAAGVSGGFSSFIFSVFVRIPVEVCFVDFFWFN

SEQ ID NO: 259 - protein, 54 aa, Arabidopsis thaliana
  peptide (1)..(54): Ceres Seq. ID no. 13647757
  misc_feature (1)..(45): NCBI GI NO: 15230175 NR Description: expressed protein [Arabidopsis thaliana]
  misc_feature (1)..(45): NCBI GI NO: 13447817 NR Description: small basic membrane integral protein ZmSIP2-1
MFIFAYLQQATKGGLYNPLTALAAGVSGGFSSFIFSVFVRIPVEVCFVDFFWFN

SEQ ID NO: 260 - DNA, 1169 bp, Arabidopsis thaliana
  misc_feature (1)..(1169): Ceres Seq. ID no. 13648488
acatctctcaccatcttcaccattgtcgaaacatatcgaaaacgctaaaaccgagagagaaaggaaaacatgaggaataaatcccaatcattcatcagctcaaagcttatattcatttgttgctcaatcttggtgttgttcattctcttcttgaaaagagcaagcttctcttccaattcaaccgcaaccattcgagacgaatatcaccagaaatcgaagtgcccatcaaccccacaacaatgcaccaaattgcccacttctctatccgacgcattggttcactatgtcacctcagagatcacaccacaacaaacgtttgatgaagtctcagtctcaaagagagtcttggacaagaagtctccttgtaacttcctcgtctttggcttaggacacgatagcttgatgtgggcatctctcaatcacggtggacgcactttgttcctcgaggaagatgaagcttggattgagacagtaactaagaaattcccaaacttggaatcctaccacgtcgtatacgacacaaaagtgaaagattccaacaagcttatggagctaaagagaacagaggattgcaaagccgtgtctgatcctagagattccaaatgtgctctgtctctcaagggttttccagctgacgtgtacgagacgcaatgggatgtgataatggtcgatgctcccactggttaccacgatgaagctccagggaggatgagcgctatttacactgcgggtttattggctcgtaaccgttatgacggtggggagactgatgttttcgttcacgatattaaccggccggtggaggacgagttctcggtggcgttcttgtgtggagggtacatgaaagagcagcaaggaagacttaggcatttcaacatccctagccaccgggctagcttcggtacaccgttttgtccggcggatatcagtcgccgcttttgatattgtacaatgagagaaaagtgcaaagaacaataacaagaaaacttggcaaaggactttgaagttgcggaaatgagaattcgatattgatctagtttattctatcaaattagtaaaacttcaaatatacttttgccattttatgtttcgtatgatacaattaatcaagaagaaaagagagatatattttaatacatacgttgtgtgtcaatcttatgcctttaagc

SEQ ID NO: 261 - protein, 290 aa, Arabidopsis thaliana
  peptide (1)..(290): Ceres Seq. ID no. 13648489
  misc_feature (43)..(282): Pfam Name: DUF579 Pfam Description: Protein of unknown function
  misc_feature (1)..(290): NCBI GI NO: 15234881 NR Description: expressed protein [Arabidopsis thaliana]
  misc_feature (1)..(289): NCBI GI NO: 18398986 NR Description: expressed protein [Arabidopsis thaliana]
  misc_feature (20)..(283): NCBI GI NO: 15217566 NR Description: hypothetical protein [Arabidopsis thaliana]
  misc_feature (127)..(290): NCBI GI NO: 27754730 NR Description: unknown protein [Arabidopsis thaliana]
  misc_feature (34)..(283): NCBI GI NO: 25402555 NR Description: hypothetical protein
  misc_feature (19)..(283): NCBI GI NO: 18409879 NR Description: expressed protein [Arabidopsis thaliana]
  misc_feature (19)..(283): NCBI GI NO: 25354648 NR Description: hypothetical protein F14O23.3
  misc_feature (59)..(272): NCBI GI NO: 15220402 NR Description: expressed protein [Arabidopsis thaliana]
  misc_feature (22)..(276): NCBI GI NO: 21537399 NR Description: unknown [Arabidopsis thaliana]
  misc_feature (22)..(276): NCBI GI NO: 18396558 NR Description: expressed protein [Arabidopsis thaliana]
MRNKSQSFISSKLIFICCSILVLFILFLKRASFSSNSTATIRDEYHQKSKCPSTPQQCTKLPTSLSDALVHYVTSEITPQQTFDEVSVSKRVLDKKSPCNFLVFGLGHDSLMWASLNHGGRTLFLEEDEAWIETVTKKFPNLESYHVVYDTKVKDSNKLMELKRTEDCKAVSDPRDSKCALSLKGFPADVYETQWDVIMVDAPTGYHDEAPGRMSAIYTAGLLARNRYDGGETDVFVHDINRPVEDEFSVAFLCGGYMKEQQGRLRHFNIPSHRASFGTPFCPADISRRF

SEQ ID NO: 262 - protein, 179 aa, Arabidopsis thaliana
  peptide (1)..(179): Ceres Seq. ID no. 13648490
  misc_feature (1)..(171): Pfam Name: DUF579 Pfam Description: Protein of unknown function
  misc_feature (1)..(179): NCBI GI NO: 15234881 NR Description: expressed protein [Arabidopsis thaliana]
  misc_feature (1)..(178): NCBI GI NO: 18398986 NR Description: expressed protein [Arabidopsis thaliana]
  misc_feature (1)..(172): NCBI GI NO: 15217566 NR Description: hypothetical protein [Arabidopsis thaliana]
  misc_feature (16)..(179): NCBI GI NO: 27754730 NR Description: unknown protein [Arabidopsis thaliana]
  misc_feature (1)..(172): NCBI GI NO: 25402555 NR Description: hypothetical protein
  misc_feature (1)..(172): NCBI GI NO: 18409879 NR Description: expressed protein [Arabidopsis thaliana]
  misc_feature (1)..(172): NCBI GI NO: 25354648 NR Description: hypothetical protein F14O23.3
  misc_feature (1)..(161): NCBI GI NO: 15220402 NR Description: expressed protein [Arabidopsis thaliana]
  misc_feature (1)..(165): NCBI GI NO: 21537399 NR Description: unknown [Arabidopsis thaliana]
  misc_feature (1)..(165): NCBI GI NO: 18396558 NR Description: expressed protein [Arabidopsis thaliana]
MWASLNHGGRTLFLEEDEAWIETVTKKFPNLESYHVVYDTKVKDSNKLMELKRTEDCKAVSDPRDSKCALSLKGFPADVYETQWDVIMVDAPTGYHDEAPGRMSAIYTAGLLARNRYDGGETDVFVHDINRPVEDEFSVAFLCGGYMKEQQGRLRHFNIPSHRASFGTPFCPADISRRF

SEQ ID NO: 263 - DNA, 1732 bp, Arabidopsis thaliana
  misc_feature (1)..(1732): Ceres Seq. ID no. 12605517
gaaaaaagaaaacaatttcactttttttggaatgtgtgtctctcttccatttccatatattatataaacaccaaatgagatctcatttttctaataaataagaagaaagaagagagaaacaatggcttatcgtcaaattttggccatagttttgtttctttgtgtgtttcaattcttggactgcactgttagctccgccgtagaagagaatgggactgtgtttgtgtacggaagagccgccgttggaacaatagatgaagacttcatttgcgccaccttagactggtggccaccggagaaatgtgactacggcagttgtagttgggaccatgcttcaattctcaatctggatttgaacaacgttattcttcaaaatgcaatcaaagcatttgctccgttgaaaataagaataggaggaacattacaagacatagtgatatatgagacaccagattcgaagcaaccatgtcttccttttaccaaaaactcttcaattctttttggttacacacaaggatgtctacctatgcgtcgatgggacgagctcaatgccttctttcgcaaaaccggaactaaagtcatcttcgggctgaatgcactttctggacgttccataaaatctaacggtgaagccataggagcctggaattacaccaatgctgaatcgttcatccggtttacagcagagaacaattacaccatcgacgggtgggagctcggcaatgagctgtgtggaagtggtgttggtgcacgagttggtgcaaatcaatatgctatagacaccataaatctgcgaaacattgtgaaccgggtttacaagaatgtgagtcccatgccgttggtgataggtccgggtggcttctttgaagttgattggttcacagaatacctgaacaaagcagaaaactctctcaatgctactactcgacatatctacgatctcggtccaggagtcgatgaacatctgatagaaaagattctaaacccttcatatctggaccaagaggcaaaaagttttcgcagtctcaagaacataatcaaaaactcctcaacaaaggctgtggcatgggttggtgagtccggtggtgcctacaacagtgggcggaatcttgtctctaatgctttcgtgtatagtttctggtacctggaccagcttggtatggcatcgctttatgatacaaaaacatactgtagacagtctctgatcggaggaaactatgggctgctaaatactactaacttcacaccaaatccagactattacagtgctctgatctggcgacaacttatgggaagaaaggcattgttcacaaccttttccggaaccaaaaagatacgttcgtacacccattgtgcaagacaatcgaaagggatcacagttttactgatgaaccttgacaatactacaacggttgtagcgaaagtagagttaaataacagtttcagtctgagacatacaaagcacatgaagtcttataaaagagcaagttcccaactttttgggggtcctaatggagtaatccaaagagaagagtaccatttgacagcaaaggatggaaacctacacagtcagactatgctactcaacggaaatgctcttcaggttaattcgatgggtgatttacctcctatagagccgatacatataaattcaacagagccaataacaatagctccatattccattgtgtttgtgcatatgcggaatgttgttgtacctgcatgtgcttaa

SEQ ID NO: 264 - protein, 536 aa, Arabidopsis thaliana
  peptide (1)..(536): Ceres Seq. ID no. 12605518
  misc_feature (28)..(346): Pfam Name: Pfam Description:  Glycosyl hydrolase family 79, N-terminal domain
  misc_feature (1)..(536): NCBI GI NO: 30692670 NR Description: expressed protein [Arabidopsis thaliana]
  misc_feature (1)..(536): NCBI GI NO: 10177640 NR Description: contains similarity to heparanase~gene_id:MGG23.2
  misc_feature (136)..(536): NCBI GI NO: 30692666 NR Description: expressed protein [Arabidopsis thaliana]
  misc_feature (1)..(381): NCBI GI NO: 30692673 NR Description: expressed protein [Arabidopsis thaliana]
  misc_feature (77)..(536): NCBI GI NO: 24413987 NR Description: contains ESTs AU097236
  misc_feature (1)..(92): NCBI GI NO: 24413987 NR Description: contains ESTs AU097236
  misc_feature (9)..(535): NCBI GI NO: 38174813 NR Description: putative heparanase
  misc_feature (9)..(536): NCBI GI NO: 22327999 NR Description: glycosyl hydrolase family 79
  misc_feature (1)..(536): NCBI GI NO: 10176717 NR Description: contains similarity to heparanase~gene_id:MXM12.7
  misc_feature (29)..(536): NCBI GI NO: 9757846 NR Description: contains similarity to heparanase~gene_id:MFB13.2
MAYRQILAIVLFLCVFQFLDCTVSSAVEENGTVFVYGRAAVGTIDEDFICATLDWWPPEKCDYGSCSWDHASILNLDLNNVILQNAIKAFAPLKIRIGGTLQDIVIYETPDSKQPCLPFTKNSSILFGYTQGCLPMRRWDELNAFFRKTGTKVIFGLNALSGRSIKSNGEAIGAWNYTNAESFIRFTAENNYTIDGWELGNELCGSGVGARVGANQYAIDTINLRNIVNRVYKNVSPMPLVIGPGGFFEVDWFTEYLNKAENSLNATTRHIYDLGPGVDEHLIEKILNPSYLDQEAKSFRSLKNIIKNSSTKAVAWVGESGGAYNSGRNLVSNAFVYSFWYLDQLGMASLYDTKTYCRQSLIGGNYGLLNTTNFTPNPDYYSALIWRQLMGRKALFTTFSGTKKIRSYTHCARQSKGITVLLMNLDNTTTVVAKVELNNSFSLRHTKHMKSYKRASSQLFGGPNGVIQREEYHLTAKDGNLHSQTMLLNGNALQVNSMGDLPPIEPIHINSTEPITIAPYSIVFVHMRNVVVPACA

SEQ ID NO: 265 - protein, 401 aa, Arabidopsis thaliana
  peptide (1)..(401): Ceres Seq. ID no. 12605519
  misc_feature (1)..(211): Pfam Name: Pfam Description:  Glycosyl hydrolase family 79, N-terminal domain
  misc_feature (1)..(401): NCBI GI NO: 30692670 NR Description: expressed protein [Arabidopsis thaliana]
  misc_feature (1)..(401): NCBI GI NO: 10177640 NR Description: contains similarity to heparanase~gene_id:MGG23.2
  misc_feature (1)..(401): NCBI GI NO: 30692666 NR Description: expressed protein [Arabidopsis thaliana]
  misc_feature (1)..(246): NCBI GI NO: 30692673 NR Description: expressed protein [Arabidopsis thaliana]
  misc_feature (1)..(401): NCBI GI NO: 24413987 NR Description: contains ESTs AU097236
  misc_feature (1)..(400): NCBI GI NO: 38174813 NR Description: putative heparanase
  misc_feature (1)..(401): NCBI GI NO: 22327999 NR Description: glycosyl hydrolase family 79
  misc_feature (1)..(401): NCBI GI NO: 10176717 NR Description: contains similarity to heparanase~gene_id:MXM12.7
  misc_feature (1)..(401): NCBI GI NO: 9757846 NR Description: contains similarity to heparanase~gene_id:MFB13.2
  misc_feature (1)..(401): NCBI GI NO: 15240869 NR Description: glycosyl hydrolase family 79
MRRWDELNAFFRKTGTKVIFGLNALSGRSIKSNGEAIGAWNYTNAESFIRFTAENNYTIDGWELGNELCGSGVGARVGANQYAIDTINLRNIVNRVYKNVSPMPLVIGPGGFFEVDWFTEYLNKAENSLNATTRHIYDLGPGVDEHLIEKILNPSYLDQEAKSFRSLKNIIKNSSTKAVAWVGESGGAYNSGRNLVSNAFVYSFWYLDQLGMASLYDTKTYCRQSLIGGNYGLLNTTNFTPNPDYYSALIWRQLMGRKALFTTFSGTKKIRSYTHCARQSKGITVLLMNLDNTTTVVAKVELNNSFSLRHTKHMKSYKRASSQLFGGPNGVIQREEYHLTAKDGNLHSQTMLLNGNALQVNSMGDLPPIEPIHINSTEPITIAPYSIVFVHMRNVVVPACA

SEQ ID NO: 266 - protein, 299 aa, Arabidopsis thaliana
  peptide (1)..(299): Ceres Seq. ID no. 12605520
  misc_feature (1)..(109): Pfam Name: Pfam Description:  Glycosyl hydrolase family 79, N-terminal domain
  misc_feature (1)..(299): NCBI GI NO: 30692670 NR Description: expressed protein [Arabidopsis thaliana]
  misc_feature (1)..(299): NCBI GI NO: 10177640 NR Description: contains similarity to heparanase~gene_id:MGG23.2
  misc_feature (1)..(299): NCBI GI NO: 30692666 NR Description: expressed protein [Arabidopsis thaliana]
  misc_feature (1)..(144): NCBI GI NO: 30692673 NR Description: expressed protein [Arabidopsis thaliana]
  misc_feature (1)..(299): NCBI GI NO: 24413987 NR Description: contains ESTs AU097236
  misc_feature (1)..(298): NCBI GI NO: 38174813 NR Description: putative heparanase
  misc_feature (1)..(299): NCBI GI NO: 22327999 NR Description: glycosyl hydrolase family 79
  misc_feature (1)..(299): NCBI GI NO: 10176717 NR Description: contains similarity to heparanase~gene_id:MXM12.7
  misc_feature (1)..(299): NCBI GI NO: 9757846 NR Description: contains similarity to heparanase~gene_id:MFB13.2
  misc_feature (1)..(299): NCBI GI NO: 15240869 NR Description: glycosyl hydrolase family 79
MPLVIGPGGFFEVDWFTEYLNKAENSLNATTRHIYDLGPGVDEHLIEKILNPSYLDQEAKSFRSLKNIIKNSSTKAVAWVGESGGAYNSGRNLVSNAFVYSFWYLDQLGMASLYDTKTYCRQSLIGGNYGLLNTTNFTPNPDYYSALIWRQLMGRKALFTTFSGTKKIRSYTHCARQSKGITVLLMNLDNTTTVVAKVELNNSFSLRHTKHMKSYKRASSQLFGGPNGVIQREEYHLTAKDGNLHSQTMLLNGNALQVNSMGDLPPIEPIHINSTEPITIAPYSIVFVHMRNVVVPACA

SEQ ID NO: 267 - DNA, 1092 bp, Arabidopsis thaliana
  misc_feature (1)..(1092): Ceres Seq. ID no. 13647762
cccccggtatatatgagacattagttatagaagagagactaacatgaagatggatttttcatgtttccaagaatacccttttgagtttcattgcagaggaacaacatttaatgggtttagagaaaacaatgcagtgtctgaaacagtagaagagttctgtaataaaagaaggatgcagaagaagagtgatgatttgaagactaagaagaagaagaaacagagtgtttctagggtttgtagtagaggacattggaggatctctgaagatactcagcttatggagcttgtttcggtttacggtcctcaaaactggaaccacattgcagagagtatgcaaggaagaacaggaaagagctgcagattgaggtggtttaaccagttagatccgaggattaacaagagagctttcagtgatgaagaagaagagagactacttgctgctcatagagcttttggtaacaaatgggctatgattgctaagcttttcaatggaagaacagataatgccttgaagaatcattggcatgttctcatggcaaggaagatgagacagcaatcaagttcttacgtccaaagattcaatggttctgctcatgaatctaacacagatcacaaaatcttcaatctttctcctggtaatgtagatgatgatgaagatgtgaatctgaaaaagtgcagctgggaaatgctaaaagagggaactactaacctgaaagctcagtatctccaagaagaatatagttcttcacgcatgccgatgcagggtccacatcatcactactcaaccttccctgcagattccttggcactgacactgcatgtctccatccaggaaccatcatcatcatcgtcattatcactgccatcatcatcaacaactggagaacatacaatggtgaccagatattttgagaccattaaacctccagcatttatagattttctaggagttggtcactaaagctctaacatttagattgggaactaatcaagaagttgcttactcctgtcattattatcaaagtctctgacttttcttttgttagccattaacatgacaagctaaagacatcaagtatcttttcttttctg

SEQ ID NO: 268 - protein, 305 aa, Arabidopsis thaliana
  peptide (1)..(305): Ceres Seq. ID no. 13647763
  misc_feature (67)..(113): Pfam Name: Pfam Description:  Myb-like DNA-binding domain
  misc_feature (19)..(305): NCBI GI NO: 7939552 NR Description: MYB transcription factor-like protein
  misc_feature (3)..(198): NCBI GI NO: 18406019 NR Description: myb family transcription factor(MYB110)
  misc_feature (44)..(178): NCBI GI NO: 15222362 NR Description: myb family transcription factor(MYB105)
  misc_feature (38)..(178): NCBI GI NO: 18396049 NR Description: myb family transcription factor
  misc_feature (38)..(178): NCBI GI NO: 25403271 NR Description: protein T24P13.16
  misc_feature (63)..(186): NCBI GI NO: 34903242 NR Description: unnamed protein product
  misc_feature (30)..(215): NCBI GI NO: 15238028 NR Description: myb family transcription factor (MYB56)
  misc_feature (62)..(215): NCBI GI NO: 9759057 NR Description: Myb-like transcription factor-like protein
  misc_feature (56)..(184): NCBI GI NO: 6979341 NR Description: myb-like protein [Oryza sativa]
  misc_feature (64)..(191): NCBI GI NO: 31980093 NR Description: MYB transcription factor R2R3 type
MKMDFSCFQEYPFEFHCRGTTFNGFRENNAVSETVEEFCNKRRMQKKSDDLKTKKKKKQSVSRVCSRGHWRISEDTQLMELVSVYGPQNWNHIAESMQGRTGKSCRLRWFNQLDPRINKRAFSDEEEERLLAAHRAFGNKWAMIAKLFNGRTDNALKNHWHVLMARKMRQQSSSYVQRFNGSAHESNTDHKIFNLSPGNVDDDEDVNLKKCSWEMLKEGTTNLKAQYLQEEYSSSRMPMQGPHHHYSTFPADSLALTLHVSIQEPSSSSSLSLPSSSTTGEHTMVTRYFETIKPPAFIDFLGVGH

SEQ ID NO: 269 - protein, 303 aa, Arabidopsis thaliana
  peptide (1)..(303): Ceres Seq. ID no. 13647764
  misc_feature (65)..(111): Pfam Name: Pfam Description:  Myb-like DNA-binding domain
  misc_feature (17)..(303): NCBI GI NO: 7939552 NR Description: MYB transcription factor-like protein
  misc_feature (1)..(196): NCBI GI NO: 18406019 NR Description: myb family transcription factor(MYB110)
  misc_feature (42)..(176): NCBI GI NO: 15222362 NR Description: myb family transcription factor(MYB105)
  misc_feature (36)..(176): NCBI GI NO: 18396049 NR Description: myb family transcription factor
  misc_feature (36)..(176): NCBI GI NO: 25403271 NR Description: protein T24P13.16
  misc_feature (61)..(184): NCBI GI NO: 34903242 NR Description: unnamed protein product
  misc_feature (28)..(213): NCBI GI NO: 15238028 NR Description: myb family transcription factor (MYB56)
  misc_feature (60)..(213): NCBI GI NO: 9759057 NR Description: Myb-like transcription factor-like protein
  misc_feature (54)..(182): NCBI GI NO: 6979341 NR Description: myb-like protein [Oryza sativa]
  misc_feature (62)..(189): NCBI GI NO: 31980093 NR Description: MYB transcription factor R2R3 type
MDFSCFQEYPFEFHCRGTTFNGFRENNAVSETVEEFCNKRRMQKKSDDLKTKKKKKQSVSRVCSRGHWRISEDTQLMELVSVYGPQNWNHIAESMQGRTGKSCRLRWFNQLDPRINKRAFSDEEEERLLAAHRAFGNKWAMIAKLFNGRTDNALKNHWHVLMARKMRQQSSSYVQRFNGSAHESNTDHKIFNLSPGNVDDDEDVNLKKCSWEMLKEGTTNLKAQYLQEEYSSSRMPMQGPHHHYSTFPADSLALTLHVSIQEPSSSSSLSLPSSSTTGEHTMVTRYFETIKPPAFIDFLGVGH

SEQ ID NO: 270 - protein, 262 aa, Arabidopsis thaliana
  peptide (1)..(262): Ceres Seq. ID no. 13647765
  misc_feature (24)..(70): Pfam Name: Pfam Description:  Myb-like DNA-binding domain
  misc_feature (1)..(262): NCBI GI NO: 7939552 NR Description: MYB transcription factor-like protein
  misc_feature (1)..(155): NCBI GI NO: 18406019 NR Description: myb family transcription factor(MYB110)
  misc_feature (1)..(135): NCBI GI NO: 15222362 NR Description: myb family transcription factor(MYB105)
  misc_feature (1)..(135): NCBI GI NO: 18396049 NR Description: myb family transcription factor
  misc_feature (1)..(135): NCBI GI NO: 25403271 NR Description: protein T24P13.16
  misc_feature (20)..(143): NCBI GI NO: 34903242 NR Description: unnamed protein product
  misc_feature (1)..(172): NCBI GI NO: 15238028 NR Description: myb family transcription factor (MYB56)
  misc_feature (19)..(172): NCBI GI NO: 9759057 NR Description: Myb-like transcription factor-like protein
  misc_feature (13)..(141): NCBI GI NO: 6979341 NR Description: myb-like protein [Oryza sativa]
  misc_feature (21)..(148): NCBI GI NO: 31980093 NR Description: MYB transcription factor R2R3 type
MQKKSDDLKTKKKKKQSVSRVCSRGHWRISEDTQLMELVSVYGPQNWNHIAESMQGRTGKSCRLRWFNQLDPRINKRAFSDEEEERLLAAHRAFGNKWAMIAKLFNGRTDNALKNHWHVLMARKMRQQSSSYVQRFNGSAHESNTDHKIFNLSPGNVDDDEDVNLKKCSWEMLKEGTTNLKAQYLQEEYSSSRMPMQGPHHHYSTFPADSLALTLHVSIQEPSSSSSLSLPSSSTTGEHTMVTRYFETIKPPAFIDFLGVGH

SEQ ID NO: 271 - DNA, 1552 bp, Arabidopsis thaliana
  misc_feature (1)..(1552): Ceres Seq. ID no. 13647847
acaaatcttttgatctgactttcgtctctccaaatctctctcgtctcgtttcttcagaggctatggggatctccttaagcaagcgtcgacgagacaacaacaaccaccaccaccatccacaccacaatccgccgtactattactccgatcctccaccacaacagccgccgcctcaaaacgagtatagctactctcacaattaccccgtttcaactccacagctctctcttcctccaccaccggctcagccaccgtctttttctcagcctcctccgtcgcagattagttacctaccgtacggtcaaaactaccatcaaaaccaatactacccgcaacaagctcctccgtatttcaccggttatcatcacaatgggtttaatccgatgatgaggccggtttatttcggtcctcctccggttgctgttatggaaccgcctgcaccttatgtggagcatcagaccgctaagaaggttaagaacgatgtcaatgtgaataaagctacggtgaggctcgtagctgacgatcttaaccctggtcattatcttgtttccttcgtcttcgatgccttattcgatggcagtttcactatcatattttttggagaagaggaatcaaagtgcataatcgtccctcatttaccagaagctttcccaccaatcaaagtccctttccaaaaaggtgccgggcagaagtttctacaagctccagggacaggaatcgacctaggcttcttttcactggatgatttatcgaaaccatcaccagaagaggtgtacccacttgtaatatcagccgagacagtaatatcaccaagctcggtttcagaggaaccattagttcataagcagatcactcaagcggttttggagaagacgaatgatggatctttcaaagtgaaagtcatgaaacagatcctatggattgaaggagaacgatatgaactacaagagttgtatggaatcgataattcaacaacacaaggtactgctgcatcggggttagaggatactgatggcaaagaatgtgtcatttgcttgactgaacctaaggacacagccgtcatgccttgtagacatttgtgtttgtgcagtgattgcgcagaagaactgaggtttcagacaaacaaatgtcccatttgtagacaacctatccatgagcttgtaaagattaaagtggaaagtagtgatgaacaacactgaaaaagaggtttcttcccttcacttaaacaccatgtttgattctttcttcttcttctttttgaaaaccgtcaaatcgaattctttttcccttttttcttatacaaatgtgttttctcatgtcatactcttgcacatatttgttggtcttagttttgggaaactcaaagaaaaaaaagtcagtaatgtatatatagctccaatggttcttgagaaactttctcttcgtatctttctacttgaaacactcattctgtaactgaatactttttggtttgggcattgctcaaatataacttgcaatcatatgttgtttatcgtaaaaaaaaaaaaaaaaactcgagggggggcccggt

SEQ ID NO: 272 - protein, 398 aa, Arabidopsis thaliana
  peptide (1)..(398): Ceres Seq. ID no. 13647848
  misc_feature (341)..(379): Pfam Name: RING finger Pfam Description: Zinc finger, C3HC4 type
  misc_feature (21)..(398): NCBI GI NO: 15239642 NR Description: expressed protein [Arabidopsis thaliana]
  misc_feature (21)..(398): NCBI GI NO: 21928149 NR Description: AT5g19080/T16G12_120 [Arabidopsis thaliana]
  misc_feature (15)..(398): NCBI GI NO: 6862918 NR Description: putative RING zinc finger protein
  misc_feature (21)..(398): NCBI GI NO: 18397483 NR Description: RING zinc finger protein -related
  misc_feature (27)..(397): NCBI GI NO: 37532246 NR Description: putative hydroxyproline-rich glycoprotein
  misc_feature (28)..(395): NCBI GI NO: 18398633 NR Description: putative RING zinc finger protein
  misc_feature (138)..(395): NCBI GI NO: 15231808 NR Description: expressed protein [Arabidopsis thaliana]
  misc_feature (66)..(389): NCBI GI NO: 21618140 NR Description: putative RING zinc finger protein
  misc_feature (66)..(389): NCBI GI NO: 15242675 NR Description: expressed protein [Arabidopsis thaliana]
  misc_feature (66)..(389): NCBI GI NO: 26449588 NR Description: unknown protein [Arabidopsis thaliana]
KSFDLTFVSPNLSRLVSSEAMGISLSKRRRDNNNHHHHPHHNPPYYYSDPPPQQPPPQNEYSYSHNYPVSTPQLSLPPPPAQPPSFSQPPPSQISYLPYGQNYHQNQYYPQQAPPYFTGYHHNGFNPMMRPVYFGPPPVAVMEPPAPYVEHQTAKKVKNDVNVNKATVRLVADDLNPGHYLVSFVFDALFDGSFTIIFFGEEESKCIIVPHLPEAFPPIKVPFQKGAGQKFLQAPGTGIDLGFFSLDDLSKPSPEEVYPLVISAETVISPSSVSEEPLVHKQITQAVLEKTNDGSFKVKVMKQILWIEGERYELQELYGIDNSTTQGTAASGLEDTDGKECVICLTEPKDTAVMPCRHLCLCSDCAEELRFQTNKCPICRQPIHELVKIKVESSDEQH

SEQ ID NO: 273 - protein, 378 aa, Arabidopsis thaliana
  peptide (1)..(378): Ceres Seq. ID no. 13647849
  misc_feature (321)..(359): Pfam Name: RING finger Pfam Description: Zinc finger, C3HC4 type
  misc_feature (1)..(378): NCBI GI NO: 15239642 NR Description: expressed protein [Arabidopsis thaliana]
  misc_feature (1)..(378): NCBI GI NO: 21928149 NR Description: AT5g19080/T16G12_120 [Arabidopsis thaliana]
  misc_feature (1)..(378): NCBI GI NO: 6862918 NR Description: putative RING zinc finger protein
  misc_feature (1)..(378): NCBI GI NO: 18397483 NR Description: RING zinc finger protein -related
  misc_feature (7)..(377): NCBI GI NO: 37532246 NR Description: putative hydroxyproline-rich glycoprotein
  misc_feature (8)..(375): NCBI GI NO: 18398633 NR Description: putative RING zinc finger protein
  misc_feature (118)..(375): NCBI GI NO: 15231808 NR Description: expressed protein [Arabidopsis thaliana]
  misc_feature (46)..(369): NCBI GI NO: 21618140 NR Description: putative RING zinc finger protein
  misc_feature (46)..(369): NCBI GI NO: 15242675 NR Description: expressed protein [Arabidopsis thaliana]
  misc_feature (46)..(369): NCBI GI NO: 26449588 NR Description: unknown protein [Arabidopsis thaliana]
MGISLSKRRRDNNNHHHHPHHNPPYYYSDPPPQQPPPQNEYSYSHNYPVSTPQLSLPPPPAQPPSFSQPPPSQISYLPYGQNYHQNQYYPQQAPPYFTGYHHNGFNPMMRPVYFGPPPVAVMEPPAPYVEHQTAKKVKNDVNVNKATVRLVADDLNPGHYLVSFVFDALFDGSFTIIFFGEEESKCIIVPHLPEAFPPIKVPFQKGAGQKFLQAPGTGIDLGFFSLDDLSKPSPEEVYPLVISAETVISPSSVSEEPLVHKQITQAVLEKTNDGSFKVKVMKQILWIEGERYELQELYGIDNSTTQGTAASGLEDTDGKECVICLTEPKDTAVMPCRHLCLCSDCAEELRFQTNKCPICRQPIHELVKIKVESSDEQH

SEQ ID NO: 274 - protein, 271 aa, Arabidopsis thaliana
  peptide (1)..(271): Ceres Seq. ID no. 13647850
  misc_feature (214)..(252): Pfam Name: RING finger Pfam Description: Zinc finger, C3HC4 type
  misc_feature (1)..(271): NCBI GI NO: 15239642 NR Description: expressed protein [Arabidopsis thaliana]
  misc_feature (1)..(271): NCBI GI NO: 21928149 NR Description: AT5g19080/T16G12_120 [Arabidopsis thaliana]
  misc_feature (1)..(271): NCBI GI NO: 6862918 NR Description: putative RING zinc finger protein
  misc_feature (1)..(271): NCBI GI NO: 18397483 NR Description: RING zinc finger protein -related
  misc_feature (1)..(270): NCBI GI NO: 37532246 NR Description: putative hydroxyproline-rich glycoprotein
  misc_feature (1)..(268): NCBI GI NO: 18398633 NR Description: putative RING zinc finger protein
  misc_feature (11)..(268): NCBI GI NO: 15231808 NR Description: expressed protein [Arabidopsis thaliana]
  misc_feature (1)..(262): NCBI GI NO: 21618140 NR Description: putative RING zinc finger protein
  misc_feature (1)..(262): NCBI GI NO: 15242675 NR Description: expressed protein [Arabidopsis thaliana]
  misc_feature (1)..(262): NCBI GI NO: 26449588 NR Description: unknown protein [Arabidopsis thaliana]
MMRPVYFGPPPVAVMEPPAPYVEHQTAKKVKNDVNVNKATVRLVADDLNPGHYLVSFVFDALFDGSFTIIFFGEEESKCIIVPHLPEAFPPIKVPFQKGAGQKFLQAPGTGIDLGFFSLDDLSKPSPEEVYPLVISAETVISPSSVSEEPLVHKQITQAVLEKTNDGSFKVKVMKQILWIEGERYELQELYGIDNSTTQGTAASGLEDTDGKECVICLTEPKDTAVMPCRHLCLCSDCAEELRFQTNKCPICRQPIHELVKIKVESSDEQH

SEQ ID NO: 275 - DNA, 1110 bp, Arabidopsis thaliana
  misc_feature (1)..(1110): Ceres Seq. ID no. 14311243
ggaaacctcctcccgcagtcacacaactgcgcagagccaaaaataaacgaaacctccggcgaaagctacggcgaagagactgcgtctaactccgtttacacgccgattgtcttggagagagagagagagcacgaggtaaatcacgcaagggttagatgggaaaccagaaactaaagttgacggcggaggaagaggaggcgttactcgccggaatcagaaagcacggtcctggaaagtggaagaatattctccgggatccagaattcgctgatcagctcatccatcgctccaacattgacctaaaggataagtggcgtaacttgagtgttccccctggtactcaaagtttaactaataaggcacggccagcaaaagtcaaagaggaaggcgacactccggctgcagatgcaaatgatgctgtcactattccacggcctattcctactattccacctcctcccggtcggcgtactttaccttctgagttgatccctgatgaaaatacaaagaatgctcctaggtatgactgggtgatatttgaagctctctctgctttagccgatggtaatggatctgatgtcagttccatttatcatttcattgagcccaggcatgaagtaccgccaaattttagaagaatccttagtacaagactgaggaggcttgcagctcagagcaaacttgaaaaggttagcaccttcaaatctatacagaacttctataagatacccgatccatcaggaacaaaaataggtgtcccaaaaccaaaggagacacatacgaagctgcgccaagcaaacaatcagacctctgctgattcacaacagatgatcgaggaagctgcaataaccgcagcctgtaaagtcgtagaggcggagaataaaatagacgttgccaaactagcagcagaagagtttgagaagatgacaaagattgcagaagaaaatagaaaactcctggtcatagctactgagatgcatgaactatgttcctgtggggagactatgctcttggcttgaattgaatctatgggacattccttgtagctctcttcagttatctccgtaatggtgttgataataatatataaaaagaaaactaaattaattt

SEQ ID NO: 276 - protein, 287 aa, Arabidopsis thaliana
  peptide (1)..(287): Ceres Seq. ID no. 14311244
  misc_feature (119)..(193): Pfam Name: Pfam Description:  linker histone H1 and H5 family
  misc_feature (1)..(278): NCBI GI NO: 15218592 NR Description: DNA-binding protein -related
  misc_feature (1)..(286): NCBI GI NO: 26452093 NR Description: putative myb-related DNA-binding protein
  misc_feature (1)..(286): NCBI GI NO: 30685367 NR Description: myb-related DNA-binding protein -related
  misc_feature (1)..(150): NCBI GI NO: 13937143 NR Description: At1g72740/F28P22_7 [Arabidopsis thaliana]
  misc_feature (1)..(228): NCBI GI NO: 8778473 NR Description: F1L3.23 [Arabidopsis thaliana]
  misc_feature (1)..(286): NCBI GI NO: 34910440 NR Description: histone H1-like protein
  misc_feature (1)..(286): NCBI GI NO: 27125811 NR Description: MYB28 protein
  misc_feature (1)..(286): NCBI GI NO: 34105721 NR Description: Single myb histone 4 [Zea mays subsp. mays]
  misc_feature (1)..(286): NCBI GI NO: 18463961 NR Description: histone H1-like protein [Zea mays]
  misc_feature (1)..(286): NCBI GI NO: 34105717 NR Description: Single myb histone 3 [Zea mays subsp. mays]
MGNQKLKLTAEEEEALLAGIRKHGPGKWKNILRDPEFADQLIHRSNIDLKDKWRNLSVPPGTQSLTNKARPAKVKEEGDTPAADANDAVTIPRPIPTIPPPPGRRTLPSELIPDENTKNAPRYDWVIFEALSALADGNGSDVSSIYHFIEPRHEVPPNFRRILSTRLRRLAAQSKLEKVSTFKSIQNFYKIPDPSGTKIGVPKPKETHTKLRQANNQTSADSQQMIEEAAITAACKVVEAENKIDVAKLAAEEFEKMTKIAEENRKLLVIATEMHELCSCGETMLLA

SEQ ID NO: 277 - DNA, 712 bp, Arabidopsis thaliana
  misc_feature (1)..(712): Ceres Seq. ID no. 13648568
gatagacccctcacctacgctttactctttcactcctctctctcctgctttgctccgccgtgagaggagaaacaaatggggaattgtcaagcggcggaggcggcaacgacggtgatacaacaaccagacggtaaatcggttagattttactgtacagtaaacgcgagcgaagtgattaagtcccatcccggtcaccacgtggctctcctcctctcttccgccgtacctcacggtggctctctccgcgtcactcgtataaagcttcttcgtccttctgataacctcttgctcggtcatgtttatagactcatctcctccgaagaggtgatgaaaggaataagagccaagaaatctggaaagatgaagaagattcatggagagttttctgttgcagaagaagagattaacccactaaccctaagatctgatgcttctgacaaagacactcagagaaggatatatgaaaagcagagaggaatgatgaacacaggrggrgytwccaagaaagttagagtttggcagccttytyttcaaagcatytcagaatytmcaagttaaaacccttcaatccatatttttctatctttttttcttactttggatttttttttattaccattggatttctctttatattgtggtttttcccaatcaaatttgtaaaggaagaagacccatttgtttgtggttgaagaagaagaaacttttgtcc

SEQ ID NO: 278 - protein, 160 aa, Arabidopsis thaliana
  peptide (1)..(160): Ceres Seq. ID no. 15219562
  misc_feature (1)..(160): NCBI GI NO: 15241996 NR Description: expressed protein [Arabidopsis thaliana]
  misc_feature (1)..(160): NCBI GI NO: 15240611 NR Description: expressed protein [Arabidopsis thaliana]
  misc_feature (1)..(160): NCBI GI NO: 18406580 NR Description: expressed protein [Arabidopsis thaliana]
  misc_feature (1)..(160): NCBI GI NO: 21553451 NR Description: unknown [Arabidopsis thaliana]
  misc_feature (53)..(160): NCBI GI NO: 34904920 NR Description: OSJNBa0077M12.2
  misc_feature (1)..(54): NCBI GI NO: 34904920 NR Description: OSJNBa0077M12.2
  misc_feature (1)..(160): NCBI GI NO: 15218556 NR Description: expressed protein [Arabidopsis thaliana]
  misc_feature (1)..(160): NCBI GI NO: 25402604 NR Description: protein T10O24.15
  misc_feature (1)..(99): NCBI GI NO: 15240787 NR Description: expressed protein [Arabidopsis thaliana]
  misc_feature (19)..(98): NCBI GI NO: 37533268 NR Description: hypothetical protein
  misc_feature (139)..(139): Xaa is any aa, unknown or other
  misc_feature (140)..(140): Xaa is any aa, unknown or other
  misc_feature (141)..(141): Xaa is any aa, unknown or other
  misc_feature (142)..(142): Xaa is any aa, unknown or other
  misc_feature (151)..(151): Xaa is any aa, unknown or other
  misc_feature (152)..(152): Xaa is any aa, unknown or other
  misc_feature (155)..(155): Xaa is any aa, unknown or other
  misc_feature (158)..(158): Xaa is any aa, unknown or other
  misc_feature (159)..(159): Xaa is any aa, unknown or other
MGNCQAAEAATTVIQQPDGKSVRFYCTVNASEVIKSHPGHHVALLLSSAVPHGGSLRVTRIKLLRPSDNLLLGHVYRLISSEEVMKGIRAKKSGKMKKIHGEFSVAEEEINPLTLRSDASDKDTQRRIYEKQRGMMNTXXXXKKVRVWQPXXQSXSEXXS

SEQ ID NO: 279 - DNA, 965 bp, Arabidopsis thaliana
  misc_feature (1)..(965): Ceres Seq. ID no. 12605742
ggggtgattttcttctctggaaggatctgtttttctcttcttcgtcttctctcacccgcctactgactttttttcaaatttcttcagcaacacatacatacagtcacaaggtttccaattttcgattcacgatggaaatggcggaaggggaaggaactacagaggagaactacgacgtagacatcgcgaccaccgcttcttcattaggcggctccggcgtcttccatatcatcaatgacatagtcggattcgtcctctatatgcaccagcagatcccttcggtattacaagacatgagccttgaatttgaaggattgcaaactgaatttatggatttggagacgaatcttgcagaacctcaagtgaaaccactggttagaagaaaactgatgagtagaaagagagaggtgaagaatgagattaagaaactggagaaactgatgaaaaccatctctagtctccgaagtgcgctgcagttaatgatccgtgaagctcctggcattcagaaagttgtgttgattcttggtggtagtccattacggcctcaaaatgcttatgagttgttattcacacaacgcagagaccatgttctaggctacgaaggtgactttgctaaatccaaagctgcagaagcactttcaaaaaagactatccgagcactgatctcgacgggtgctggatcaacttcctacccaggtccaatgaggctcttcatattggttcatgctccacctactttgaatcttccacaacatttccttcctaaacgtgacttcagatacaacagaaagtttgtgccttcaaagttgagattcaagtgcagaacgcaagacaatgcaacaaattctcctcccacaaatgatctaatatggtacttctcttattcacaattctccagttacacactaaacaagttcttgaccatgccttactgtgtcattgcaggtatcaatgtcgacatgtga

SEQ ID NO: 280 - protein, 320 aa, Arabidopsis thaliana
  peptide (1)..(320): Ceres Seq. ID no. 12605743
  misc_feature (46)..(320): NCBI GI NO: 15218734 NR Description: hypothetical protein; protein id: At1g03180.1
GDFLLWKDLFFSSSSSLTRLLTFFQISSATHTYSHKVSNFRFTMEMAEGEGTTEENYDVDIATTASSLGGSGVFHIINDIVGFVLYMHQQIPSVLQDMSLEFEGLQTEFMDLETNLAEPQVKPLVRRKLMSRKREVKNEIKKLEKLMKTISSLRSALQLMIREAPGIQKVVLILGGSPLRPQNAYELLFTQRRDHVLGYEGDFAKSKAAEALSKKTIRALISTGAGSTSYPGPMRLFILVHAPPTLNLPQHFLPKRDFRYNRKFVPSKLRFKCRTQDNATNSPPTNDLIWYFSYSQFSSYTLNKFLTMPYCVIAGINVDM

SEQ ID NO: 281 - protein, 277 aa, Arabidopsis thaliana
  peptide (1)..(277): Ceres Seq. ID no. 12605744
  misc_feature (3)..(277): NCBI GI NO: 15218734 NR Description: hypothetical protein; protein id: At1g03180.1
MEMAEGEGTTEENYDVDIATTASSLGGSGVFHIINDIVGFVLYMHQQIPSVLQDMSLEFEGLQTEFMDLETNLAEPQVKPLVRRKLMSRKREVKNEIKKLEKLMKTISSLRSALQLMIREAPGIQKVVLILGGSPLRPQNAYELLFTQRRDHVLGYEGDFAKSKAAEALSKKTIRALISTGAGSTSYPGPMRLFILVHAPPTLNLPQHFLPKRDFRYNRKFVPSKLRFKCRTQDNATNSPPTNDLIWYFSYSQFSSYTLNKFLTMPYCVIAGINVDM

SEQ ID NO: 282 - protein, 275 aa, Arabidopsis thaliana
  peptide (1)..(275): Ceres Seq. ID no. 12605745
  misc_feature (1)..(275): NCBI GI NO: 15218734 NR Description: hypothetical protein; protein id: At1g03180.1
MAEGEGTTEENYDVDIATTASSLGGSGVFHIINDIVGFVLYMHQQIPSVLQDMSLEFEGLQTEFMDLETNLAEPQVKPLVRRKLMSRKREVKNEIKKLEKLMKTISSLRSALQLMIREAPGIQKVVLILGGSPLRPQNAYELLFTQRRDHVLGYEGDFAKSKAAEALSKKTIRALISTGAGSTSYPGPMRLFILVHAPPTLNLPQHFLPKRDFRYNRKFVPSKLRFKCRTQDNATNSPPTNDLIWYFSYSQFSSYTLNKFLTMPYCVIAGINVDM

SEQ ID NO: 283 - DNA, 1811 bp, Arabidopsis thaliana
  misc_feature (1)..(1811): Ceres Seq. ID no. 14302935
agttccttttccacttttaaccatcaccctataagtggttataactagtaacttgaaatagaaacactctatctctaaaagaggcaaccaaacaaacaaggtctagctttttataaccaaactctgcttctgaacagagttagtcaaagagagagaagccatggaagctatgaaggagactgtggaggagagcttgagagagatgagagagacgtttgcgagtgggaggacgaagagtctgaagtggaggaaggcacagatcggagctatatacgagatggttaaagacaacgaagacaagatctgcaatgctctgtttcaagatttgggcaaacacagtactgaagcttttagagatgagcttggtgttgtcttgcgaacagctactggtgcaatcaactgtcttgataaatgggccgtccccaaacatagcaaacttcctctgttgttctacccagcaaaagggaaagtcatatcggaaccctatgggacggttcttgttctgtctagctggaattttcctatatctttgtctctggatccattgattggggcaatagcagcaggaaataccgtgcttctcaagtcatctgaactaagccctaacgcatctgccttccttgccaagacaattccagcttatctcgatactaaagccatcaaagttatcgaaggaggacctgatgtcgctactatcctcttgcagcatcaatgggacaagatcttcttcaccgggagtcccaagattggaaggatcataatggctgcagcagcacagcatctgactcctgtgacattggagcttggtggaaaatgtcccaccattgttgatcatcacaccatttcaaagaacatcaagtcggttgtcaagaggattgctggaggaaaatggggatcttgcaatggacaagcttgtatctctgtagattacgttcttatcgaaaagagtttcgcgcctactctgattgatatgttgaagcctacgataaagtctttctttggcgaaaatcctaaagaatctggatgtctctcaaggattgcaaacaagcaccacgttcagagactgtctcgtcttcttagcgatcctcgtgtccaagcttccatcgtctatggtggttctatagacgaagataagctgtatgttgagccaacgatcttgttggaccctcctcttgattctgagatcatgaatgaagagatctttggtccaattctcccgattatcacggtacgtgacatccaagaaagcatagggatcattaatacaaaaccgaagccacttgccatttatgcattcacaaatgacgagaaccttaaaactagaattttgtcagaaacatcctcaggaagtgttaccttcaatgacgtcatgatccagtatatgtgtgatgcgttaccttttggaggagtgggagaaagtggaatagggaggtatcacgggaaatactcatttgattgtttcagtcacgagaaagcaataatggaaggaagcttaggtatggatcttgaagctcgataccctccatggaacaacttcaagctcaccttcatcagactcgcatttcgtgaagcttacttcaagcttatcctccttatgcttggtcttaaaagataaaagggggaaagtgagagacagagacacatacacacaaacagagacaatataagtgattgaattacatcacacttatgtttgcttatcatatcttcacctaataagtctcattccgaatgttttacatttctttcaagcttgagagattctatataaagtgatttgatatctatttctacgggatacgttcttagtg

SEQ ID NO: 284 - protein, 484 aa, Arabidopsis thaliana
  peptide (1)..(484): Ceres Seq. ID no. 14302936
  misc_feature (1)..(231): Pfam Name: Pfam Description:  Aldehyde dehydrogenase family
  misc_feature (1)..(231): NCBI GI NO: 15234364 NR Description: aldehyde dehydrogenase family protein
  misc_feature (330)..(484): NCBI GI NO: 15234364 NR Description: aldehyde dehydrogenase family protein
  misc_feature (249)..(310): NCBI GI NO: 15234364 NR Description: aldehyde dehydrogenase family protein
  misc_feature (6)..(484): NCBI GI NO: 33317836 NR Description: aldehyde dehydrogenase
  misc_feature (15)..(480): NCBI GI NO: 4973431 NR Description: putative aldehyde dehydrogenase OS-ALDH
  misc_feature (14)..(482): NCBI GI NO: 15219358 NR Description: aldehyde dehydrogenase, putative (ALDH)
  misc_feature (14)..(482): NCBI GI NO: 21536879 NR Description: aldehyde dehydrogenase, putative
  misc_feature (1)..(484): NCBI GI NO: 18418408 NR Description: aldehyde dehydrogenase, putative (ALDH)
  misc_feature (1)..(484): NCBI GI NO: 17065876 NR Description: aldehyde dehydrogenase [Arabidopsis thaliana]
  misc_feature (15)..(481): NCBI GI NO: 17065918 NR Description: aldehyde dehydrogenase
MEAMKETVEESLREMRETFASGRTKSLKWRKAQIGAIYEMVKDNEDKICNALFQDLGKHSTEAFRDELGVVLRTATGAINCLDKWAVPKHSKLPLLFYPAKGKVISEPYGTVLVLSSWNFPISLSLDPLIGAIAAGNTVLLKSSELSPNASAFLAKTIPAYLDTKAIKVIEGGPDVATILLQHQWDKIFFTGSPKIGRIIMAAAAQHLTPVTLELGGKCPTIVDHHTISKNIKSVVKRIAGGKWGSCNGQACISVDYVLIEKSFAPTLIDMLKPTIKSFFGENPKESGCLSRIANKHHVQRLSRLLSDPRVQASIVYGGSIDEDKLYVEPTILLDPPLDSEIMNEEIFGPILPIITVRDIQESIGIINTKPKPLAIYAFTNDENLKTRILSETSSGSVTFNDVMIQYMCDALPFGGVGESGIGRYHGKYSFDCFSHEKAIMEGSLGMDLEARYPPWNNFKLTFIRLAFREAYFKLILLMLGLKR

SEQ ID NO: 285 - protein, 481 aa, Arabidopsis thaliana
  peptide (1)..(481): Ceres Seq. ID no. 14302937
  misc_feature (1)..(228): Pfam Name: Pfam Description:  Aldehyde dehydrogenase family
  misc_feature (1)..(228): NCBI GI NO: 15234364 NR Description: aldehyde dehydrogenase family protein
  misc_feature (327)..(481): NCBI GI NO: 15234364 NR Description: aldehyde dehydrogenase family protein
  misc_feature (246)..(307): NCBI GI NO: 15234364 NR Description: aldehyde dehydrogenase family protein
  misc_feature (3)..(481): NCBI GI NO: 33317836 NR Description: aldehyde dehydrogenase
  misc_feature (12)..(477): NCBI GI NO: 4973431 NR Description: putative aldehyde dehydrogenase OS-ALDH
  misc_feature (11)..(479): NCBI GI NO: 15219358 NR Description: aldehyde dehydrogenase, putative (ALDH)
  misc_feature (11)..(479): NCBI GI NO: 21536879 NR Description: aldehyde dehydrogenase, putative
  misc_feature (1)..(481): NCBI GI NO: 18418408 NR Description: aldehyde dehydrogenase, putative (ALDH)
  misc_feature (1)..(481): NCBI GI NO: 17065876 NR Description: aldehyde dehydrogenase [Arabidopsis thaliana]
  misc_feature (12)..(478): NCBI GI NO: 17065918 NR Description: aldehyde dehydrogenase
MKETVEESLREMRETFASGRTKSLKWRKAQIGAIYEMVKDNEDKICNALFQDLGKHSTEAFRDELGVVLRTATGAINCLDKWAVPKHSKLPLLFYPAKGKVISEPYGTVLVLSSWNFPISLSLDPLIGAIAAGNTVLLKSSELSPNASAFLAKTIPAYLDTKAIKVIEGGPDVATILLQHQWDKIFFTGSPKIGRIIMAAAAQHLTPVTLELGGKCPTIVDHHTISKNIKSVVKRIAGGKWGSCNGQACISVDYVLIEKSFAPTLIDMLKPTIKSFFGENPKESGCLSRIANKHHVQRLSRLLSDPRVQASIVYGGSIDEDKLYVEPTILLDPPLDSEIMNEEIFGPILPIITVRDIQESIGIINTKPKPLAIYAFTNDENLKTRILSETSSGSVTFNDVMIQYMCDALPFGGVGESGIGRYHGKYSFDCFSHEKAIMEGSLGMDLEARYPPWNNFKLTFIRLAFREAYFKLILLMLGLKR

SEQ ID NO: 286 - protein, 470 aa, Arabidopsis thaliana
  peptide (1)..(470): Ceres Seq. ID no. 14302938
  misc_feature (1)..(217): Pfam Name: Pfam Description:  Aldehyde dehydrogenase family
  misc_feature (1)..(217): NCBI GI NO: 15234364 NR Description: aldehyde dehydrogenase family protein
  misc_feature (316)..(470): NCBI GI NO: 15234364 NR Description: aldehyde dehydrogenase family protein
  misc_feature (235)..(296): NCBI GI NO: 15234364 NR Description: aldehyde dehydrogenase family protein
  misc_feature (1)..(470): NCBI GI NO: 33317836 NR Description: aldehyde dehydrogenase
  misc_feature (1)..(466): NCBI GI NO: 4973431 NR Description: putative aldehyde dehydrogenase OS-ALDH
  misc_feature (1)..(468): NCBI GI NO: 15219358 NR Description: aldehyde dehydrogenase, putative (ALDH)
  misc_feature (1)..(468): NCBI GI NO: 21536879 NR Description: aldehyde dehydrogenase, putative
  misc_feature (1)..(470): NCBI GI NO: 18418408 NR Description: aldehyde dehydrogenase, putative (ALDH)
  misc_feature (1)..(470): NCBI GI NO: 17065876 NR Description: aldehyde dehydrogenase [Arabidopsis thaliana]
  misc_feature (1)..(467): NCBI GI NO: 17065918 NR Description: aldehyde dehydrogenase
MRETFASGRTKSLKWRKAQIGAIYEMVKDNEDKICNALFQDLGKHSTEAFRDELGVVLRTATGAINCLDKWAVPKHSKLPLLFYPAKGKVISEPYGTVLVLSSWNFPISLSLDPLIGAIAAGNTVLLKSSELSPNASAFLAKTIPAYLDTKAIKVIEGGPDVATILLQHQWDKIFFTGSPKIGRIIMAAAAQHLTPVTLELGGKCPTIVDHHTISKNIKSVVKRIAGGKWGSCNGQACISVDYVLIEKSFAPTLIDMLKPTIKSFFGENPKESGCLSRIANKHHVQRLSRLLSDPRVQASIVYGGSIDEDKLYVEPTILLDPPLDSEIMNEEIFGPILPIITVRDIQESIGIINTKPKPLAIYAFTNDENLKTRILSETSSGSVTFNDVMIQYMCDALPFGGVGESGIGRYHGKYSFDCFSHEKAIMEGSLGMDLEARYPPWNNFKLTFIRLAFREAYFKLILLMLGLKR

SEQ ID NO: 287 - DNA, 1701 bp, Arabidopsis thaliana
  misc_feature (1)..(1701): Ceres Seq. ID no. 14302943
gcaccaggagctcactagtccccccccccccccggtctcctccaatcatgtcgtttcaaaatcctctaatttctcagtcctagtgctaaagctcttgctgggttcaagttgatttctcagtcatcgattgaaattttctcgggaaaaagttctcatcgtctaccatcgacaacgagaaaccagaaaatgcaaagtcttagtcaacttggaccttcagagattttccttgtcgccagaagagaaaaacccagtacgagagcacagctttggtttacgggaagactctcttttagacaagaaacaaatggggttcgtttaaagaatagagtagagtttagtccaagacctgtacctccaaatctgattgcagcagagaaagaagaagctaaagcagttcttactctattcttcaagaagcaaggtcttagcaacagtctctcttctcggttaatcaacaaatccgatcaattcattgaccatttagtgtccaggctccattctgttcacaaagctcgatacctcgtaggaagagaacttactacacttgagattcgagattctcttattccttacctcgaacaacttcatgaagaacatggtgatcttctcgctgagcttgttgtgagcttccctgatccaccagctgagcctagactcgttgcttcatcttcagttccggtcctaccacctcgtggtgacacagattctgcggcagacactcggaaactgagagctgtgtctcgagtcagcgaacttgacacagaaggtgcattacgtcctcagaccctttaccttcttgaccttggtttaaacctggagcagatcaaaacaatcactcgaaagttcgctgcctttccttattacagcctcgacggaaaaataaaacccgttgtggaattccttctagacctcggaattcctaaatcagatatccccacaatcctctgcaaacgcccacagatatgcggaatcagcctaacagataacctgaaaccgacaatggcctttcttgagacgcttggcattgacaagaaccaatgggcaaagatcatttcccgtttcccagccatcctcacttacagccgccagaaacttacttcaactgtcgagttcttatcccaaactggtctcacagaagaacagatagggagaatcctaacccgatgtccaaacatcatgagttacagtgtagaagacaagctccgtccaactatggagtactttagatcgctaaatgtcgatgttgcggttctcctacatcgatgtccccaaacgttcggattaagcatagagtcgaatttgaagccagtaactgagttcttcctcgaaaagggttttggtttagatgaaattggagtcatgatctctagatatggagctttgtacacattcagcttgaaagagaatgtcatgccgaaatgggattactttcagacaatggactatccgaaatccgagcttgtgaaattccctcagttttttgggtacagtttacaagagaggatcaagccgagatacgagctggttcagagaagtggagtgagactgctgttgaaccaggttttatcgctgtcgggaattgagttcgagaaagttgttaagaagaagatgatgaaacttgtgtctaataacgtaatcgatgaacaaagtagtggtggtttgttgtgaatgttttagttttagagtaatcaatttgccgag

SEQ ID NO: 288 - protein, 493 aa, Arabidopsis thaliana
  peptide (1)..(493): Ceres Seq. ID no. 14302944
  misc_feature (47)..(409): Pfam Name: Pfam Description:  mTERF
  misc_feature (1)..(432): NCBI GI NO: 18414260 NR Description: expressed protein [Arabidopsis thaliana]
  misc_feature (47)..(432): NCBI GI NO: 7485117 NR Description: hypothetical protein - Arabidopsis thaliana
  misc_feature (1)..(26): NCBI GI NO: 7485117 NR Description: hypothetical protein - Arabidopsis thaliana
  misc_feature (169)..(469): NCBI GI NO: 15233700 NR Description: expressed protein [Arabidopsis thaliana]
  misc_feature (215)..(471): NCBI GI NO: 15226787 NR Description: expressed protein [Arabidopsis thaliana]
  misc_feature (173)..(467): NCBI GI NO: 34905080 NR Description: P0686C03.23
  misc_feature (253)..(471): NCBI GI NO: 28392870 NR Description: unknown protein [Arabidopsis thaliana]
  misc_feature (111)..(469): NCBI GI NO: 18406426 NR Description: expressed protein [Arabidopsis thaliana]
  misc_feature (124)..(469): NCBI GI NO: 15236230 NR Description: expressed protein [Arabidopsis thaliana]
  misc_feature (236)..(475): NCBI GI NO: 15227089 NR Description: hypothetical protein [Arabidopsis thaliana]
MQSLSQLGPSEIFLVARREKPSTRAQLWFTGRLSFRQETNGVRLKNRVEFSPRPVPPNLIAAEKEEAKAVLTLFFKKQGLSNSLSSRLINKSDQFIDHLVSRLHSVHKARYLVGRELTTLEIRDSLIPYLEQLHEEHGDLLAELVVSFPDPPAEPRLVASSSVPVLPPRGDTDSAADTRKLRAVSRVSELDTEGALRPQTLYLLDLGLNLEQIKTITRKFAAFPYYSLDGKIKPVVEFLLDLGIPKSDIPTILCKRPQICGISLTDNLKPTMAFLETLGIDKNQWAKIISRFPAILTYSRQKLTSTVEFLSQTGLTEEQIGRILTRCPNIMSYSVEDKLRPTMEYFRSLNVDVAVLLHRCPQTFGLSIESNLKPVTEFFLEKGFGLDEIGVMISRYGALYTFSLKENVMPKWDYFQTMDYPKSELVKFPQFFGYSLQERIKPRYELVQRSGVRLLLNQVLSLSGIEFEKVVKKKMMKLVSNNVIDEQSSGGLL

SEQ ID NO: 289 - DNA, 863 bp, Arabidopsis thaliana
  misc_feature (1)..(863): Ceres Seq. ID no. 12606053
aaccggacaacatctcaaaacttgttctgtttttttttttttcatttcttaaacagaaaaatggttgcagcattctcttacactgcctgcaccaagctttctctattacatccttctatggttgctcaaatccgaccaagaacaacacaaaaggcgttcgtggtgacaaatccggaacaagacagtactcttgaagtacaagaaacagagacactcaaagaagagcaatcaacagagaagatgaagaagcagccaacaccattgagaccagtggagaaacagctgaacgtgaagagcaagggtatgggcgattttggtggtcagtggctaagcagtgtcacacgtcacgttaggatctacgctgcttatattgatccagagacttgtgagtttgaccagtcacaaatggataaactcactttgattcttgatcctactgaagaatttgtgtgggatgatgaaagctgtaacaaggtctattcttatttccaagaactcgtcgatcactacgagggagcaccattaacggagtacacattgagattgataggatcggacgtagaacattacataaggaagatgttgttcgatggagaaatacaatacaatatggatgcaagagttcttaatttcagtatgggaaagcctcgtgtacaattcaataccagtaacattgaaggtggtggagatggtcagcctcaagaggacgcttagtgaaacaaactctattttataatcatgtaatgggaatataaatatattgtagtatgctttttaattttgtctatcacaaagtaacatatgtatatatcatgacatatgctataattatttttgtaataatcaatcttaagtttcttttc

SEQ ID NO: 290 - protein, 237 aa, Arabidopsis thaliana
  peptide (1)..(237): Ceres Seq. ID no. 12606054
  misc_feature (21)..(171): NCBI GI NO: 15235742 NR Description: putative protein; protein id: At4g37920.1
  misc_feature (171)..(232): NCBI GI NO: 15235742 NR Description: putative protein; protein id: At4g37920.1
  misc_feature (55)..(225): NCBI GI NO: 21740425 NR Description: OSJNBa0091D06.25
  misc_feature (110)..(219): NCBI GI NO: 37521091 NR Description: hypothetical protein glr1522
  misc_feature (110)..(218): NCBI GI NO: 17229224 NR Description: hypothetical protein [Nostoc sp. PCC 7120]
  misc_feature (110)..(225): NCBI GI NO: 23125502 NR Description: hypothetical protein [Nostoc punctiforme]
  misc_feature (110)..(219): NCBI GI NO: 16331024 NR Description: unknown protein [Synechocystis sp. PCC 6803]
  misc_feature (110)..(218): NCBI GI NO: 23039375 NR Description: hypothetical protein
  misc_feature (110)..(217): NCBI GI NO: 33239620 NR Description: Uncharacterized protein
  misc_feature (110)..(217): NCBI GI NO: 33866788 NR Description: conserved hypothetical protein
NRTTSQNLFCFFFFHFLNRKMVAAFSYTACTKLSLLHPSMVAQIRPRTTQKAFVVTNPEQDSTLEVQETETLKEEQSTEKMKKQPTPLRPVEKQLNVKSKGMGDFGGQWLSSVTRHVRIYAAYIDPETCEFDQSQMDKLTLILDPTEEFVWDDESCNKVYSYFQELVDHYEGAPLTEYTLRLIGSDVEHYIRKMLFDGEIQYNMDARVLNFSMGKPRVQFNTSNIEGGGDGQPQEDA

SEQ ID NO: 291 - protein, 217 aa, Arabidopsis thaliana
  peptide (1)..(217): Ceres Seq. ID no. 12606055
  misc_feature (1)..(151): NCBI GI NO: 15235742 NR Description: putative protein; protein id: At4g37920.1
  misc_feature (151)..(212): NCBI GI NO: 15235742 NR Description: putative protein; protein id: At4g37920.1
  misc_feature (35)..(205): NCBI GI NO: 21740425 NR Description: OSJNBa0091D06.25
  misc_feature (90)..(199): NCBI GI NO: 37521091 NR Description: hypothetical protein glr1522
  misc_feature (90)..(198): NCBI GI NO: 17229224 NR Description: hypothetical protein [Nostoc sp. PCC 7120]
  misc_feature (90)..(205): NCBI GI NO: 23125502 NR Description: hypothetical protein [Nostoc punctiforme]
  misc_feature (90)..(199): NCBI GI NO: 16331024 NR Description: unknown protein [Synechocystis sp. PCC 6803]
  misc_feature (90)..(198): NCBI GI NO: 23039375 NR Description: hypothetical protein
  misc_feature (90)..(197): NCBI GI NO: 33239620 NR Description: Uncharacterized protein
  misc_feature (90)..(197): NCBI GI NO: 33866788 NR Description: conserved hypothetical protein
MVAAFSYTACTKLSLLHPSMVAQIRPRTTQKAFVVTNPEQDSTLEVQETETLKEEQSTEKMKKQPTPLRPVEKQLNVKSKGMGDFGGQWLSSVTRHVRIYAAYIDPETCEFDQSQMDKLTLILDPTEEFVWDDESCNKVYSYFQELVDHYEGAPLTEYTLRLIGSDVEHYIRKMLFDGEIQYNMDARVLNFSMGKPRVQFNTSNIEGGGDGQPQEDA

SEQ ID NO: 292 - protein, 198 aa, Arabidopsis thaliana
  peptide (1)..(198): Ceres Seq. ID no. 12606056
  misc_feature (1)..(132): NCBI GI NO: 15235742 NR Description: putative protein; protein id: At4g37920.1
  misc_feature (132)..(193): NCBI GI NO: 15235742 NR Description: putative protein; protein id: At4g37920.1
  misc_feature (16)..(186): NCBI GI NO: 21740425 NR Description: OSJNBa0091D06.25
  misc_feature (71)..(180): NCBI GI NO: 37521091 NR Description: hypothetical protein glr1522
  misc_feature (71)..(179): NCBI GI NO: 17229224 NR Description: hypothetical protein [Nostoc sp. PCC 7120]
  misc_feature (71)..(186): NCBI GI NO: 23125502 NR Description: hypothetical protein [Nostoc punctiforme]
  misc_feature (71)..(180): NCBI GI NO: 16331024 NR Description: unknown protein [Synechocystis sp. PCC 6803]
  misc_feature (71)..(179): NCBI GI NO: 23039375 NR Description: hypothetical protein
  misc_feature (71)..(178): NCBI GI NO: 33239620 NR Description: Uncharacterized protein
  misc_feature (71)..(178): NCBI GI NO: 33866788 NR Description: conserved hypothetical protein
MVAQIRPRTTQKAFVVTNPEQDSTLEVQETETLKEEQSTEKMKKQPTPLRPVEKQLNVKSKGMGDFGGQWLSSVTRHVRIYAAYIDPETCEFDQSQMDKLTLILDPTEEFVWDDESCNKVYSYFQELVDHYEGAPLTEYTLRLIGSDVEHYIRKMLFDGEIQYNMDARVLNFSMGKPRVQFNTSNIEGGGDGQPQEDA

SEQ ID NO: 293 - DNA, 582 bp, Arabidopsis thaliana
  misc_feature (1)..(582): Ceres Seq. ID no. 13648103
gaaaataatcttcatagtctctcatccaatcttacaaactttctgatttcctttctacattcatcgaccaatggcagcaaacaaaactcttcctacgtatttttgcagaaactgcgagaatccactagctctcggtgaagatctcatctccaaaaaatttgtgggagcttcagggccagcgtttatgttttcacacgcgatgaacgtggtggttggaccgaagattgggaggaaactgataaccggatcgtatgtagtggcagatgtgatgtgcagtaagtgtggtgagacgttgggttggaaatatgttgagacattcgatcttaaacagaggtataaagaaggcatgtttgtcatcgagaagctcaagttgaccaaaagatattgaaacctagtcaagaagaataatactcttggagggttaagctaataaataaatgaaggaaacttgaggattgtatatgtatatataacctttgttgtataaatgtcatcactatattggttgttctctataaagggatttgaaaacaaagtaaaaaaaaaaaaaaaaaaaactcgagggggggcccggtacccaat

SEQ ID NO: 294 - protein, 105 aa, Arabidopsis thaliana
  peptide (1)..(105): Ceres Seq. ID no. 13648104
  misc_feature (10)..(103): Pfam Name: Pfam Description:  Yippee putative zinc-binding protein
  misc_feature (10)..(103): NCBI GI NO: 15234265 NR Description: expressed protein [Arabidopsis thaliana]
  misc_feature (9)..(103): NCBI GI NO: 9558721 NR Description: yippee-like 1 [Homo sapiens]
  misc_feature (9)..(103): NCBI GI NO: 17865319 NR Description: yippee-like 1; peptidylprolyl isomerase
  misc_feature (9)..(103): NCBI GI NO: 20840809 NR Description: similar to hypothetical protein FLJ30213
  misc_feature (9)..(103): NCBI GI NO: 21450727 NR Description: hypothetical protein FLJ30213 [Homo sapiens]
  misc_feature (9)..(101): NCBI GI NO: 18399156 NR Description: expressed protein [Arabidopsis thaliana]
  misc_feature (10)..(97): NCBI GI NO: 40255199 NR Description: hypothetical protein MGC10500 [Homo sapiens]
  misc_feature (12)..(103): NCBI GI NO: 37533560 NR Description: hypothetical protein
  misc_feature (1)..(103): NCBI GI NO: 6319422 NR Description: Hypothetical ORF; Ybl049wp
  misc_feature (9)..(79): NCBI GI NO: 26352366 NR Description: unnamed protein product [Mus musculus]
MAANKTLPTYFCRNCENPLALGEDLISKKFVGASGPAFMFSHAMNVVVGPKIGRKLITGSYVVADVMCSKCGETLGWKYVETFDLKQRYKEGMFVIEKLKLTKRY

SEQ ID NO: 295 - protein, 67 aa, Arabidopsis thaliana
  peptide (1)..(67): Ceres Seq. ID no. 13648105
  misc_feature (1)..(65): Pfam Name: Pfam Description:  Yippee putative zinc-binding protein
  misc_feature (1)..(65): NCBI GI NO: 15234265 NR Description: expressed protein [Arabidopsis thaliana]
  misc_feature (1)..(65): NCBI GI NO: 9558721 NR Description: yippee-like 1 [Homo sapiens]
  misc_feature (1)..(65): NCBI GI NO: 17865319 NR Description: yippee-like 1; peptidylprolyl isomerase
  misc_feature (1)..(65): NCBI GI NO: 21450727 NR Description: hypothetical protein FLJ30213 [Homo sapiens]
  misc_feature (1)..(65): NCBI GI NO: 20840809 NR Description: similar to hypothetical protein FLJ30213
  misc_feature (1)..(63): NCBI GI NO: 18399156 NR Description: expressed protein [Arabidopsis thaliana]
  misc_feature (1)..(59): NCBI GI NO: 40255199 NR Description: hypothetical protein MGC10500 [Homo sapiens]
  misc_feature (1)..(65): NCBI GI NO: 37533560 NR Description: hypothetical protein
  misc_feature (1)..(65): NCBI GI NO: 6319422 NR Description: Hypothetical ORF; Ybl049wp
  misc_feature (1)..(41): NCBI GI NO: 26352366 NR Description: unnamed protein product [Mus musculus]
MFSHAMNVVVGPKIGRKLITGSYVVADVMCSKCGETLGWKYVETFDLKQRYKEGMFVIEKLKLTKRY

SEQ ID NO: 296 - protein, 62 aa, Arabidopsis thaliana
  peptide (1)..(62): Ceres Seq. ID no. 13648106
  misc_feature (1)..(60): Pfam Name: Pfam Description:  Yippee putative zinc-binding protein
  misc_feature (1)..(60): NCBI GI NO: 15234265 NR Description: expressed protein [Arabidopsis thaliana]
  misc_feature (1)..(60): NCBI GI NO: 9558721 NR Description: yippee-like 1 [Homo sapiens]
  misc_feature (1)..(60): NCBI GI NO: 17865319 NR Description: yippee-like 1; peptidylprolyl isomerase
  misc_feature (1)..(60): NCBI GI NO: 21450727 NR Description: hypothetical protein FLJ30213 [Homo sapiens]
  misc_feature (1)..(60): NCBI GI NO: 20840809 NR Description: similar to hypothetical protein FLJ30213
  misc_feature (1)..(58): NCBI GI NO: 18399156 NR Description: expressed protein [Arabidopsis thaliana]
  misc_feature (1)..(54): NCBI GI NO: 40255199 NR Description: hypothetical protein MGC10500 [Homo sapiens]
  misc_feature (1)..(60): NCBI GI NO: 37533560 NR Description: hypothetical protein
  misc_feature (1)..(60): NCBI GI NO: 6319422 NR Description: Hypothetical ORF; Ybl049wp
  misc_feature (1)..(36): NCBI GI NO: 26352366 NR Description: unnamed protein product [Mus musculus]
MNVVVGPKIGRKLITGSYVVADVMCSKCGETLGWKYVETFDLKQRYKEGMFVIEKLKLTKRY

SEQ ID NO: 297 - DNA, 564 bp, Arabidopsis thaliana
  misc_feature (1)..(564): Ceres Seq. ID no. 13648495
tagtccccccccccccccccccaaaaagttttatcgattccaccaaattagggcgaacgcgaaatctgggtattgtaatttgaagcgatggcgacgactggaactgctgcggttgcgacgggaacttcgacggtgaagagaaaaccggtgtttgtgaaggtggaacagctaaagcctggaacgactggtcacacgttgactgttaaagtcattgaggctaatatcgtggttcctgttacccggaagactcgtccagcgagttctctgagtcgtccttctcagcctagtcgaatcgttgagtgtctcatcggtgacgaaactgggtgtatcctcttcactgctcgtaacgatcaaggttattgtttctccacttttctcttgctttatggatatagaaatggtgtcttcgtagtttattagagtgataagtcttatcctttgttgttctctcgtttgtcttaatcaatttctattttgagcaaaaaaaaaaaaaaaaaaaactcgagggggggcccggtacccaattgttaaacacaataaagtgggaactggaggggggaaagg

SEQ ID NO: 298 - protein, 110 aa, Arabidopsis thaliana
  peptide (1)..(110): Ceres Seq. ID no. 13648496
  misc_feature (1)..(89): NCBI GI NO: 15235304 NR Description: expressed protein [Arabidopsis thaliana]
  misc_feature (6)..(89): NCBI GI NO: 15219562 NR Description: hypothetical protein [Arabidopsis thaliana]
  misc_feature (9)..(89): NCBI GI NO: 34909622 NR Description: P0435B05.31
  misc_feature (13)..(90): NCBI GI NO: 25329540 NR Description: probable tyrosyl-tRNA synthetase
  misc_feature (13)..(89): NCBI GI NO: 18403397 NR Description: expressed protein [Arabidopsis thaliana]
  misc_feature (10)..(89): NCBI GI NO: 34904470 NR Description: OSJNBa0086P08.14
  misc_feature (9)..(100): NCBI GI NO: 6573753 NR Description: F20B24.1 [Arabidopsis thaliana]
  misc_feature (9)..(89): NCBI GI NO: 18391179 NR Description: expressed protein [Arabidopsis thaliana]
  misc_feature (9)..(89): NCBI GI NO: 30681801 NR Description: expressed protein [Arabidopsis thaliana]
  misc_feature (9)..(89): NCBI GI NO: 18395285 NR Description: expressed protein [Arabidopsis thaliana]
MATTGTAAVATGTSTVKRKPVFVKVEQLKPGTTGHTLTVKVIEANIVVPVTRKTRPASSLSRPSQPSRIVECLIGDETGCILFTARNDQGYCFSTFLLLYGYRNGVFVVY

SEQ ID NO: 299 - DNA, 3205 bp, Arabidopsis thaliana
  misc_feature (1)..(3205): Ceres Seq. ID no. 13648499
gatgcttcggtgttggtcagtcaccgtcgagagatcatgcgaaggaatgctcctcaggcggaggatactatcgctctctgcgtcgtcgttcagaaactttacttccggtaacaacggcgacgctattccgttctctaccttcacgaaaccttcttcttcaatcgctcccggagatttcctcgtccgtgaatggaaagactggtttaagcatcgagatgtgaaacagagccaccaattaatcgatcgaatctttgacatccttcgagctccttctaacgatggagacgatagagctttttatctccacctctccaatctccgacttcgtctcactgagaaattcgtcctcgacgtgctttcacacactcgttacgatatcctctgttgtctcaaattcttcgattgggctgctcgtcagcctgggtttcatcacacgcgtgctacttttcatgctatcttcaagatccttcgtggtgcgaagcttgtgactcttatgattgactttttggatcgaagtgttggttttgaaagttgccgtcattctcttcgtctctgtgatgctcttgttgttggttatgctgtagctggtcgtactgatatagctcttcagcattttggtaatatgagatttcgaggtttggatttggattcttttgggtatcatgtgcttttgaatgcacttgttgaggagaagtgttttgatagttttgatgtcatcttcgaccagatctccgtgcgtggcttcgtatgtgctgttacgcattcgattttggtgaagaagttttgcaagcaagggaagcttgatgaggctgaagattatcttcgagccttgctgcctaatgatcctgctggatgtggttctggcttaggtatattggttgatgctctatgttccaaacgaaagtttcaggaagctactaagttgttagacgagatcaaactggtgggaacagtgaatatggaccgtgcttataacatttggattagggcgcttattaaagctggattcttgaataaccctgcggatttcttgcagaagattagtcctttggaaggttgtgaactcgaagttttcaggtataactctatggtctttcaacttttgaaggagaacaatcttgatggtgtgtatgatattcttacggagatgatggtacgtggagtttcgccgaataagaaaacgatgaatgctgctttatgcttcttttgcaaagctggatttgtagatgaagccctcgagttataccggtcgaggtcagaaattgggtttgctcctaccgccatgtcttacaactatctgattcataccctttgtgccaatgaaagtgttgaacaagcttatgatgtcttgaaaggggcaattgaccgagggcattttcttggtggaaagacatttagtacactaaccaatgccttgtgctggaaggggaagcctgacatggcaagggagctggttattgctgccgctgaacgggacttattgcctaaacgtatagctggttgcaagattatatcagctctttgcgatgttgggaaagtggaggacgctcttatgattaatgagctattcaataaaagtggtgtagacacctcctttaaaatgttcaccagtttgatatatggctcaatcacactaatgaggggagacatagctgctaaacttatcatcaggatgcaggaaaagggctacaccccgacccgtagtctctatcgaaatgttattcaatgtgtttgtgagatggaaagtggtgaaaaaaacttctttactactttgctaaagtttcagttgtctctttgggaacacaaggttcaggcctacaacttattcattgaaggagctgggtttgcaggaaaaccaaaacttgcaagactagtgtatgatatgatggatagagatggtatcacgcccacagtagcttcaaacattctcatgcttcagagttatctaaaaaatgagaaaatcgccgatgctcttcactttttccatgacctgcgtgaacaaggtaagaccaaaaaaagactgtaccaagttatgattgttggtctctgtaaagcaaataaattggatgatgctatgcatttcttggaagaaatgaagggagaaggactacagcctagtatcgaatgttacgaagtaaacatacaaaaattgtgcaacgaagaaaagtatgatgaggcagttggattagtcaatgaatttaggaaaagtgggcgtcgtattacagctttcataggtaatgtccttttgcataacgcaatgaagagcaaaggggtgtatgaagcatggacacggatgagaaatatagaagataagatccctgagatgaagtcacttggtgagttgataggattattctcaggacgaatagatatggaagtagaactgaagcggttagatgaagttatagagaaatgctatcctcttgatatgtacacgtacaatatgctgttgagaatgattgtaatgaaccaggcggaagatgcatatgagatggttgaaagaatagctcggagaggatatgtgcctaatgaacggactgacatgatccttgaacgggctaaccgcatactagaggaacggaattcaaggtcaaacttagggaggaatggttggaatagtagacagaggcaacttgaatgatgaaaagtatgtcacagagaggtcagaattgttgaatagagagaacaagggagttgatttggattcagtatctgttttgggatttggatcatggacaacagatgaatgagaaaagccagattcttcttcttgaggctttatatgtcctggacgttgtaacttgcaggagcttttttatctctggattgcaaaagatcgatggtattttcccagaagctttttgtttttttttaagtaaagatcgatgtgtcactaaagacacttacagaattgggtagtatccattatgtacacaattgtttgtagtctttccaagaaacacacaagaattgggtagtatccattatgtacacaattgtttgtagtctttcctagaaacacacaagttttgttgtgcgacacaactactcagagagagatttcaacaattttttgtcatattctttatgtgttgcctgttggtaaggaaaatcaatggtggtcgcccgccttgtttcgaaaattggtgtttgtaattacatttgtttactagttctagtaatgatgaatcttcttattttgttg

SEQ ID NO: 300 - protein, 879 aa, Arabidopsis thaliana
  peptide (1)..(879): Ceres Seq. ID no. 13648500
  misc_feature (428)..(462): Pfam Name: Pfam Description:  PPR repeat
  misc_feature (343)..(846): NCBI GI NO: 34015232 NR Description: putative fertility restorer
  misc_feature (253)..(878): NCBI GI NO: 37535708 NR Description: putative membrane-associated protein
  misc_feature (253)..(859): NCBI GI NO: 37535672 NR Description: putative chloroplast RNA processing protein
  misc_feature (141)..(787): NCBI GI NO: 33859440 NR Description: PPR protein [Oryza sativa (indica cultivar-group)]
  misc_feature (350)..(859): NCBI GI NO: 15228763 NR Description: pentatricopeptide (PPR) repeat-containing protein
  misc_feature (350)..(859): NCBI GI NO: 11994279 NR Description: gb|AAD43616
  misc_feature (141)..(771): NCBI GI NO: 37535708 NR Description: putative membrane-associated protein
  misc_feature (141)..(771): NCBI GI NO: 37535672 NR Description: putative chloroplast RNA processing protein
  misc_feature (184)..(727): NCBI GI NO: 34910106 NR Description: B1100D10.28
  misc_feature (192)..(847): NCBI GI NO: 37534450 NR Description: unknown protein
MLRCWSVTVERSCEGMLLRRRILSLSASSFRNFTSGNNGDAIPFSTFTKPSSSIAPGDFLVREWKDWFKHRDVKQSHQLIDRIFDILRAPSNDGDDRAFYLHLSNLRLRLTEKFVLDVLSHTRYDILCCLKFFDWAARQPGFHHTRATFHAIFKILRGAKLVTLMIDFLDRSVGFESCRHSLRLCDALVVGYAVAGRTDIALQHFGNMRFRGLDLDSFGYHVLLNALVEEKCFDSFDVIFDQISVRGFVCAVTHSILVKKFCKQGKLDEAEDYLRALLPNDPAGCGSGLGILVDALCSKRKFQEATKLLDEIKLVGTVNMDRAYNIWIRALIKAGFLNNPADFLQKISPLEGCELEVFRYNSMVFQLLKENNLDGVYDILTEMMVRGVSPNKKTMNAALCFFCKAGFVDEALELYRSRSEIGFAPTAMSYNYLIHTLCANESVEQAYDVLKGAIDRGHFLGGKTFSTLTNALCWKGKPDMARELVIAAAERDLLPKRIAGCKIISALCDVGKVEDALMINELFNKSGVDTSFKMFTSLIYGSITLMRGDIAAKLIIRMQEKGYTPTRSLYRNVIQCVCEMESGEKNFFTTLLKFQLSLWEHKVQAYNLFIEGAGFAGKPKLARLVYDMMDRDGITPTVASNILMLQSYLKNEKIADALHFFHDLREQGKTKKRLYQVMIVGLCKANKLDDAMHFLEEMKGEGLQPSIECYEVNIQKLCNEEKYDEAVGLVNEFRKSGRRITAFIGNVLLHNAMKSKGVYEAWTRMRNIEDKIPEMKSLGELIGLFSGRIDMEVELKRLDEVIEKCYPLDMYTYNMLLRMIVMNQAEDAYEMVERIARRGYVPNERTDMILERANRILEERNSRSNLGRNGWNSRQRQLE

SEQ ID NO: 301 - protein, 864 aa, Arabidopsis thaliana
  peptide (1)..(864): Ceres Seq. ID no. 13648501
  misc_feature (413)..(447): Pfam Name: Pfam Description:  PPR repeat
  misc_feature (328)..(831): NCBI GI NO: 34015232 NR Description: putative fertility restorer
  misc_feature (238)..(863): NCBI GI NO: 37535708 NR Description: putative membrane-associated protein
  misc_feature (238)..(844): NCBI GI NO: 37535672 NR Description: putative chloroplast RNA processing protein
  misc_feature (126)..(772): NCBI GI NO: 33859440 NR Description: PPR protein [Oryza sativa (indica cultivar-group)]
  misc_feature (335)..(844): NCBI GI NO: 15228763 NR Description: pentatricopeptide (PPR) repeat-containing protein
  misc_feature (335)..(844): NCBI GI NO: 11994279 NR Description: gb|AAD43616
  misc_feature (126)..(756): NCBI GI NO: 37535708 NR Description: putative membrane-associated protein
  misc_feature (126)..(756): NCBI GI NO: 37535672 NR Description: putative chloroplast RNA processing protein
  misc_feature (169)..(712): NCBI GI NO: 34910106 NR Description: B1100D10.28
  misc_feature (177)..(832): NCBI GI NO: 37534450 NR Description: unknown protein
MLLRRRILSLSASSFRNFTSGNNGDAIPFSTFTKPSSSIAPGDFLVREWKDWFKHRDVKQSHQLIDRIFDILRAPSNDGDDRAFYLHLSNLRLRLTEKFVLDVLSHTRYDILCCLKFFDWAARQPGFHHTRATFHAIFKILRGAKLVTLMIDFLDRSVGFESCRHSLRLCDALVVGYAVAGRTDIALQHFGNMRFRGLDLDSFGYHVLLNALVEEKCFDSFDVIFDQISVRGFVCAVTHSILVKKFCKQGKLDEAEDYLRALLPNDPAGCGSGLGILVDALCSKRKFQEATKLLDEIKLVGTVNMDRAYNIWIRALIKAGFLNNPADFLQKISPLEGCELEVFRYNSMVFQLLKENNLDGVYDILTEMMVRGVSPNKKTMNAALCFFCKAGFVDEALELYRSRSEIGFAPTAMSYNYLIHTLCANESVEQAYDVLKGAIDRGHFLGGKTFSTLTNALCWKGKPDMARELVIAAAERDLLPKRIAGCKIISALCDVGKVEDALMINELFNKSGVDTSFKMFTSLIYGSITLMRGDIAAKLIIRMQEKGYTPTRSLYRNVIQCVCEMESGEKNFFTTLLKFQLSLWEHKVQAYNLFIEGAGFAGKPKLARLVYDMMDRDGITPTVASNILMLQSYLKNEKIADALHFFHDLREQGKTKKRLYQVMIVGLCKANKLDDAMHFLEEMKGEGLQPSIECYEVNIQKLCNEEKYDEAVGLVNEFRKSGRRITAFIGNVLLHNAMKSKGVYEAWTRMRNIEDKIPEMKSLGELIGLFSGRIDMEVELKRLDEVIEKCYPLDMYTYNMLLRMIVMNQAEDAYEMVERIARRGYVPNERTDMILERANRILEERNSRSNLGRNGWNSRQRQLE

SEQ ID NO: 302 - protein, 715 aa, Arabidopsis thaliana
  peptide (1)..(715): Ceres Seq. ID no. 13648502
  misc_feature (264)..(298): Pfam Name: Pfam Description:  PPR repeat
  misc_feature (179)..(682): NCBI GI NO: 34015232 NR Description: putative fertility restorer
  misc_feature (89)..(714): NCBI GI NO: 37535708 NR Description: putative membrane-associated protein
  misc_feature (89)..(695): NCBI GI NO: 37535672 NR Description: putative chloroplast RNA processing protein
  misc_feature (1)..(623): NCBI GI NO: 33859440 NR Description: PPR protein [Oryza sativa (indica cultivar-group)]
  misc_feature (186)..(695): NCBI GI NO: 15228763 NR Description: pentatricopeptide (PPR) repeat-containing protein
  misc_feature (186)..(695): NCBI GI NO: 11994279 NR Description: gb|AAD43616
  misc_feature (1)..(607): NCBI GI NO: 37535708 NR Description: putative membrane-associated protein
  misc_feature (1)..(607): NCBI GI NO: 37535672 NR Description: putative chloroplast RNA processing protein
  misc_feature (20)..(563): NCBI GI NO: 34910106 NR Description: B1100D10.28
  misc_feature (28)..(683): NCBI GI NO: 37534450 NR Description: unknown protein
MIDFLDRSVGFESCRHSLRLCDALVVGYAVAGRTDIALQHFGNMRFRGLDLDSFGYHVLLNALVEEKCFDSFDVIFDQISVRGFVCAVTHSILVKKFCKQGKLDEAEDYLRALLPNDPAGCGSGLGILVDALCSKRKFQEATKLLDEIKLVGTVNMDRAYNIWIRALIKAGFLNNPADFLQKISPLEGCELEVFRYNSMVFQLLKENNLDGVYDILTEMMVRGVSPNKKTMNAALCFFCKAGFVDEALELYRSRSEIGFAPTAMSYNYLIHTLCANESVEQAYDVLKGAIDRGHFLGGKTFSTLTNALCWKGKPDMARELVIAAAERDLLPKRIAGCKIISALCDVGKVEDALMINELFNKSGVDTSFKMFTSLIYGSITLMRGDIAAKLIIRMQEKGYTPTRSLYRNVIQCVCEMESGEKNFFTTLLKFQLSLWEHKVQAYNLFIEGAGFAGKPKLARLVYDMMDRDGITPTVASNILMLQSYLKNEKIADALHFFHDLREQGKTKKRLYQVMIVGLCKANKLDDAMHFLEEMKGEGLQPSIECYEVNIQKLCNEEKYDEAVGLVNEFRKSGRRITAFIGNVLLHNAMKSKGVYEAWTRMRNIEDKIPEMKSLGELIGLFSGRIDMEVELKRLDEVIEKCYPLDMYTYNMLLRMIVMNQAEDAYEMVERIARRGYVPNERTDMILERANRILEERNSRSNLGRNGWNSRQRQLE

SEQ ID NO: 303 - DNA, 1694 bp, Arabidopsis thaliana
  misc_feature (1)..(1694): Ceres Seq. ID no. 14313532
gcaccaggagctcactaatccccccccccccccccatcgcttcttccgaaagctttcacatttgatatcaaaatcgagaaacaaaaattgaaaacaatctgtttcaccaaaaaaagaacaaaatgcatgggttcgatttcaaagagatccaggagaagatctccgatagctttcgtccatggcaacgctcttttcaattctgggttcgagctactaatatctacacaggctacaaggtgtttcaacttcgagtaagtttagtgaaagatgcaaagaagcaagaggaaatgtgggaaagacaacatgaacaagctgctgataagatttacttcatgtgctctgatcttggtggtttcttccttaagattgctcaacttttagcaaaacctgacatggcaccagctgcgtgggtgaaaaagcttgtcactttgtgtgatcaagctcctgcgacgccgtttgatgcgattcaacttgttctagagaaggagttaggtaaaagcattggtgaaatctttgaaacgtttgatgaaaagcctcttggttctgcttctattgctcaggttcaacatcctggcattgaaagattgatgatgacagacataagaaacttgcaactattcgccttatacatgcagagaacagatatcaaatttgacctgcattccataacaaaggaaatggagaaacagattggttatgaatttgacttcaaaagggaggccaatgcaatggaaagaattcgatgttttctttatgagaacaacaaaaagtctcctgttttggtaccaagagttctgcgagatatggtgactaagagggttttggtgatggaatacattaatggaattccaatcctgagcattggtgatgagatggctaaaagagggataaatcctcatggtaagattgcagaggcagcaaagcacaatatacttaacagtttatcccgtgcgtatggccaaatgatactgaaaagtggtttctttcatgcggatccacatcctggaaatatcttgatttgcaaaggtcaagaggttgcattgctggactatggtcaagtgaaggaactacccaacaagttgagacttggttatgcaaatttggtcattgccatggctgataacaatgcttcacgagtatcacagagcttttgggaaatgggtttacatacagtggccaagtgtgagaatgagcagcaagaacttctgcggttagcacaaacactttttgatacaaagatgcctactggtcagacagttttgcaacctttctcagatgactcttcgattaaaaagatagccgttgagacatttccagaggaactgttctctgtacttcgcactgtggttctgttaagaggactcagtgttgggatgggagttaattattcgtgtgcagaacaatggagagcaatggccgaagaggctttacttgcatctggaagagtgacaagagatggcaaagaaagatctcgtagacgggcttctctacgaaggctacgcacaggaagttaggaaaaagataggagtatttctcatcacttagactctcccatgagcaggatctgagcttttttcatttattgttctttcttttgtgagaatttgaatgataggagaagttggataacacttgaatgtaattggctgatataaaattatgatggaagatttgtaaatcaagatttaattcgc

SEQ ID NO: 304 - protein, 463 aa, Arabidopsis thaliana
  peptide (1)..(463): Ceres Seq. ID no. 14313533
  misc_feature (121)..(225): Pfam Name: Pfam Description:  ABC1 family
  misc_feature (1)..(311): NCBI GI NO: 30695871 NR Description: expressed protein [Arabidopsis thaliana]
  misc_feature (345)..(463): NCBI GI NO: 30695871 NR Description: expressed protein [Arabidopsis thaliana]
  misc_feature (1)..(311): NCBI GI NO: 9758915 NR Description: contains similarity to ABC transporter~gene_id:MXI22
  misc_feature (345)..(447): NCBI GI NO: 9758915 NR Description: contains similarity to ABC transporter~gene_id:MXI22
  misc_feature (1)..(311): NCBI GI NO: 15234008 NR Description: hypothetical protein [Arabidopsis thaliana]
  misc_feature (345)..(443): NCBI GI NO: 15234008 NR Description: hypothetical protein [Arabidopsis thaliana]
  misc_feature (82)..(395): NCBI GI NO: 34907760 NR Description: ABC transporter-like protein
  misc_feature (7)..(221): NCBI GI NO: 34907760 NR Description: ABC transporter-like protein
  misc_feature (74)..(463): NCBI GI NO: 23128673 NR Description: hypothetical protein [Nostoc punctiforme]
  misc_feature (58)..(422): NCBI GI NO: 33241332 NR Description: Predicted protein kinase
MHGFDFKEIQEKISDSFRPWQRSFQFWVRATNIYTGYKVFQLRVSLVKDAKKQEEMWERQHEQAADKIYFMCSDLGGFFLKIAQLLAKPDMAPAAWVKKLVTLCDQAPATPFDAIQLVLEKELGKSIGEIFETFDEKPLGSASIAQVQHPGIERLMMTDIRNLQLFALYMQRTDIKFDLHSITKEMEKQIGYEFDFKREANAMERIRCFLYENNKKSPVLVPRVLRDMVTKRVLVMEYINGIPILSIGDEMAKRGINPHGKIAEAAKHNILNSLSRAYGQMILKSGFFHADPHPGNILICKGQEVALLDYGQVKELPNKLRLGYANLVIAMADNNASRVSQSFWEMGLHTVAKCENEQQELLRLAQTLFDTKMPTGQTVLQPFSDDSSIKKIAVETFPEELFSVLRTVVLLRGLSVGMGVNYSCAEQWRAMAEEALLASGRVTRDGKERSRRRASLRRLRTGS

SEQ ID NO: 305 - protein, 408 aa, Arabidopsis thaliana
  peptide (1)..(408): Ceres Seq. ID no. 14313534
  misc_feature (66)..(170): Pfam Name: Pfam Description:  ABC1 family
  misc_feature (1)..(256): NCBI GI NO: 30695871 NR Description: expressed protein [Arabidopsis thaliana]
  misc_feature (290)..(408): NCBI GI NO: 30695871 NR Description: expressed protein [Arabidopsis thaliana]
  misc_feature (1)..(256): NCBI GI NO: 9758915 NR Description: contains similarity to ABC transporter~gene_id:MXI22
  misc_feature (290)..(392): NCBI GI NO: 9758915 NR Description: contains similarity to ABC transporter~gene_id:MXI22
  misc_feature (1)..(256): NCBI GI NO: 15234008 NR Description: hypothetical protein [Arabidopsis thaliana]
  misc_feature (290)..(388): NCBI GI NO: 15234008 NR Description: hypothetical protein [Arabidopsis thaliana]
  misc_feature (27)..(340): NCBI GI NO: 34907760 NR Description: ABC transporter-like protein
  misc_feature (1)..(166): NCBI GI NO: 34907760 NR Description: ABC transporter-like protein
  misc_feature (19)..(408): NCBI GI NO: 23128673 NR Description: hypothetical protein [Nostoc punctiforme]
  misc_feature (3)..(367): NCBI GI NO: 33241332 NR Description: Predicted protein kinase
MWERQHEQAADKIYFMCSDLGGFFLKIAQLLAKPDMAPAAWVKKLVTLCDQAPATPFDAIQLVLEKELGKSIGEIFETFDEKPLGSASIAQVQHPGIERLMMTDIRNLQLFALYMQRTDIKFDLHSITKEMEKQIGYEFDFKREANAMERIRCFLYENNKKSPVLVPRVLRDMVTKRVLVMEYINGIPILSIGDEMAKRGINPHGKIAEAAKHNILNSLSRAYGQMILKSGFFHADPHPGNILICKGQEVALLDYGQVKELPNKLRLGYANLVIAMADNNASRVSQSFWEMGLHTVAKCENEQQELLRLAQTLFDTKMPTGQTVLQPFSDDSSIKKIAVETFPEELFSVLRTVVLLRGLSVGMGVNYSCAEQWRAMAEEALLASGRVTRDGKERSRRRASLRRLRTGS

SEQ ID NO: 306 - protein, 393 aa, Arabidopsis thaliana
  peptide (1)..(393): Ceres Seq. ID no. 14313535
  misc_feature (51)..(155): Pfam Name: Pfam Description:  ABC1 family
  misc_feature (1)..(241): NCBI GI NO: 30695871 NR Description: expressed protein [Arabidopsis thaliana]
  misc_feature (275)..(393): NCBI GI NO: 30695871 NR Description: expressed protein [Arabidopsis thaliana]
  misc_feature (1)..(241): NCBI GI NO: 9758915 NR Description: contains similarity to ABC transporter~gene_id:MXI22
  misc_feature (275)..(377): NCBI GI NO: 9758915 NR Description: contains similarity to ABC transporter~gene_id:MXI22
  misc_feature (1)..(241): NCBI GI NO: 15234008 NR Description: hypothetical protein [Arabidopsis thaliana]
  misc_feature (275)..(373): NCBI GI NO: 15234008 NR Description: hypothetical protein [Arabidopsis thaliana]
  misc_feature (12)..(325): NCBI GI NO: 34907760 NR Description: ABC transporter-like protein
  misc_feature (1)..(151): NCBI GI NO: 34907760 NR Description: ABC transporter-like protein
  misc_feature (4)..(393): NCBI GI NO: 23128673 NR Description: hypothetical protein [Nostoc punctiforme]
  misc_feature (1)..(352): NCBI GI NO: 33241332 NR Description: Predicted protein kinase
MCSDLGGFFLKIAQLLAKPDMAPAAWVKKLVTLCDQAPATPFDAIQLVLEKELGKSIGEIFETFDEKPLGSASIAQVQHPGIERLMMTDIRNLQLFALYMQRTDIKFDLHSITKEMEKQIGYEFDFKREANAMERIRCFLYENNKKSPVLVPRVLRDMVTKRVLVMEYINGIPILSIGDEMAKRGINPHGKIAEAAKHNILNSLSRAYGQMILKSGFFHADPHPGNILICKGQEVALLDYGQVKELPNKLRLGYANLVIAMADNNASRVSQSFWEMGLHTVAKCENEQQELLRLAQTLFDTKMPTGQTVLQPFSDDSSIKKIAVETFPEELFSVLRTVVLLRGLSVGMGVNYSCAEQWRAMAEEALLASGRVTRDGKERSRRRASLRRLRTGS

SEQ ID NO: 307 - DNA, 1130 bp, Arabidopsis thaliana
  misc_feature (1)..(1130): Ceres Seq. ID no. 14307589
gaaaccagttgagaagtaaaattttctattgcagagagaaagagagttagagaaagagagagagagatgaaacttgtgcaagaagaataccgtaaaggaccgtggacagaacaggaggacatcctcttggtcaactttgtccacttgttcggagatcgaagatgggattttgtagcgaaagtttcaggtttgaaggtggagggagaaacataagaataggtataggtttgttttggaaaaatgggcggtctttggaaaggaccttccatttaaagaaatgacctggttttggttgtaggtttaaacagaacaggaaagagttgcaggttaaggtgggttaattacctgcatcctggtctcaaacgtggtaagatgactccacaagaagagcgtttagtccttgagcttcacgccaaatggggaaacaggtggtcaaaaattgcccggaaattaccggggagaacagataatgagataaagaactactggaggactcatatgaggaagaaggctcaagagaagaagcgacctatgtctcctacttcctcatcttcaaactgttgctcatcatctatgaccactactactactcaagacactggaggctccaacgggaaaatgaatcaagaaggcgaagacgggtactactccatggatgacatatggagagagattgatcagtctggagcaaacgttattaagccggtaaaagacaactactactcagagcaaagttgttacttgaatttccctcctctgggttgtccaacatgggaaagttccttggagtctatatggaacatggatgcagatgaaagtaagatgtcttcttttgctattgatcagtttcctctaagttttgaacatggtagtggtcgcctttagtctaggatttgattcatttggaatgtttatatgtgcagcatatatatgttatcaaacgacgactgtagtagtttcctatgacttacatcaaaaaacaccacccactgtactaatctcataagtagtcatcatcctatgcctttgtttagtttgtagagtgagtgaaaagatgtgtaatacaagtcagaactctaattccaaaataaatagacttttgaagcttctgtgaaagtttgtaagaaacc

SEQ ID NO: 308 - protein, 170 aa, Arabidopsis thaliana
  peptide (1)..(170): Ceres Seq. ID no. 14307590
  misc_feature (1)..(43): Pfam Name: Pfam Description:  Myb-like DNA-binding domain
  misc_feature (1)..(170): NCBI GI NO: 15238519 NR Description: myb family transcription factor
  misc_feature (1)..(170): NCBI GI NO: 11358547 NR Description: myb-related transcription factor MYB59
  misc_feature (1)..(170): NCBI GI NO: 30697277 NR Description: myb family transcription factor
  misc_feature (1)..(170): NCBI GI NO: 30697275 NR Description: myb family transcription factor
  misc_feature (1)..(108): NCBI GI NO: 15231343 NR Description: Myb family transcription factor
  misc_feature (1)..(86): NCBI GI NO: 34906070 NR Description: putative Myb factor protein
  misc_feature (1)..(86): NCBI GI NO: 11967859 NR Description: Myb factor protein
  misc_feature (57)..(165): NCBI GI NO: 15231343 NR Description: Myb family transcription factor
  misc_feature (1)..(148): NCBI GI NO: 15230123 NR Description: myb family transcription factor
  misc_feature (1)..(49): NCBI GI NO: 18395645 NR Description: myb family transcription factor(MYB116)
MTPQEERLVLELHAKWGNRWSKIARKLPGRTDNEIKNYWRTHMRKKAQEKKRPMSPTSSSSNCCSSSMTTTTTQDTGGSNGKMNQEGEDGYYSMDDIWREIDQSGANVIKPVKDNYYSEQSCYLNFPPLGCPTWESSLESIWNMDADESKMSSFAIDQFPLSFEHGSGRL

SEQ ID NO: 309 - protein, 128 aa, Arabidopsis thaliana
  peptide (1)..(128): Ceres Seq. ID no. 14307591
  misc_feature (1)..(128): NCBI GI NO: 15238519 NR Description: myb family transcription factor
  misc_feature (1)..(128): NCBI GI NO: 11358547 NR Description: myb-related transcription factor MYB59
  misc_feature (1)..(128): NCBI GI NO: 30697277 NR Description: myb family transcription factor
  misc_feature (1)..(128): NCBI GI NO: 30697275 NR Description: myb family transcription factor
  misc_feature (1)..(66): NCBI GI NO: 15231343 NR Description: Myb family transcription factor
  misc_feature (1)..(44): NCBI GI NO: 34906070 NR Description: putative Myb factor protein
  misc_feature (1)..(44): NCBI GI NO: 11967859 NR Description: Myb factor protein
  misc_feature (15)..(123): NCBI GI NO: 15231343 NR Description: Myb family transcription factor
  misc_feature (1)..(106): NCBI GI NO: 15230123 NR Description: myb family transcription factor
  misc_feature (1)..(56): NCBI GI NO: 13537530 NR Description: LhMyb [Lilium hybrid division I]
MRKKAQEKKRPMSPTSSSSNCCSSSMTTTTTQDTGGSNGKMNQEGEDGYYSMDDIWREIDQSGANVIKPVKDNYYSEQSCYLNFPPLGCPTWESSLESIWNMDADESKMSSFAIDQFPLSFEHGSGRL

SEQ ID NO: 310 - protein, 117 aa, Arabidopsis thaliana
  peptide (1)..(117): Ceres Seq. ID no. 14307592
  misc_feature (1)..(117): NCBI GI NO: 15238519 NR Description: myb family transcription factor
  misc_feature (1)..(117): NCBI GI NO: 11358547 NR Description: myb-related transcription factor MYB59
  misc_feature (1)..(117): NCBI GI NO: 30697277 NR Description: myb family transcription factor
  misc_feature (1)..(117): NCBI GI NO: 30697275 NR Description: myb family transcription factor
  misc_feature (1)..(55): NCBI GI NO: 15231343 NR Description: Myb family transcription factor
  misc_feature (1)..(33): NCBI GI NO: 34906070 NR Description: putative Myb factor protein
  misc_feature (1)..(33): NCBI GI NO: 11967859 NR Description: Myb factor protein
  misc_feature (4)..(112): NCBI GI NO: 15231343 NR Description: Myb family transcription factor
  misc_feature (1)..(95): NCBI GI NO: 15230123 NR Description: myb family transcription factor
  misc_feature (1)..(45): NCBI GI NO: 13537530 NR Description: LhMyb [Lilium hybrid division I]
MSPTSSSSNCCSSSMTTTTTQDTGGSNGKMNQEGEDGYYSMDDIWREIDQSGANVIKPVKDNYYSEQSCYLNFPPLGCPTWESSLESIWNMDADESKMSSFAIDQFPLSFEHGSGRL

SEQ ID NO: 311 - DNA, 823 bp, Arabidopsis thaliana
  misc_feature (1)..(823): Ceres Seq. ID no. 12466413
actcaaaagtgtgtgtgtgtcaaaatctctagcaccgatttttctaaataacgtcgtctcacagtcacacacacacagctctaaaatccctctacgaggtttttcttcaaactcgccgaaaaatctaatctttacgaagacccagatcggcggatctagagttgaaatggcgagacacacggcggcgctgaagatcgggctagctttactggggctgagcatggctggttacattcttggtccgcctctctactggcatctcactgaggctttggccgccgtttccgcctcctcttgtccttcttgcccctgtgaatgctctacctattccgctgtcaccattcccaaagagctcagtaatgcttcttttgctgattgtgcaaagcacgatccagaggtgaacgaagacactgagaagaactatgctgaacttcttaccgaggaactgaagctgcgtgaagcagaatctttagagaaacacaaacgagcagacatggggctattggaggccaagaaggtaacttcttcataccaaaaggaagcagataagtgcaactcgggtatggaaacatgcgaagaagctcgagaaaaagcagaattagcactcgccgagcagaaaaagctaacatctaggtgggaagagagagctcgccaaaaaggatggagagaaggttccaccaagccaaatgttaaatccaaaagcaatgttcaggttgcttaggatacccaaggatcagcaaaaagatcttagttacaaaccactcgtgtaattgtttgtgaattggatgctaacaatatagtgtcaactattattatactttcc

SEQ ID NO: 312 - protein, 239 aa, Arabidopsis thaliana
  peptide (1)..(239): Ceres Seq. ID no. 12466414
  misc_feature (56)..(239): NCBI GI NO: 18390477 NR Description: expressed protein; protein id: At1g05070
  misc_feature (56)..(239): NCBI GI NO: 25364108 NR Description: hypothetical protein
  misc_feature (56)..(239): NCBI GI NO: 18403016 NR Description: expressed protein; protein id: At2g32580
  misc_feature (56)..(239): NCBI GI NO: 21553781 NR Description: unknown [Arabidopsis thaliana]
  misc_feature (56)..(239): NCBI GI NO: 7487433 NR Description: hypothetical protein At2g32580
  misc_feature (63)..(237): NCBI GI NO: 27922919 NR Description: unknown protein [Phytophthora sojae]
  misc_feature (67)..(229): NCBI GI NO: 34897026 NR Description: unknown protein
  misc_feature (67)..(224): NCBI GI NO: 18417716 NR Description: Expressed protein; protein id: At4g30996
  misc_feature (67)..(224): NCBI GI NO: 25407700 NR Description: hypothetical protein AT4g30990
  misc_feature (56)..(224): NCBI GI NO: 18400504 NR Description: expressed protein; protein id: At2g24290
LKSVCVSKSLAPIFLNNVVSQSHTHSSKIPLRGFSSNSPKNLIFTKTQIGGSRVEMARHTAALKIGLALLGLSMAGYILGPPLYWHLTEALAAVSASSCPSCPCECSTYSAVTIPKELSNASFADCAKHDPEVNEDTEKNYAELLTEELKLREAESLEKHKRADMGLLEAKKVTSSYQKEADKCNSGMETCEEAREKAELALAEQKKLTSRWEERARQKGWREGSTKPNVKSKSNVQVA

SEQ ID NO: 313 - protein, 184 aa, Arabidopsis thaliana
  peptide (1)..(184): Ceres Seq. ID no. 12466415
  misc_feature (1)..(184): NCBI GI NO: 18390477 NR Description: expressed protein; protein id: At1g05070
  misc_feature (1)..(184): NCBI GI NO: 25364108 NR Description: hypothetical protein
  misc_feature (1)..(184): NCBI GI NO: 18403016 NR Description: expressed protein; protein id: At2g32580
  misc_feature (1)..(184): NCBI GI NO: 21553781 NR Description: unknown [Arabidopsis thaliana]
  misc_feature (1)..(184): NCBI GI NO: 7487433 NR Description: hypothetical protein At2g32580
  misc_feature (8)..(182): NCBI GI NO: 27922919 NR Description: unknown protein [Phytophthora sojae]
  misc_feature (12)..(174): NCBI GI NO: 34897026 NR Description: unknown protein
  misc_feature (12)..(169): NCBI GI NO: 18417716 NR Description: Expressed protein; protein id: At4g30996
  misc_feature (12)..(169): NCBI GI NO: 25407700 NR Description: hypothetical protein AT4g30990
  misc_feature (1)..(169): NCBI GI NO: 18400504 NR Description: expressed protein; protein id: At2g24290
MARHTAALKIGLALLGLSMAGYILGPPLYWHLTEALAAVSASSCPSCPCECSTYSAVTIPKELSNASFADCAKHDPEVNEDTEKNYAELLTEELKLREAESLEKHKRADMGLLEAKKVTSSYQKEADKCNSGMETCEEAREKAELALAEQKKLTSRWEERARQKGWREGSTKPNVKSKSNVQVA

SEQ ID NO: 314 - protein, 166 aa, Arabidopsis thaliana
  peptide (1)..(166): Ceres Seq. ID no. 12466416
  misc_feature (1)..(166): NCBI GI NO: 18390477 NR Description: expressed protein; protein id: At1g05070
  misc_feature (1)..(166): NCBI GI NO: 25364108 NR Description: hypothetical protein
  misc_feature (1)..(166): NCBI GI NO: 18403016 NR Description: expressed protein; protein id: At2g32580
  misc_feature (1)..(166): NCBI GI NO: 21553781 NR Description: unknown [Arabidopsis thaliana]
  misc_feature (1)..(166): NCBI GI NO: 7487433 NR Description: hypothetical protein At2g32580
  misc_feature (1)..(164): NCBI GI NO: 27922919 NR Description: unknown protein [Phytophthora sojae]
  misc_feature (1)..(156): NCBI GI NO: 34897026 NR Description: unknown protein
  misc_feature (1)..(151): NCBI GI NO: 18417716 NR Description: Expressed protein; protein id: At4g30996
  misc_feature (1)..(151): NCBI GI NO: 25407700 NR Description: hypothetical protein AT4g30990
  misc_feature (1)..(151): NCBI GI NO: 18400504 NR Description: expressed protein; protein id: At2g24290
MAGYILGPPLYWHLTEALAAVSASSCPSCPCECSTYSAVTIPKELSNASFADCAKHDPEVNEDTEKNYAELLTEELKLREAESLEKHKRADMGLLEAKKVTSSYQKEADKCNSGMETCEEAREKAELALAEQKKLTSRWEERARQKGWREGSTKPNVKSKSNVQVA

SEQ ID NO: 315 - DNA, 935 bp, Arabidopsis thaliana
  misc_feature (1)..(935): Ceres Seq. ID no. 13593310
  misc_feature (828)..(828): n is a, c, t, g, unknown, or other
aatttcattttcaatgttaccaacacgagctcagattttcatacaccaatttttctatatgcatcgttatacacagaagcagtcgcggatctcaatttcaggtgtttgcgattccgatttaggtttgatcggttgaaattttttccgatggtggatcattaccaagttctaggcgttacgagaaacgcgacgaagaaggaggttaaagatgcgtttaggagattggcgattaagtatcatccggataagcacgctcagtctccggagcatgttcgtcataacgccaccgtgcggtttaagcttgtatcggaggcgtacgaagttttgaatgatgatctgaaacgcgcgtcttataacgctggtagcgattctgattgctttcgccgtacgagcggttcgtatagtaatccgtatggaaatcgtggtggcagagcgcaaggttctggttacggttatggttatggttactctacgaggaatcgtcaggcctctagcttcagcagcgggtttgattcgacgtttcgttatttgactacgcgagcgtttctattgaatctcgcattagctggtggtctgtactttgcgtttactgcgattgatacaagcggagaaacactatggaaaatgcgtaactcaggggtgagtatcatattttccatcaatgatcgtgttaagctattggctgtgttgataatttgcattcttgcctttttttatcctgtgatatacatacattggtgtttttaactggggtttttttcctgttgatggatgcattttagtgtatgagttctcaaatttatcaaattgaacttcttgtgaactaanaaaaaaaaaaaaaaaaaaaaaaaaaaaaaaaaaaaaaaaaaaaaaaaaaaaaaaaaaaaaaaaaaaaaaaggtttttcgatcccgccaacctcgagggggggcccgg

SEQ ID NO: 316 - protein, 248 aa, Arabidopsis thaliana
  peptide (1)..(248): Ceres Seq. ID no. 13593311
  misc_feature (52)..(122): Pfam Name: Pfam Description:  DnaJ domain
  misc_feature (24)..(215): NCBI GI NO: 30688494 NR Description: DnaJ protein family [Arabidopsis thaliana]
  misc_feature (24)..(214): NCBI GI NO: 7487626 NR Description: probable DnaJ protein
  misc_feature (50)..(215): NCBI GI NO: 30102570 NR Description: At2g41000 [Arabidopsis thaliana]
  misc_feature (50)..(138): NCBI GI NO: 23503241 NR Description: DnaJ homolog, subfamily B, member 8 [Homo sapiens]
  misc_feature (52)..(178): NCBI GI NO: 18858081 NR Description: CG2887-PA [Drosophila melanogaster]
  misc_feature (52)..(170): NCBI GI NO: 23474964 NR Description: hypothetical protein
  misc_feature (50)..(138): NCBI GI NO: 38566154 NR Description: DnaJ homolog subfamily B member 6
  misc_feature (52)..(123): NCBI GI NO: 3033531 NR Description: tetratricopeptide repeat protein
  misc_feature (8)..(123): NCBI GI NO: 40215983 NR Description: GM02532p [Drosophila melanogaster]
  misc_feature (52)..(139): NCBI GI NO: 22972332 NR Description: hypothetical protein [Chloroflexus aurantiacus]
NFIFNVTNTSSDFHTPIFLYASLYTEAVADLNFRCLRFRFRFDRLKFFPMVDHYQVLGVTRNATKKEVKDAFRRLAIKYHPDKHAQSPEHVRHNATVRFKLVSEAYEVLNDDLKRASYNAGSDSDCFRRTSGSYSNPYGNRGGRAQGSGYGYGYGYSTRNRQASSFSSGFDSTFRYLTTRAFLLNLALAGGLYFAFTAIDTSGETLWKMRNSGVSIIFSINDRVKLLAVLIICILAFFYPVIYIHWCF

SEQ ID NO: 317 - protein, 199 aa, Arabidopsis thaliana
  peptide (1)..(199): Ceres Seq. ID no. 13593312
  misc_feature (3)..(73): Pfam Name: Pfam Description:  DnaJ domain
  misc_feature (1)..(166): NCBI GI NO: 30688494 NR Description: DnaJ protein family [Arabidopsis thaliana]
  misc_feature (1)..(165): NCBI GI NO: 7487626 NR Description: probable DnaJ protein
  misc_feature (1)..(166): NCBI GI NO: 30102570 NR Description: At2g41000 [Arabidopsis thaliana]
  misc_feature (1)..(89): NCBI GI NO: 23503241 NR Description: DnaJ homolog, subfamily B, member 8 [Homo sapiens]
  misc_feature (3)..(129): NCBI GI NO: 18858081 NR Description: CG2887-PA [Drosophila melanogaster]
  misc_feature (3)..(121): NCBI GI NO: 23474964 NR Description: hypothetical protein
  misc_feature (1)..(89): NCBI GI NO: 38566154 NR Description: DnaJ homolog subfamily B member 6
  misc_feature (3)..(74): NCBI GI NO: 3033531 NR Description: tetratricopeptide repeat protein
  misc_feature (1)..(74): NCBI GI NO: 40215983 NR Description: GM02532p [Drosophila melanogaster]
  misc_feature (3)..(90): NCBI GI NO: 22972332 NR Description: hypothetical protein [Chloroflexus aurantiacus]
MVDHYQVLGVTRNATKKEVKDAFRRLAIKYHPDKHAQSPEHVRHNATVRFKLVSEAYEVLNDDLKRASYNAGSDSDCFRRTSGSYSNPYGNRGGRAQGSGYGYGYGYSTRNRQASSFSSGFDSTFRYLTTRAFLLNLALAGGLYFAFTAIDTSGETLWKMRNSGVSIIFSINDRVKLLAVLIICILAFFYPVIYIHWCF

SEQ ID NO: 318 - DNA, 1002 bp, Arabidopsis thaliana
  misc_feature (1)..(1002): Ceres Seq. ID no. 12333459
acattttcagctgctcataaaccctaaaaatcctctctttttctcaaccttgattcttagccatggagttctggggaattgaagttaaatcaggaaagccagttacagtgactcctgaagaaggcattcttatccacgtttctcaggcatcgcttggagaatgtaaaaacaagaagggagagtttgtgcctttacatgtaaaggttgggaaccagaacttggttctgggaactctatcgactgagaacatccctcagcttttctgtgatttggtattcgacaaggagtttgagctttctcacacttggggaaaaggaagtgtttactttgttggatacaaaactcccaacattgagccacaaggctattctgaggaagaagaggaagaagaggaagaagaggaagaagttcctgctgggaatgctgccaaggctgtagctaaaccaaaggctaagcctgcagaagtgaagccagctgttgatgatgaagaggatgagtctgattctgacggaatggatgaagatgattctgatggtgaggattctgaggaagaagagcctacacctaagaagcctgcatcaagcaagaagagagctaatgaaactacccctaaagcacctgtgtcagcaaagaaggcgaaagtagcagttactcctcagaaaacagatgagaagaagaaagggggaaaggctgcaaaccagagcccaaagtcggccagtcaagtctcatgtggttcatgcaagaagactttcaactcagggaatgcacttgagtctcacaacaaggccaagcacgctgctgccaagtgaagtggtttcttattagagcttgtgatttctatggaattttgcctgtagtctttatgaaaccttcggattttcttatattttcttttgataacaagagtcttaatgaaagagagccagttggagtcttattaccactatatttcaacattctatcttggctcaaatgtgttaattttagattcacgttttcacc

SEQ ID NO: 319 - protein, 248 aa, Arabidopsis thaliana
  peptide (1)..(248): Ceres Seq. ID no. 12333460
  misc_feature (83)..(178): Pfam Name: Pfam Description:  Nucleoplasmin
  misc_feature (1)..(248): NCBI GI NO: 18407844 NR Description: putative histone deacetylase
  misc_feature (1)..(247): NCBI GI NO: 2392769 NR Description: putative histone deacetylase
  misc_feature (1)..(225): NCBI GI NO: 33667906 NR Description: histone deacetylase [Solanum chacoense]
  misc_feature (1)..(246): NCBI GI NO: 30688577 NR Description: histone deacetylase-related protein
  misc_feature (1)..(220): NCBI GI NO: 25352191 NR Description: probable histone deacetylase (EC 3.5.1.-)
  misc_feature (1)..(224): NCBI GI NO: 30680179 NR Description: histone deacetylase -related protein
  misc_feature (1)..(219): NCBI GI NO: 7804963 NR Description: putative histone deacetylase HD2c
  misc_feature (1)..(214): NCBI GI NO: 7804960 NR Description: putative histone deacetylase HD2 [Oryza sativa]
  misc_feature (1)..(219): NCBI GI NO: 11282318 NR Description: histone deacetylase-like protein
  misc_feature (1)..(246): NCBI GI NO: 7716948 NR Description: histone deacetylase 2 isoform b [Zea mays]
MEFWGIEVKSGKPVTVTPEEGILIHVSQASLGECKNKKGEFVPLHVKVGNQNLVLGTLSTENIPQLFCDLVFDKEFELSHTWGKGSVYFVGYKTPNIEPQGYSEEEEEEEEEEEEVPAGNAAKAVAKPKAKPAEVKPAVDDEEDESDSDGMDEDDSDGEDSEEEEPTPKKPASSKKRANETTPKAPVSAKKAKVAVTPQKTDEKKKGGKAANQSPKSASQVSCGSCKKTFNSGNALESHNKAKHAAAK

SEQ ID NO: 320 - DNA, 1066 bp, Arabidopsis thaliana
  misc_feature (1)..(1066): Ceres Seq. ID no. 13645959
gatttttcgatttgagcacgacgattcactaatttcgttcttgtttccattttgaaaatttgatgaagaagaaatggacaatcacaatgaagaaccaaacatcgcaccagaacctaatcgttggtacaacattacgttaggaccatctctactcaacaacaatcactcatactctcccaaattctgcactttacgatatgagtttaaacctgcttcaattgacagtactaaaccaggattgttacataagagtaaagacaataaggttacgttagagtttcaaaacaatcaacttaataaacccaaagttagatttgatggtgttagtgaggattacaatgacagagataaagatgcagttctcttctttgatggcgaaaatttccgattggagaagcttcaccgctctgttaagcgtttgaaatatttacgtgttcctgatgaatctgcttcagctagtagagtagtatcaaaggttgttcctccagttgcaaacacagttaaaccggttaagatggcacaaattgatattaacaatcctgttgactttgaggaggatgtgaacattgatgatgatggtgaagatgacaatgatggacaagaatcagtaaaagaagaaactttattgagaaaggaatttcaaacgggtggtcttgacattgacattaaccttccgcatcctgctgaaatggaagatgatgagattgcagttgtagacattaatgatgacgaatcttacagaggtcttaacgcggcagaagcactcagagcgcaagtaaatgcagaagcgagagaggagtctcgaaagagttcgagttcaggcagcggaagagaaagtgagagcagtgaaagtggagttgagagtagtggtagcggaagtagtagtagcagtgaaagcagaaacagaggtagtgaaggtggaaccgctagcgagagcggaagccgagatagtctctaggtcagcagctatgtatgtattttctagtttttgtcctgttaatgttaagtcttcttgtgaacaacatagtgaaaaatacagagatatagtaaaaatgttaactacctc

SEQ ID NO: 321 - protein, 294 aa, Arabidopsis thaliana
  peptide (1)..(294): Ceres Seq. ID no. 13645960
  misc_feature (1)..(294): NCBI GI NO: 15240826 NR Description: hypothetical protein [Arabidopsis thaliana]
  misc_feature (7)..(292): NCBI GI NO: 34914534 NR Description: OSJNBa0094H06.13
  misc_feature (1)..(293): NCBI GI NO: 18409756 NR Description: expressed protein [Arabidopsis thaliana]
  misc_feature (140)..(292): NCBI GI NO: 34914534 NR Description: OSJNBa0094H06.13
  misc_feature (105)..(287): NCBI GI NO: 18409756 NR Description: expressed protein [Arabidopsis thaliana]
MDNHNEEPNIAPEPNRWYNITLGPSLLNNNHSYSPKFCTLRYEFKPASIDSTKPGLLHKSKDNKVTLEFQNNQLNKPKVRFDGVSEDYNDRDKDAVLFFDGENFRLEKLHRSVKRLKYLRVPDESASASRVVSKVVPPVANTVKPVKMAQIDINNPVDFEEDVNIDDDGEDDNDGQESVKEETLLRKEFQTGGLDIDINLPHPAEMEDDEIAVVDINDDESYRGLNAAEALRAQVNAEAREESRKSSSSGSGRESESSESGVESSGSGSSSSSESRNRGSEGGTASESGSRDSL

SEQ ID NO: 322 - protein, 147 aa, Arabidopsis thaliana
  peptide (1)..(147): Ceres Seq. ID no. 13645961
  misc_feature (1)..(147): NCBI GI NO: 15240826 NR Description: hypothetical protein [Arabidopsis thaliana]
  misc_feature (1)..(145): NCBI GI NO: 34914534 NR Description: OSJNBa0094H06.13
  misc_feature (1)..(146): NCBI GI NO: 18409756 NR Description: expressed protein [Arabidopsis thaliana]
  misc_feature (1)..(145): NCBI GI NO: 34914534 NR Description: OSJNBa0094H06.13
  misc_feature (1)..(140): NCBI GI NO: 18409756 NR Description: expressed protein [Arabidopsis thaliana]
MAQIDINNPVDFEEDVNIDDDGEDDNDGQESVKEETLLRKEFQTGGLDIDINLPHPAEMEDDEIAVVDINDDESYRGLNAAEALRAQVNAEAREESRKSSSSGSGRESESSESGVESSGSGSSSSSESRNRGSEGGTASESGSRDSL

SEQ ID NO: 323 - DNA, 1173 bp, Arabidopsis thaliana
  misc_feature (1)..(1173): Ceres Seq. ID no. 13592859
aaaacagagcaagcaaaaaccctttaatcattcattcagtcaccaaatctcttgttctgtttttctgtctctctgcttcagtgttcttcgcggcctttaccagtttttcagttctttgacgagcttctttcattggtcctgaactcagggttagagcagcatttgcatatatacaaggtgttttggtgacaattgatagactctaagatgggttctgggaatttgattaaggcaataattagattgaagaagagtaaacaaggaactgaaaagaaaaaactagtgctgtgaaaccaaaaaaaggttccaagaagaagggtacatcactagttactcgtagtgaggattgggctgctactcggattcagactgcttttaaagcctataaggctagaaaaagcttacggcgtctaaaaggaattgcaagagcaaagttatcaactgagaaacaatctgtgaagaaccaagctgtggtcacattgaggtatcttcactcatggagtaaaatacagtcagagataaaggctcgccgagtttgcatggtaaccgaatggcgactgaagaataaaagattagagcatcagcaaaagcttgaggcaaagcttcatgatgttgaggttgaatggaatggtgggtcagagacaaaagatgaaatcttggagaggatacttcaaagggaagaagcgacgattaagcgagaaagagccttggcatatgctttctctcatcagtggaaagctgatggtaagactcagtggttgggaagttatgagctaggaaacactaattggggttggagctggaaagagcgttggatatctgctcggccttgggaagtaagatattcagtgactcctaagaaaccaaagagctcaaagacagactcaaattcaccagcaaagagaacagtgtcattatcatcagttccagccaaaactccgtttcctggagctagaaacacagtgaaaccgcggagattgtcatttccaggtgcttgaagtgaagttaaactttgtttgcatctaaagagtatacacgtacacttgaagatttgagggtatatttatttggtctatgttctgtctctggtgtgatgtaaatacatgtatttgttatgtaggcaacgacctttgtgatttttcgtttgttttaatacatgctactgtttgtctc

SEQ ID NO: 324 - protein, 152 aa, Arabidopsis thaliana
  peptide (1)..(152): Ceres Seq. ID no. 13592860
  misc_feature (1)..(152): NCBI GI NO: 15226186 NR Description: SF16 protein {Helianthus annuus} -related
  misc_feature (1)..(130): NCBI GI NO: 15232474 NR Description: expressed protein [Arabidopsis thaliana]
  misc_feature (1)..(101): NCBI GI NO: 15225258 NR Description: SF16 protein {Helianthus annuus} -related
  misc_feature (1)..(142): NCBI GI NO: 15233296 NR Description: hypothetical protein [Arabidopsis thaliana]
  misc_feature (1)..(142): NCBI GI NO: 11994738 NR Description: contains similarity to SF16 protein~gene_id:MKA23
  misc_feature (1)..(125): NCBI GI NO: 15982840 NR Description: AT5g03040/F15A17_70 [Arabidopsis thaliana]
  misc_feature (1)..(99): NCBI GI NO: 18414094 NR Description: expressed protein [Arabidopsis thaliana]
  misc_feature (1)..(150): NCBI GI NO: 15231175 NR Description: expressed protein [Arabidopsis thaliana]
  misc_feature (1)..(140): NCBI GI NO: 15232741 NR Description: SF16 protein -related [Arabidopsis thaliana]
  misc_feature (1)..(147): NCBI GI NO: 15225299 NR Description: SF16 protein {Helianthus annuus} -related
MVTEWRLKNKRLEHQQKLEAKLHDVEVEWNGGSETKDEILERILQREEATIKRERALAYAFSHQWKADGKTQWLGSYELGNTNWGWSWKERWISARPWEVRYSVTPKKPKSSKTDSNSPAKRTVSLSSVPAKTPFPGARNTVKPRRLSFPGA

SEQ ID NO: 325 - DNA, 1205 bp, Arabidopsis thaliana
  misc_feature (1)..(1205): Ceres Seq. ID no. 13592803
agatttcaaattttcatttcttgagtgataatttcagttattgatctgtgcgttcatcaatggaggtttcttctttctccactgtacccagatactgtaactcacgctcctttgttccagaattgtctcgtttcaggggattcaaagttcacttatgggaccaatctcttgttcctcttcatttcagcattcgaaaacgaaagaacacccctcgttatttgatttcttgcagtcagaagaaagatgtcactgttgttgatggaagttgtatggatgagatctatgataagttggcggaacgtcttgtccctacagcagcggcaatgtttagccccaatcttaaacgtttggtcggtttggctggtcctcctggtgccgggaaaagtacagtagcaaatgaagttgtgcgtcgtgtaaataagctatggcctcagaaagctgcttcttttgatgctgaggttaatccaccggatgttgctatagtacttcccatggatggtttccatttgtatcgttcgcaactcgatgctatggaggatcccaaagaagcccatgcgagaagaggggctccgtggacttttgatcctgcactactgcttaactgtttaaagaagctgaaaaacgagggctcagtttatgtgccatcattcgatcatggagttggggatccagttgaagatgatatctttgttagcctccagcataaagtggtaattgtagaaggaaactacatcttgttagaagaagggtcttggaaagacatctcagatatgtttgatgagaaatggttcatcgatgtgaatctcgatacagcaatgcaacgtgttgaaaaccggcatatctcaactggtaaacccccagatgttgctaaatggcgggtggattataatgaccgacccaacgcagagctgataataaagtcaaagacaaacgctgatctactgatcagatctatgaacatttgaatctactttcaagggggctattggacgaaacagaataagatgaataacaaaagacaatgttgcgcttcaagggaagattgcctttggtctacaatgtctttttcttgcaacggaaacttccaataagcaatttgttcgcagtaaactgtgtatgctagtgttctctgcatactcacggattttgttcagacaatgtgttttatacttctaaattagaagttctaatgcataaagtgtttg

SEQ ID NO: 326 - protein, 301 aa, Arabidopsis thaliana
  peptide (1)..(301): Ceres Seq. ID no. 15221162
  misc_feature (97)..(301): Pfam Name: Pfam Description:  Phosphoribulokinase / Uridine kinase family
  misc_feature (7)..(301): NCBI GI NO: 15218676 NR Description: expressed protein [Arabidopsis thaliana]
  misc_feature (1)..(169): NCBI GI NO: 25363622 NR Description: hypothetical protein F10O3
  misc_feature (192)..(301): NCBI GI NO: 25363622 NR Description: hypothetical protein F10O3
  misc_feature (93)..(298): NCBI GI NO: 40741109 NR Description: hypothetical protein AN4382.2
  misc_feature (75)..(301): NCBI GI NO: 19113880 NR Description: similarity to uridine kinase
  misc_feature (92)..(283): NCBI GI NO: 38108268 NR Description: hypothetical protein MG02303.4
  misc_feature (140)..(285): NCBI GI NO: 40740541 NR Description: hypothetical protein AN8109.2
  misc_feature (97)..(296): NCBI GI NO: 23500977 NR Description: kinase-related protein [Brucella suis 1330]
  misc_feature (97)..(296): NCBI GI NO: 17988166 NR Description: PANTOTHENATE KINASE [Brucella melitensis]
  misc_feature (76)..(296): NCBI GI NO: 29830362 NR Description: hypothetical protein
MEVSSFSTVPRYCNSRSFVPELSRFRGFKVHLWDQSLVPLHFSIRKRKNTPRYLISCSQKKDVTVVDGSCMDEIYDKLAERLVPTAAAMFSPNLKRLVGLAGPPGAGKSTVANEVVRRVNKLWPQKAASFDAEVNPPDVAIVLPMDGFHLYRSQLDAMEDPKEAHARRGAPWTFDPALLLNCLKKLKNEGSVYVPSFDHGVGDPVEDDIFVSLQHKVVIVEGNYILLEEGSWKDISDMFDEKWFIDVNLDTAMQRVENRHISTGKPPDVAKWRVDYNDRPNAELIIKSKTNADLLIRSMNI

SEQ ID NO: 327 - protein, 231 aa, Arabidopsis thaliana
  peptide (1)..(231): Ceres Seq. ID no. 15221163
  misc_feature (27)..(231): Pfam Name: Pfam Description:  Phosphoribulokinase / Uridine kinase family
  misc_feature (1)..(231): NCBI GI NO: 15218676 NR Description: expressed protein [Arabidopsis thaliana]
  misc_feature (1)..(99): NCBI GI NO: 25363622 NR Description: hypothetical protein F10O3
  misc_feature (122)..(231): NCBI GI NO: 25363622 NR Description: hypothetical protein F10O3
  misc_feature (23)..(228): NCBI GI NO: 40741109 NR Description: hypothetical protein AN4382.2
  misc_feature (5)..(231): NCBI GI NO: 19113880 NR Description: similarity to uridine kinase
  misc_feature (22)..(213): NCBI GI NO: 38108268 NR Description: hypothetical protein MG02303.4
  misc_feature (70)..(215): NCBI GI NO: 40740541 NR Description: hypothetical protein AN8109.2
  misc_feature (27)..(226): NCBI GI NO: 23500977 NR Description: kinase-related protein [Brucella suis 1330]
  misc_feature (27)..(226): NCBI GI NO: 17988166 NR Description: PANTOTHENATE KINASE [Brucella melitensis]
  misc_feature (6)..(226): NCBI GI NO: 29830362 NR Description: hypothetical protein
MDEIYDKLAERLVPTAAAMFSPNLKRLVGLAGPPGAGKSTVANEVVRRVNKLWPQKAASFDAEVNPPDVAIVLPMDGFHLYRSQLDAMEDPKEAHARRGAPWTFDPALLLNCLKKLKNEGSVYVPSFDHGVGDPVEDDIFVSLQHKVVIVEGNYILLEEGSWKDISDMFDEKWFIDVNLDTAMQRVENRHISTGKPPDVAKWRVDYNDRPNAELIIKSKTNADLLIRSMNI

SEQ ID NO: 328 - protein, 213 aa, Arabidopsis thaliana
  peptide (1)..(213): Ceres Seq. ID no. 15221164
  misc_feature (9)..(213): Pfam Name: Pfam Description:  Phosphoribulokinase / Uridine kinase family
  misc_feature (1)..(213): NCBI GI NO: 15218676 NR Description: expressed protein [Arabidopsis thaliana]
  misc_feature (1)..(81): NCBI GI NO: 25363622 NR Description: hypothetical protein F10O3
  misc_feature (104)..(213): NCBI GI NO: 25363622 NR Description: hypothetical protein F10O3
  misc_feature (5)..(210): NCBI GI NO: 40741109 NR Description: hypothetical protein AN4382.2
  misc_feature (1)..(213): NCBI GI NO: 19113880 NR Description: similarity to uridine kinase
  misc_feature (4)..(195): NCBI GI NO: 38108268 NR Description: hypothetical protein MG02303.4
  misc_feature (52)..(197): NCBI GI NO: 40740541 NR Description: hypothetical protein AN8109.2
  misc_feature (9)..(208): NCBI GI NO: 23500977 NR Description: kinase-related protein [Brucella suis 1330]
  misc_feature (9)..(208): NCBI GI NO: 17988166 NR Description: PANTOTHENATE KINASE [Brucella melitensis]
  misc_feature (1)..(208): NCBI GI NO: 29830362 NR Description: hypothetical protein
MFSPNLKRLVGLAGPPGAGKSTVANEVVRRVNKLWPQKAASFDAEVNPPDVAIVLPMDGFHLYRSQLDAMEDPKEAHARRGAPWTFDPALLLNCLKKLKNEGSVYVPSFDHGVGDPVEDDIFVSLQHKVVIVEGNYILLEEGSWKDISDMFDEKWFIDVNLDTAMQRVENRHISTGKPPDVAKWRVDYNDRPNAELIIKSKTNADLLIRSMNI

SEQ ID NO: 329 - DNA, 1573 bp, Arabidopsis thaliana
  misc_feature (1)..(1573): Ceres Seq. ID no. 13592852
tcttcttcttcctcttcccctaacattccattccccgtatgggtctcaccacttcctaactcttctctctctcttatctcttcttgttttagctatgaagaagcaatctcaattcagatccagtcacacacttctcttctttcttctctgatcatcaacaacaacgattcgggttctgtaattttactaattggagagaaaatggcgatgttagttgagccaccaaatgggattaagcaacaagggaaacattactactctatgtggcaaacattgttcgaaatcgatactaagtatgttccgattaaacccattggaagaggagcttatggtgtggtttgttcttctatcaatcgtgagactaatgagagagttgctattaaaaagattcacaatgtgtttgagaatcgtgttgatgctttgagaacgttgagggaacttaagcttcttaggcatgtgaggcatgagaatgtgatcgcgcttaaagatgttatgttgcctgctaatagatccagtttcaaggatgtttatttggtttatgagctaatggatactgatcttcatcagattattaaatcctctcagtctctttctgatgatcactgcaagtacttcttgtttcagttgcttagaggattgaagtatcttcactctgcaaacatacttcaccgggatttgaagcccgggaacctcttagttaacgcgaattgcgatctcaagatttgtgatttcgggttagcgagaacgagccaaggtaatgaacagttcatgactgagtatgtggttacacgttggtacagagcacctgagcttcttctttgttgtgataactatggaacctccattgatgtatggtcggttggttgcatattcgcggagattcttggtaggaaaccgatttttccaggaacagaatgcttgaatcagcttaagctaatcatcaacgttgttggtagccaacaagaatctgatattcggttcatagacaacccgaaagctcgaaggtttataaagtctcttccttactcaagaggaactcatctctccaatctttatccacaagccaatcctctagctatagatttgttacagaggatgcttgtgtttgatccaaccaagagaatctctgtaaccgatgcactcttacacccgtacatggcggggttgtttgatcctggatccaatccgcctgcacatgtcccaatctctttggacatagatgaaaacatggaggaaccaatgatcagagagatgatgtggaatgagatgctttattaccaccctgaagctgaaatctcaaacgcctaaatcatcatcaatgatcatcaagagtaagctttttccagttttttttgttttgctttctaaaatgcagcttcgatgttatgttatatatagcgagtccacaaacgcgggaacagatcgattaaaaccccggtgctttgatctcgtctggtttgatttagttgcagtgagtgagtagtagtaacagagtttgaaaagtggctctcagtatctttaccactttgtaaatgtggctgtttgttactaagttaaggcttgtttttgttac

SEQ ID NO: 330 - protein, 435 aa, Arabidopsis thaliana
  peptide (1)..(435): Ceres Seq. ID no. 15221173
  misc_feature (99)..(386): Pfam Name: Pfam Description:  Protein kinase domain
  misc_feature (68)..(435): NCBI GI NO: 15224120 NR Description: mitogen-activated protein kinase
  misc_feature (68)..(435): NCBI GI NO: 629548 NR Description: mitogen-activated protein kinase 7 (EC 2
  misc_feature (68)..(435): NCBI GI NO: 4887127 NR Description: putative mitogen-activated protein kinase MAPK
  misc_feature (68)..(430): NCBI GI NO: 15234397 NR Description: mitogen-activated protein kinase
  misc_feature (68)..(433): NCBI GI NO: 2499612 NR Description: MITOGEN-ACTIVATED PROTEIN KINASE HOMOLOG 1 (PMEK1)
  misc_feature (68)..(430): NCBI GI NO: 2499614 NR Description: MITOGEN-ACTIVATED PROTEIN KINASE HOMOLOG NTF3
  misc_feature (68)..(429): NCBI GI NO: 7341300 NR Description: MAP kinase MAPK2 [Oryza sativa]
  misc_feature (68)..(435): NCBI GI NO: 8132347 NR Description: MAP kinase PsMAPK2 [Pisum sativum]
  misc_feature (68)..(429): NCBI GI NO: 11869994 NR Description: MAP kinase 2 [Oryza sativa]
  misc_feature (68)..(434): NCBI GI NO: 15218451 NR Description: mitogen-activated protein kinase
SSSSSSPNIPFPVWVSPLPNSSLSLISSCFSYEEAISIQIQSHTSLLSSLIINNNDSGSVILLIGEKMAMLVEPPNGIKQQGKHYYSMWQTLFEIDTKYVPIKPIGRGAYGVVCSSINRETNERVAIKKIHNVFENRVDALRTLRELKLLRHVRHENVIALKDVMLPANRSSFKDVYLVYELMDTDLHQIIKSSQSLSDDHCKYFLFQLLRGLKYLHSANILHRDLKPGNLLVNANCDLKICDFGLARTSQGNEQFMTEYVVTRWYRAPELLLCCDNYGTSIDVWSVGCIFAEILGRKPIFPGTECLNQLKLIINVVGSQQESDIRFIDNPKARRFIKSLPYSRGTHLSNLYPQANPLAIDLLQRMLVFDPTKRISVTDALLHPYMAGLFDPGSNPPAHVPISLDIDENMEEPMIREMMWNEMLYYHPEAEISNA

SEQ ID NO: 331 - protein, 368 aa, Arabidopsis thaliana
  peptide (1)..(368): Ceres Seq. ID no. 15221174
  misc_feature (32)..(319): Pfam Name: Pfam Description:  Protein kinase domain
  misc_feature (1)..(368): NCBI GI NO: 15224120 NR Description: mitogen-activated protein kinase
  misc_feature (1)..(368): NCBI GI NO: 629548 NR Description: mitogen-activated protein kinase 7 (EC 2
  misc_feature (1)..(368): NCBI GI NO: 4887127 NR Description: putative mitogen-activated protein kinase MAPK
  misc_feature (1)..(363): NCBI GI NO: 15234397 NR Description: mitogen-activated protein kinase
  misc_feature (1)..(366): NCBI GI NO: 2499612 NR Description: MITOGEN-ACTIVATED PROTEIN KINASE HOMOLOG 1 (PMEK1)
  misc_feature (1)..(363): NCBI GI NO: 2499614 NR Description: MITOGEN-ACTIVATED PROTEIN KINASE HOMOLOG NTF3
  misc_feature (1)..(362): NCBI GI NO: 7341300 NR Description: MAP kinase MAPK2 [Oryza sativa]
  misc_feature (1)..(368): NCBI GI NO: 8132347 NR Description: MAP kinase PsMAPK2 [Pisum sativum]
  misc_feature (1)..(362): NCBI GI NO: 11869994 NR Description: MAP kinase 2 [Oryza sativa]
  misc_feature (1)..(367): NCBI GI NO: 15218451 NR Description: mitogen-activated protein kinase
MAMLVEPPNGIKQQGKHYYSMWQTLFEIDTKYVPIKPIGRGAYGVVCSSINRETNERVAIKKIHNVFENRVDALRTLRELKLLRHVRHENVIALKDVMLPANRSSFKDVYLVYELMDTDLHQIIKSSQSLSDDHCKYFLFQLLRGLKYLHSANILHRDLKPGNLLVNANCDLKICDFGLARTSQGNEQFMTEYVVTRWYRAPELLLCCDNYGTSIDVWSVGCIFAEILGRKPIFPGTECLNQLKLIINVVGSQQESDIRFIDNPKARRFIKSLPYSRGTHLSNLYPQANPLAIDLLQRMLVFDPTKRISVTDALLHPYMAGLFDPGSNPPAHVPISLDIDENMEEPMIREMMWNEMLYYHPEAEISNA

SEQ ID NO: 332 - protein, 366 aa, Arabidopsis thaliana
  peptide (1)..(366): Ceres Seq. ID no. 15221175
  misc_feature (30)..(317): Pfam Name: Pfam Description:  Protein kinase domain
  misc_feature (1)..(366): NCBI GI NO: 15224120 NR Description: mitogen-activated protein kinase
  misc_feature (1)..(366): NCBI GI NO: 629548 NR Description: mitogen-activated protein kinase 7 (EC 2
  misc_feature (1)..(366): NCBI GI NO: 4887127 NR Description: putative mitogen-activated protein kinase MAPK
  misc_feature (1)..(361): NCBI GI NO: 15234397 NR Description: mitogen-activated protein kinase
  misc_feature (1)..(364): NCBI GI NO: 2499612 NR Description: MITOGEN-ACTIVATED PROTEIN KINASE HOMOLOG 1 (PMEK1)
  misc_feature (1)..(361): NCBI GI NO: 2499614 NR Description: MITOGEN-ACTIVATED PROTEIN KINASE HOMOLOG NTF3
  misc_feature (1)..(360): NCBI GI NO: 7341300 NR Description: MAP kinase MAPK2 [Oryza sativa]
  misc_feature (1)..(366): NCBI GI NO: 8132347 NR Description: MAP kinase PsMAPK2 [Pisum sativum]
  misc_feature (1)..(360): NCBI GI NO: 11869994 NR Description: MAP kinase 2 [Oryza sativa]
  misc_feature (1)..(365): NCBI GI NO: 15218451 NR Description: mitogen-activated protein kinase
MLVEPPNGIKQQGKHYYSMWQTLFEIDTKYVPIKPIGRGAYGVVCSSINRETNERVAIKKIHNVFENRVDALRTLRELKLLRHVRHENVIALKDVMLPANRSSFKDVYLVYELMDTDLHQIIKSSQSLSDDHCKYFLFQLLRGLKYLHSANILHRDLKPGNLLVNANCDLKICDFGLARTSQGNEQFMTEYVVTRWYRAPELLLCCDNYGTSIDVWSVGCIFAEILGRKPIFPGTECLNQLKLIINVVGSQQESDIRFIDNPKARRFIKSLPYSRGTHLSNLYPQANPLAIDLLQRMLVFDPTKRISVTDALLHPYMAGLFDPGSNPPAHVPISLDIDENMEEPMIREMMWNEMLYYHPEAEISNA

SEQ ID NO: 333 - DNA, 1058 bp, Arabidopsis thaliana
  misc_feature (1)..(1058): Ceres Seq. ID no. 13646157
agaacatcctaatcgaaaaaaaatcttttcatattctcggttagtagaaactaggaaaagagatgaatagaggagtgttggagagttcgccggttcaacatctcacggcggctggaaaccctaattggtggaataatgtcagccgcggcttgaggccaccaacgccgttgatgagtcacgagccgccgtctaccaccgcttttattccaagtctcttgccaaacttcttctcttctccgacttcctcttcatcttcttcaccttctttccctactcctaatagtaaccctaacttctcttcttggcttgaaatgagtgatctgcctcttgatcagccatggagccttagtcaactcctcttgggtggattgatgatgggagaggaagagaaaatggagatgatgaaccatcatcatcatcaaaatcaacaccaaagttaccaagcgaagaggatacaaaattgggaagaacaagttttgaggcaccaagcttccatgaaacaagagagtagcaataataatagttatggaataatgtcctcaccaaactcacctccaaacaaatcttgtgctacaattatcaacaccaatgaagacaacaacaataacattcacagtggtcttaacttgtccgagtgtaatagctcagagatgattgggtcttcttttgctaataagaaaccaaaacttcaagttccttcatcacaatcaactctcaaggtgagaaaggagaaacttggaggcagaatagcatctcttcaccagctagtatctccctttggcaagactgacacagcctctgtcttgtcggaggctattggatacattagattcctccacagtcaaattgaggctttaagtctaccatactttggtactccctcgaggaacaatatgatgcaccaacatgcacaaagaaatatgaatggtatatttcctgaggaccctggtcaggtacgcacatatatttttttactttctagttttatatactttactttttattggatcaattaaacccaaatctcaatttaaaaaaaataaatacttgccagcttt

SEQ ID NO: 334 - protein, 317 aa, Arabidopsis thaliana
  peptide (1)..(317): Ceres Seq. ID no. 15219040
  misc_feature (219)..(259): Pfam Name: Pfam Description:  Helix-loop-helix DNA-binding domain
  misc_feature (1)..(298): NCBI GI NO: 33111977 NR Description: putative bHLH133 transcription factor
  misc_feature (1)..(202): NCBI GI NO: 15225300 NR Description: hypothetical protein [Arabidopsis thaliana]
  misc_feature (1)..(262): NCBI GI NO: 15233452 NR Description: bHLH068 putative bHLH transcription factor
  misc_feature (1)..(262): NCBI GI NO: 11045087 NR Description: putative protein [Brassica napus]
  misc_feature (106)..(298): NCBI GI NO: 15233452 NR Description: bHLH068 putative bHLH transcription factor
  misc_feature (174)..(300): NCBI GI NO: 11045087 NR Description: putative protein [Brassica napus]
  misc_feature (203)..(276): NCBI GI NO: 15217667 NR Description: hypothetical protein [Arabidopsis thaliana]
  misc_feature (172)..(273): NCBI GI NO: 21740790 NR Description: OSJNBb0091E11.4
  misc_feature (153)..(281): NCBI GI NO: 30696595 NR Description: expressed protein [Arabidopsis thaliana]
  misc_feature (153)..(281): NCBI GI NO: 18407276 NR Description: expressed protein [Arabidopsis thaliana]
MNRGVLESSPVQHLTAAGNPNWWNNVSRGLRPPTPLMSHEPPSTTAFIPSLLPNFFSSPTSSSSSSPSFPTPNSNPNFSSWLEMSDLPLDQPWSLSQLLLGGLMMGEEEKMEMMNHHHHQNQHQSYQAKRIQNWEEQVLRHQASMKQESSNNNSYGIMSSPNSPPNKSCATIINTNEDNNNNIHSGLNLSECNSSEMIGSSFANKKPKLQVPSSQSTLKVRKEKLGGRIASLHQLVSPFGKTDTASVLSEAIGYIRFLHSQIEALSLPYFGTPSRNNMMHQHAQRNMNGIFPEDPGQVRTYIFLLSSFIYFTFYWIN

SEQ ID NO: 335 - protein, 281 aa, Arabidopsis thaliana
  peptide (1)..(281): Ceres Seq. ID no. 15219041
  misc_feature (183)..(223): Pfam Name: Pfam Description:  Helix-loop-helix DNA-binding domain
  misc_feature (1)..(262): NCBI GI NO: 33111977 NR Description: putative bHLH133 transcription factor
  misc_feature (1)..(166): NCBI GI NO: 15225300 NR Description: hypothetical protein [Arabidopsis thaliana]
  misc_feature (1)..(226): NCBI GI NO: 15233452 NR Description: bHLH068 putative bHLH transcription factor
  misc_feature (1)..(226): NCBI GI NO: 11045087 NR Description: putative protein [Brassica napus]
  misc_feature (70)..(262): NCBI GI NO: 15233452 NR Description: bHLH068 putative bHLH transcription factor
  misc_feature (138)..(264): NCBI GI NO: 11045087 NR Description: putative protein [Brassica napus]
  misc_feature (167)..(240): NCBI GI NO: 15217667 NR Description: hypothetical protein [Arabidopsis thaliana]
  misc_feature (136)..(237): NCBI GI NO: 21740790 NR Description: OSJNBb0091E11.4
  misc_feature (117)..(245): NCBI GI NO: 30696595 NR Description: expressed protein [Arabidopsis thaliana]
  misc_feature (117)..(245): NCBI GI NO: 18407276 NR Description: expressed protein [Arabidopsis thaliana]
MSHEPPSTTAFIPSLLPNFFSSPTSSSSSSPSFPTPNSNPNFSSWLEMSDLPLDQPWSLSQLLLGGLMMGEEEKMEMMNHHHHQNQHQSYQAKRIQNWEEQVLRHQASMKQESSNNNSYGIMSSPNSPPNKSCATIINTNEDNNNNIHSGLNLSECNSSEMIGSSFANKKPKLQVPSSQSTLKVRKEKLGGRIASLHQLVSPFGKTDTASVLSEAIGYIRFLHSQIEALSLPYFGTPSRNNMMHQHAQRNMNGIFPEDPGQVRTYIFLLSSFIYFTFYWIN

SEQ ID NO: 336 - protein, 234 aa, Arabidopsis thaliana
  peptide (1)..(234): Ceres Seq. ID no. 15219042
  misc_feature (136)..(176): Pfam Name: Pfam Description:  Helix-loop-helix DNA-binding domain
  misc_feature (1)..(215): NCBI GI NO: 33111977 NR Description: putative bHLH133 transcription factor
  misc_feature (1)..(119): NCBI GI NO: 15225300 NR Description: hypothetical protein [Arabidopsis thaliana]
  misc_feature (1)..(179): NCBI GI NO: 15233452 NR Description: bHLH068 putative bHLH transcription factor
  misc_feature (1)..(179): NCBI GI NO: 11045087 NR Description: putative protein [Brassica napus]
  misc_feature (23)..(215): NCBI GI NO: 15233452 NR Description: bHLH068 putative bHLH transcription factor
  misc_feature (91)..(217): NCBI GI NO: 11045087 NR Description: putative protein [Brassica napus]
  misc_feature (120)..(193): NCBI GI NO: 15217667 NR Description: hypothetical protein [Arabidopsis thaliana]
  misc_feature (89)..(190): NCBI GI NO: 21740790 NR Description: OSJNBb0091E11.4
  misc_feature (70)..(198): NCBI GI NO: 30696595 NR Description: expressed protein [Arabidopsis thaliana]
  misc_feature (70)..(198): NCBI GI NO: 18407276 NR Description: expressed protein [Arabidopsis thaliana]
MSDLPLDQPWSLSQLLLGGLMMGEEEKMEMMNHHHHQNQHQSYQAKRIQNWEEQVLRHQASMKQESSNNNSYGIMSSPNSPPNKSCATIINTNEDNNNNIHSGLNLSECNSSEMIGSSFANKKPKLQVPSSQSTLKVRKEKLGGRIASLHQLVSPFGKTDTASVLSEAIGYIRFLHSQIEALSLPYFGTPSRNNMMHQHAQRNMNGIFPEDPGQVRTYIFLLSSFIYFTFYWIN

SEQ ID NO: 337 - DNA, 1221 bp, Arabidopsis thaliana
  misc_feature (1)..(1221): Ceres Seq. ID no. 12562215
acatcaaagcaattaacaaatacacaacttgtaacttcaaatagattactttcaaagaagagagagagaaagaaagatggagaagaacatgaagtttccagtagtagacttgtccaaagctccaaattggggggaagagagagaccaaaccatggctctaatcaatgaagcttgtgagaattggggcttctttgagatagtgaaccatggattaccacatgacttaatggacaagatcgagaagatgacaaaggaccattacaagacatgccaagaacaaaagttcaatgacatgctcaagtccaaaggtttggataatcttgagacagaagtcgaagatgtcgattgggaaagcactttctacgttcgtcacctccctcaatccaatctcaatgacatttcagatgtgtctgatgaatacaggacggccatgaaagactttggtaagagactggagaatcttgctgaggatttgttggatctactgtgtgagaatctagggttagagaaagggggtatttgagaaagtgtttcatggaacaaaaggcccaacctttgggacaaaggtgagcaattatccaccatgtcctaaaccagagatgatcaaaggtcttagggcccacactgatgcaggaggcatcatcttgttgtttcaagacgacaaggtcagtggtctccagcttcttaaagatggtgactggattgatgttcctcctctcaaccactctattgtcatcaatcttggtgaccaacttgaggtgataaccaacgggaagtataagagtgtgctgcaccgtgtggtgactcaacaagaaggaaacaggatgtcggttgcatcgttttacaacccgggaagcgatgcggagatctcaccagctacttcgcttgtcgagaaagattccgagtacccgagtttcgtctttgatgactacatgaagctttatgcaggggtcaagtttcagcccaaggagccacggttcgcagcaatgaagaatgcttctgcagttacagaactgagtcctacagcagccgtagagactttctaaaaatggatttgagattcaagtgaagcagagaaagaaagatgattttgtgtgttatgtcaataagttaaaacttgtattagtgttgattaattgttggtcaattggtgtgttttaaagtgtggggtgtttatgtttatggaagatgataataattataaaaatctaaattctaagc

SEQ ID NO: 338 - protein, 148 aa, Arabidopsis thaliana
  peptide (1)..(148): Ceres Seq. ID no. 12562216
  misc_feature (1)..(84): Pfam Name: II Pfam Description: 2OG-Fe
  misc_feature (1)..(148): NCBI GI NO: 587086 NR Description: ACC oxidase [Brassica oleracea]
  misc_feature (1)..(148): NCBI GI NO: 728780 NR Description: 1-aminocyclopropane-1-carboxylate oxidase
  misc_feature (1)..(148): NCBI GI NO: 7638440 NR Description: 1-aminocyclopropane-1-carboxylate oxidase
  misc_feature (1)..(148): NCBI GI NO: 7433206 NR Description: probable 1-aminocyclopropane-1-carboxylate oxidase
  misc_feature (1)..(148): NCBI GI NO: 15221170 NR Description: putative amino-cyclopropane-carboxylic acid oxidase
  misc_feature (1)..(148): NCBI GI NO: 7433194 NR Description: probable 1-aminocyclopropane-1-carboxylate oxidase
  misc_feature (1)..(148): NCBI GI NO: 14148975 NR Description: ACC oxidase [Brassica rapa subsp. rapa]
  misc_feature (1)..(143): NCBI GI NO: 18496053 NR Description: ACC oxidase 1 [Fagus sylvatica]
  misc_feature (1)..(143): NCBI GI NO: 584711 NR Description: 1-aminocyclopropane-1-carboxylate oxidase 3
  misc_feature (1)..(143): NCBI GI NO: 1813891 NR Description: 1-aminocyclopropane-1-carboxylate oxidase
MIKGLRAHTDAGGIILLFQDDKVSGLQLLKDGDWIDVPPLNHSIVINLGDQLEVITNGKYKSVLHRVVTQQEGNRMSVASFYNPGSDAEISPATSLVEKDSEYPSFVFDDYMKLYAGVKFQPKEPRFAAMKNASAVTELSPTAAVETF

SEQ ID NO: 339 - protein, 148 aa, Arabidopsis thaliana
  peptide (1)..(148): Ceres Seq. ID no. 12562217
  misc_feature (1)..(148): NCBI GI NO: 587086 NR Description: ACC oxidase [Brassica oleracea]
  misc_feature (1)..(148): NCBI GI NO: 728780 NR Description: 1-aminocyclopropane-1-carboxylate oxidase
  misc_feature (1)..(148): NCBI GI NO: 7638440 NR Description: 1-aminocyclopropane-1-carboxylate oxidase
  misc_feature (1)..(148): NCBI GI NO: 7433206 NR Description: probable 1-aminocyclopropane-1-carboxylate oxidase
  misc_feature (1)..(146): NCBI GI NO: 15221170 NR Description: putative amino-cyclopropane-carboxylic acid oxidase
  misc_feature (1)..(148): NCBI GI NO: 7433194 NR Description: probable 1-aminocyclopropane-1-carboxylate oxidase
  misc_feature (1)..(148): NCBI GI NO: 14148975 NR Description: ACC oxidase [Brassica rapa subsp. rapa]
  misc_feature (7)..(148): NCBI GI NO: 18496053 NR Description: ACC oxidase 1 [Fagus sylvatica]
  misc_feature (7)..(148): NCBI GI NO: 584711 NR Description: 1-aminocyclopropane-1-carboxylate oxidase 3
  misc_feature (7)..(148): NCBI GI NO: 1813891 NR Description: 1-aminocyclopropane-1-carboxylate oxidase
MEKNMKFPVVDLSKAPNWGEERDQTMALINEACENWGFFEIVNHGLPHDLMDKIEKMTKDHYKTCQEQKFNDMLKSKGLDNLETEVEDVDWESTFYVRHLPQSNLNDISDVSDEYRTAMKDFGKRLENLAEDLLDLLCENLGLEKGGI

SEQ ID NO: 340 - protein, 144 aa, Arabidopsis thaliana
  peptide (1)..(144): Ceres Seq. ID no. 12562218
  misc_feature (1)..(144): NCBI GI NO: 587086 NR Description: ACC oxidase [Brassica oleracea]
  misc_feature (1)..(144): NCBI GI NO: 728780 NR Description: 1-aminocyclopropane-1-carboxylate oxidase
  misc_feature (1)..(144): NCBI GI NO: 7638440 NR Description: 1-aminocyclopropane-1-carboxylate oxidase
  misc_feature (1)..(144): NCBI GI NO: 7433206 NR Description: probable 1-aminocyclopropane-1-carboxylate oxidase
  misc_feature (1)..(142): NCBI GI NO: 15221170 NR Description: putative amino-cyclopropane-carboxylic acid oxidase
  misc_feature (1)..(144): NCBI GI NO: 7433194 NR Description: probable 1-aminocyclopropane-1-carboxylate oxidase
  misc_feature (1)..(144): NCBI GI NO: 14148975 NR Description: ACC oxidase [Brassica rapa subsp. rapa]
  misc_feature (3)..(144): NCBI GI NO: 18496053 NR Description: ACC oxidase 1 [Fagus sylvatica]
  misc_feature (3)..(144): NCBI GI NO: 584711 NR Description: 1-aminocyclopropane-1-carboxylate oxidase 3
  misc_feature (3)..(144): NCBI GI NO: 1813891 NR Description: 1-aminocyclopropane-1-carboxylate oxidase
MKFPVVDLSKAPNWGEERDQTMALINEACENWGFFEIVNHGLPHDLMDKIEKMTKDHYKTCQEQKFNDMLKSKGLDNLETEVEDVDWESTFYVRHLPQSNLNDISDVSDEYRTAMKDFGKRLENLAEDLLDLLCENLGLEKGGI

SEQ ID NO: 341 - DNA, 569 bp, Arabidopsis thaliana
  misc_feature (1)..(569): Ceres Seq. ID no. 12337669
gttgggtttcttctccctttctacatcctctctcttctcttcctctatactttcatctaatggccggcctgagatggagagagtggtggaacacgatggccttccccacccggcgtatctggaatcgtttcaccgttcgcgtcgggtttcgacacagcggacttttgagattacaacatgacgtgagttcttgcgagtatgaagacatacacataatgtggaatttgttacacaagaacgaagatcttacacgcgtaccaatccaacaacaacaacaacaacaacagaggaagaaaccttgttggaatcttcttggttcgtatctttgccaaagattctgatccgttttatgatataaaccaaaccattgttgtatttgagagagccttgacgggtcccttgcagtgtggtgtggttttattgacaaatttcgcaaataatgaatccgaggttgcagagttttaattagctgttatatattccattgcatacctctatgtacttatcatcacatgagtgttgtatatatattacaaaatgcttcacatagtttgatactacctatgttc

SEQ ID NO: 342 - protein, 112 aa, Arabidopsis thaliana
  peptide (1)..(112): Ceres Seq. ID no. 12337670
  misc_feature (20)..(112): NCBI GI NO: 15239192 NR Description: unknown protein; protein id: At5g43150.1
  misc_feature (28)..(78): NCBI GI NO: 26006485 NR Description: Unknown protein
  misc_feature (33)..(91): NCBI GI NO: 17027277 NR Description: unknown protein
  misc_feature (28)..(102): NCBI GI NO: 38344154 NR Description: OSJNBa0041A02.21
  misc_feature (33)..(112): NCBI GI NO: 34915322 NR Description: hypothetical protein~similar to Oryza sativa chromosome3
WVSSPFLHPLSSLPLYFHLMAGLRWREWWNTMAFPTRRIWNRFTVRVGFRHSGLLRLQHDVSSCEYEDIHIMWNLLHKNEDLTRVPIQQQQQQQQRKKPCWNLLGSYLCQRF

SEQ ID NO: 343 - protein, 93 aa, Arabidopsis thaliana
  peptide (1)..(93): Ceres Seq. ID no. 12337671
  misc_feature (1)..(93): NCBI GI NO: 15239192 NR Description: unknown protein; protein id: At5g43150.1
  misc_feature (9)..(59): NCBI GI NO: 26006485 NR Description: Unknown protein
  misc_feature (14)..(72): NCBI GI NO: 17027277 NR Description: unknown protein
  misc_feature (9)..(83): NCBI GI NO: 38344154 NR Description: OSJNBa0041A02.21
  misc_feature (14)..(93): NCBI GI NO: 34915322 NR Description: hypothetical protein~similar to Oryza sativa chromosome3
MAGLRWREWWNTMAFPTRRIWNRFTVRVGFRHSGLLRLQHDVSSCEYEDIHIMWNLLHKNEDLTRVPIQQQQQQQQRKKPCWNLLGSYLCQRF

SEQ ID NO: 344 - protein, 81 aa, Arabidopsis thaliana
  peptide (1)..(81): Ceres Seq. ID no. 12337672
  misc_feature (1)..(81): NCBI GI NO: 15239192 NR Description: unknown protein; protein id: At5g43150.1
  misc_feature (1)..(47): NCBI GI NO: 26006485 NR Description: Unknown protein
  misc_feature (2)..(60): NCBI GI NO: 17027277 NR Description: unknown protein
  misc_feature (1)..(71): NCBI GI NO: 38344154 NR Description: OSJNBa0041A02.21
  misc_feature (2)..(81): NCBI GI NO: 34915322 NR Description: hypothetical protein~similar to Oryza sativa chromosome3
MAFPTRRIWNRFTVRVGFRHSGLLRLQHDVSSCEYEDIHIMWNLLHKNEDLTRVPIQQQQQQQQRKKPCWNLLGSYLCQRF

SEQ ID NO: 345 - DNA, 1768 bp, Arabidopsis thaliana
  misc_feature (1)..(1768): Ceres Seq. ID no. 12327642
acaaaatagaattgatctctcttcttcattctctctcttctcgatctacccaaagtagcgggagcgaatagtaaaacaatgaccgatcaccaccaccaccaccataaccaccacgcgcggctgagccgcctccgtacaacaacacagctcctccgtcaaacaacatcttctttctcttcccaccctctcactttcatcttcctcactttcctcctcttctctttccattctctcgtcgatcattgctctctcctcttaacatctttcgtcgacagtgacccttctcttcgctctctcctctctcgactccctcttaactctcgctcccataccccgacgcgcttcaatcatcaccgacgtgctccgtttcttcagctcacgcgccttggtaccctcgacgacgacttcttctccacagacgaacacgatcctcatcgccgatcgcttcaaggctcttcctttcgttcacccatcaacgccaccactgtattcctctccggatttgagagcatttctggcttctctcgtcctatcatcgataacggacttctccttcctcagatcattcgctccggtatcgttttgcggcagcttgagaaggaagaccatggcggcgatgaagacgagacggaattggatgaatctgagctcgatcgtgaaagtgagaagaaagataaagactttgagagttttgtggatctgaagatgatttttaaaggattggagctaggacgtagtgacgcagcggctctgttcttcttggtgagctttttatcagctgcgtatggatgggtgattctagggtttacaactgtttactcattggtgttggcgattatgtttgttactgtaatcaacgatttgcttggtaggtttccttcgtttcttggggttttttggagaggttcaagattggggtttaagagagttacaggatttgttttaatgagatgggcagtgagagatgctttgacacagcttcttggtttatggtacttcggagaggttgaagatcagtactcgtttttcaggctctttgtgaggttaaagctgatgcctttcactgttatgccgccatggattagaggttttgagaaggagatatctggtttcttgttcgcttggtttctacttgatacacttgttggtttgatattagctgttgatgcgtttgttgctattgtggattcgagaaggagaggaagggagatagtgaaggaaggtttatatttgatatctcttttgttgcatcaggctgtgcagctgaagtgtcttgaagcgattctttgtgggtctttcttcagatgggttttgattcgaatggtagggaaaagctttgcttctgtgatccaatctgcgttggaagtttacttcatggcggcttggttagtgttctacttagcagctaagtgtaaagatgcacacgcagatggtaggaggtttgggagaagagaaatggagagcttgatcgatgggctgagatgataatgaattgtggatctgtaggatgagctttttgtttccaaaggagcaaaccttggcttcgatgcttaatgccagtggcgacatctctgtgctactagttgtcatgacttaggttcctttggttttagaattacagttgattgataagaattgctagcaattcgatgtatgtacgcacctaggattacttgggagctgtgaaagagggagaatgatacaactactgtgtataatcatttgcaagattttcctttgtatatatcttgctgcagtttttgatatc

SEQ ID NO: 346 - protein, 468 aa, Arabidopsis thaliana
  peptide (1)..(468): Ceres Seq. ID no. 12327643
  misc_feature (1)..(403): NCBI GI NO: 30687010 NR Description: expressed protein [Arabidopsis thaliana]
  misc_feature (417)..(468): NCBI GI NO: 30687010 NR Description: expressed protein [Arabidopsis thaliana]
  misc_feature (215)..(447): NCBI GI NO: 37535392 NR Description: hypothetical protein
MTDHHHHHHNHHARLSRLRTTTQLLRQTTSSFSSHPLTFIFLTFLLFSFHSLVDHCSLLLTSFVDSDPSLRSLLSRLPLNSRSHTPTRFNHHRRAPFLQLTRLGTLDDDFFSTDEHDPHRRSLQGSSFRSPINATTVFLSGFESISGFSRPIIDNGLLLPQIIRSGIVLRQLEKEDHGGDEDETELDESELDRESEKKDKDFESFVDLKMIFKGLELGRSDAAALFFLVSFLSAAYGWVILGFTTVYSLVLAIMFVTVINDLLGRFPSFLGVFWRGSRLGFKRVTGFVLMRWAVRDALTQLLGLWYFGEVEDQYSFFRLFVRLKLMPFTVMPPWIRGFEKEISGFLFAWFLLDTLVGLILAVDAFVAIVDSRRRGREIVKEGLYLISLLLHQAVQLKCLEAILCGSFFRWVLIRMVGKSFASVIQSALEVYFMAAWLVFYLAAKCKDAHADGRRFGRREMESLIDGLR

SEQ ID NO: 347 - protein, 259 aa, Arabidopsis thaliana
  peptide (1)..(259): Ceres Seq. ID no. 12327644
  misc_feature (1)..(194): NCBI GI NO: 30687010 NR Description: expressed protein [Arabidopsis thaliana]
  misc_feature (208)..(259): NCBI GI NO: 30687010 NR Description: expressed protein [Arabidopsis thaliana]
  misc_feature (6)..(238): NCBI GI NO: 37535392 NR Description: hypothetical protein
MIFKGLELGRSDAAALFFLVSFLSAAYGWVILGFTTVYSLVLAIMFVTVINDLLGRFPSFLGVFWRGSRLGFKRVTGFVLMRWAVRDALTQLLGLWYFGEVEDQYSFFRLFVRLKLMPFTVMPPWIRGFEKEISGFLFAWFLLDTLVGLILAVDAFVAIVDSRRRGREIVKEGLYLISLLLHQAVQLKCLEAILCGSFFRWVLIRMVGKSFASVIQSALEVYFMAAWLVFYLAAKCKDAHADGRRFGRREMESLIDGLR

SEQ ID NO: 348 - DNA, 615 bp, Arabidopsis thaliana
  misc_feature (1)..(615): Ceres Seq. ID no. 13496874
atggggacatattattcatcacaagttttaagcagtatttgtaagaaaatggcttccaagactttgcttcttttgggtctctttgcatttcttttcatcgtctcagaaatggctgccgcgggcacggtgaagtcagagagtgaggaaactgtgaaacctgaacaacatggtggtggattcggtgacaatggaggaggaagataccaaggaggaggcggccatggtggccacggagggggaggataccaaggaggaggaggacgataccaaggaggcggtgggcgacaaggaggagggggaagttactgccgccacggctgctgctacaaaggttaccatggctgctcaaggtgttgttcatatgccggagaagcggttcagactcagtctggtcactaaatctacataatatatcaaccaccatgagtgtacgatttcatttatatatacacttacgtgtgtatgtgatatgacaatacacttacgtttgtaatgaagtgccttaagtttaagaggagaaactatcggaataaagtttcataatgtaatgcctttgtgtttatttaagttgttatttgcgatgtttgcataataaagttgtttctagttgaagtt

SEQ ID NO: 349 - protein, 132 aa, Arabidopsis thaliana
  peptide (1)..(132): Ceres Seq. ID no. 13496875
  misc_feature (61)..(119): Pfam Name: Pfam Description:  Keratin
  misc_feature (17)..(132): NCBI GI NO: 18396043 NR Description: glycine-rich protein [Arabidopsis thaliana]
  misc_feature (17)..(132): NCBI GI NO: 20466662 NR Description: unknown protein [Arabidopsis thaliana]
  misc_feature (17)..(132): NCBI GI NO: 4206767 NR Description: glycine-rich protein 3 short isoform
  misc_feature (17)..(132): NCBI GI NO: 15224559 NR Description: glycine-rich protein [Arabidopsis thaliana]
  misc_feature (17)..(132): NCBI GI NO: 18266043 NR Description: glycine-rich protein [Brassica oleracea]
  misc_feature (55)..(132): NCBI GI NO: 81625 NR Description: glycine-rich protein 3 precursor
  misc_feature (55)..(132): NCBI GI NO: 259447 NR Description: glycine-rich protein; atGRP [Arabidopsis thaliana]
  misc_feature (55)..(132): NCBI GI NO: 15224548 NR Description: glycine-rich protein (GRP) [Arabidopsis thaliana]
  misc_feature (17)..(123): NCBI GI NO: 15224548 NR Description: glycine-rich protein (GRP) [Arabidopsis thaliana]
  misc_feature (17)..(123): NCBI GI NO: 259447 NR Description: glycine-rich protein; atGRP [Arabidopsis thaliana]
MGTYYSSQVLSSICKKMASKTLLLLGLFAFLFIVSEMAAAGTVKSESEETVKPEQHGGGFGDNGGGRYQGGGGHGGHGGGGYQGGGGRYQGGGGRQGGGGSYCRHGCCYKGYHGCSRCCSYAGEAVQTQSGH

SEQ ID NO: 350 - protein, 116 aa, Arabidopsis thaliana
  peptide (1)..(116): Ceres Seq. ID no. 13496876
  misc_feature (45)..(103): Pfam Name: Pfam Description:  Keratin
  misc_feature (1)..(116): NCBI GI NO: 18396043 NR Description: glycine-rich protein [Arabidopsis thaliana]
  misc_feature (1)..(116): NCBI GI NO: 20466662 NR Description: unknown protein [Arabidopsis thaliana]
  misc_feature (1)..(116): NCBI GI NO: 4206767 NR Description: glycine-rich protein 3 short isoform
  misc_feature (1)..(116): NCBI GI NO: 15224559 NR Description: glycine-rich protein [Arabidopsis thaliana]
  misc_feature (1)..(116): NCBI GI NO: 18266043 NR Description: glycine-rich protein [Brassica oleracea]
  misc_feature (39)..(116): NCBI GI NO: 81625 NR Description: glycine-rich protein 3 precursor
  misc_feature (39)..(116): NCBI GI NO: 259447 NR Description: glycine-rich protein; atGRP [Arabidopsis thaliana]
  misc_feature (39)..(116): NCBI GI NO: 15224548 NR Description: glycine-rich protein (GRP) [Arabidopsis thaliana]
  misc_feature (1)..(107): NCBI GI NO: 15224548 NR Description: glycine-rich protein (GRP) [Arabidopsis thaliana]
  misc_feature (1)..(107): NCBI GI NO: 259447 NR Description: glycine-rich protein; atGRP [Arabidopsis thaliana]
MASKTLLLLGLFAFLFIVSEMAAAGTVKSESEETVKPEQHGGGFGDNGGGRYQGGGGHGGHGGGGYQGGGGRYQGGGGRQGGGGSYCRHGCCYKGYHGCSRCCSYAGEAVQTQSGH

SEQ ID NO: 351 - protein, 96 aa, Arabidopsis thaliana
  peptide (1)..(96): Ceres Seq. ID no. 13496877
  misc_feature (25)..(83): Pfam Name: Pfam Description:  Keratin
  misc_feature (1)..(96): NCBI GI NO: 18396043 NR Description: glycine-rich protein [Arabidopsis thaliana]
  misc_feature (1)..(96): NCBI GI NO: 20466662 NR Description: unknown protein [Arabidopsis thaliana]
  misc_feature (1)..(96): NCBI GI NO: 4206767 NR Description: glycine-rich protein 3 short isoform
  misc_feature (1)..(96): NCBI GI NO: 15224559 NR Description: glycine-rich protein [Arabidopsis thaliana]
  misc_feature (1)..(96): NCBI GI NO: 18266043 NR Description: glycine-rich protein [Brassica oleracea]
  misc_feature (19)..(96): NCBI GI NO: 81625 NR Description: glycine-rich protein 3 precursor
  misc_feature (19)..(96): NCBI GI NO: 259447 NR Description: glycine-rich protein; atGRP [Arabidopsis thaliana]
  misc_feature (19)..(96): NCBI GI NO: 15224548 NR Description: glycine-rich protein (GRP) [Arabidopsis thaliana]
  misc_feature (1)..(87): NCBI GI NO: 15224548 NR Description: glycine-rich protein (GRP) [Arabidopsis thaliana]
  misc_feature (1)..(87): NCBI GI NO: 259447 NR Description: glycine-rich protein; atGRP [Arabidopsis thaliana]
MAAAGTVKSESEETVKPEQHGGGFGDNGGGRYQGGGGHGGHGGGGYQGGGGRYQGGGGRQGGGGSYCRHGCCYKGYHGCSRCCSYAGEAVQTQSGH

SEQ ID NO: 352 - DNA, 964 bp, Arabidopsis thaliana
  misc_feature (1)..(964): Ceres Seq. ID no. 13491587
tccaaacttcgtctcccccaattgaacgagcaaaagttgcagagcacacacacacactttcaagtttcaatacagagatggcgaggcactgagccagagcgtgagaaccgtgaagatgaaaccgaagtcaacgaagatgaagataccggagctcaggtagctccgatcgttaggcttgaagaggttgcagtcaccaccggcgaagaagatgaagacgccgtcctcgatctgaaatcgaagatgtatcgatttgataaagaagggaaccaatggaagagaggagctggaactgtgaaattattgaagcataaggaaactggaaaagttcgtcttgttatgagacaatctaaaaccctaaagatctgtgccaatcacctcatttcgtctgggatgagtgttcaggaacatagtgggaatgaaaagtcttgtttatggcacgctactgatttctccgacggcgagttgaaagatgagcttttctgcattcgatttgcttccattgagaattgcaaaacatttatggagaagttcactgaaatagctgaaagccagcaagtagggaaagagagcacagagggcgatgaggcagctggtttaatagagaatctatcggttgaagaaaagaaaagtgtggagcaagccaaggaagcagaagagaaagagcctgcaaaggaagataaagaaacaaaaaaggagaaggtagaagaagagaagaaaacagagacaagcacttaaatgatcaaattaaaattggtttttggtaacacaaagtgtgctttgctttgttttaatatattatacttggcactgaacatgatggtagcttcaaaagtttgagtcttgcgctgtgttagagaaagttgaatcttaagtttttttatgttcttgtaagtgtttgactattgtgtggtctatttactgtgtcgttttggtttaagataatagtatttggcctcaaattagt

SEQ ID NO: 353 - protein, 244 aa, Arabidopsis thaliana
  peptide (1)..(244): Ceres Seq. ID no. 13491588
  misc_feature (63)..(183): Pfam Name: Pfam Description:  RanBP1 domain
  misc_feature (30)..(244): NCBI GI NO: 8843780 NR Description: contains similarity to small GTPase Ran binding protein1~gene_id:MZN1
  misc_feature (30)..(244): NCBI GI NO: 30697102 NR Description: Ran binding protein 1 homolog - like
  misc_feature (31)..(243): NCBI GI NO: 15227700 NR Description: Ran binding protein (AtRanBP1b)
  misc_feature (31)..(243): NCBI GI NO: 20260400 NR Description: Ran binding protein [Arabidopsis thaliana]
  misc_feature (31)..(243): NCBI GI NO: 2058284 NR Description: atranbp1b [Arabidopsis thaliana]
  misc_feature (31)..(243): NCBI GI NO: 15222310 NR Description: Ran-binding protein (atranbp1a)
  misc_feature (31)..(243): NCBI GI NO: 2058282 NR Description: atranbp1a [Arabidopsis thaliana]
  misc_feature (31)..(244): NCBI GI NO: 5106769 NR Description: Ran-binding protein siRanBP [Arabidopsis thaliana]
  misc_feature (31)..(238): NCBI GI NO: 14091665 NR Description: Ran binding protein-1 [Lycopersicon esculentum]
  misc_feature (30)..(232): NCBI GI NO: 38174136 NR Description: Unknown (protein for MGC:76028)
SKLRLPQLNEQKLQSTHTHFQVSIQRWRGTEPERENREDETEVNEDEDTGAQVAPIVRLEEVAVTTGEEDEDAVLDLKSKMYRFDKEGNQWKRGAGTVKLLKHKETGKVRLVMRQSKTLKICANHLISSGMSVQEHSGNEKSCLWHATDFSDGELKDELFCIRFASIENCKTFMEKFTEIAESQQVGKESTEGDEAAGLIENLSVEEKKSVEQAKEAEEKEPAKEDKETKKEKVEEEKKTETST

SEQ ID NO: 354 - protein, 164 aa, Arabidopsis thaliana
  peptide (1)..(164): Ceres Seq. ID no. 13491589
  misc_feature (1)..(103): Pfam Name: Pfam Description:  RanBP1 domain
  misc_feature (1)..(164): NCBI GI NO: 8843780 NR Description: contains similarity to small GTPase Ran binding protein1~gene_id:MZN1
  misc_feature (1)..(164): NCBI GI NO: 30697102 NR Description: Ran binding protein 1 homolog - like
  misc_feature (1)..(163): NCBI GI NO: 15227700 NR Description: Ran binding protein (AtRanBP1b)
  misc_feature (1)..(163): NCBI GI NO: 20260400 NR Description: Ran binding protein [Arabidopsis thaliana]
  misc_feature (1)..(163): NCBI GI NO: 2058284 NR Description: atranbp1b [Arabidopsis thaliana]
  misc_feature (1)..(163): NCBI GI NO: 15222310 NR Description: Ran-binding protein (atranbp1a)
  misc_feature (1)..(163): NCBI GI NO: 2058282 NR Description: atranbp1a [Arabidopsis thaliana]
  misc_feature (1)..(164): NCBI GI NO: 5106769 NR Description: Ran-binding protein siRanBP [Arabidopsis thaliana]
  misc_feature (1)..(158): NCBI GI NO: 14091665 NR Description: Ran binding protein-1 [Lycopersicon esculentum]
  misc_feature (1)..(152): NCBI GI NO: 38174136 NR Description: Unknown (protein for MGC:76028)
MYRFDKEGNQWKRGAGTVKLLKHKETGKVRLVMRQSKTLKICANHLISSGMSVQEHSGNEKSCLWHATDFSDGELKDELFCIRFASIENCKTFMEKFTEIAESQQVGKESTEGDEAAGLIENLSVEEKKSVEQAKEAEEKEPAKEDKETKKEKVEEEKKTETST

SEQ ID NO: 355 - protein, 132 aa, Arabidopsis thaliana
  peptide (1)..(132): Ceres Seq. ID no. 13491590
  misc_feature (1)..(71): Pfam Name: Pfam Description:  RanBP1 domain
  misc_feature (1)..(132): NCBI GI NO: 8843780 NR Description: contains similarity to small GTPase Ran binding protein1~gene_id:MZN1
  misc_feature (1)..(132): NCBI GI NO: 30697102 NR Description: Ran binding protein 1 homolog - like
  misc_feature (1)..(131): NCBI GI NO: 15227700 NR Description: Ran binding protein (AtRanBP1b)
  misc_feature (1)..(131): NCBI GI NO: 20260400 NR Description: Ran binding protein [Arabidopsis thaliana]
  misc_feature (1)..(131): NCBI GI NO: 2058284 NR Description: atranbp1b [Arabidopsis thaliana]
  misc_feature (1)..(131): NCBI GI NO: 15222310 NR Description: Ran-binding protein (atranbp1a)
  misc_feature (1)..(131): NCBI GI NO: 2058282 NR Description: atranbp1a [Arabidopsis thaliana]
  misc_feature (1)..(132): NCBI GI NO: 5106769 NR Description: Ran-binding protein siRanBP [Arabidopsis thaliana]
  misc_feature (1)..(126): NCBI GI NO: 14091665 NR Description: Ran binding protein-1 [Lycopersicon esculentum]
  misc_feature (1)..(120): NCBI GI NO: 38174136 NR Description: Unknown (protein for MGC:76028)
MRQSKTLKICANHLISSGMSVQEHSGNEKSCLWHATDFSDGELKDELFCIRFASIENCKTFMEKFTEIAESQQVGKESTEGDEAAGLIENLSVEEKKSVEQAKEAEEKEPAKEDKETKKEKVEEEKKTETST

SEQ ID NO: 356 - DNA, 1616 bp, Arabidopsis thaliana
  misc_feature (1)..(1616): Ceres Seq. ID no. 14307863
aaaaaagaagatctcactctcaccgccttcatttcctcgatctccgtcttcctccttctccgtctgtcgcagagcatcgctcgaattagggtttctgctgagagaagatgagggaaattattagcattcatatcggacaagccgggatccaagtcggaaattcctgctgggagctttactgtctcgaacatggaatccagcccgacggaatgatgccgagtgatactacagttggtgttgcacacgatgcgttcaatactttctttagcgagactggagctgggaagcatgttcctagggctgtcttcgttgatctcgagcctaccgttatcgacgaagttcgtactggtacttaccgtcaacttttccatccagagcagctcatttctgggaaagaagatgctgctaacaacttcgctagaggacattacactgttggaaaggaaattgtggatctatgtcttgaccgtgtgaggaagcttgccgacaactgtactggcttacaagggtttttggtgttcaatgctgttggtggtggaactggttctggattgggttctctgttgctagagcgtttgtctgtagattacggaaaaaagtctaagcttggttttaccatatacccttctcctcaggtttctactgctgttgtagaaccttacaacagtgttctctcaacgcattcccttcttgaacatacggatgtagctgtcctcttggataacgaagccatctatgacatttgccgcagatccctagatatcgagaggccaacctacacaaacttgaacaggttgatatcacagatcatttcatccttgacaacatctttgaggtttgatggtgccatcaacgtggatatcactgagttccagaccaatcttgtcccatatccccgtatccatttcatgctgtcatcttatgcaccagtcatctcagccgccaaggcttaccacgagcagctatcagtccctgagatcaccaatgccgtgtttgagccagcgagcatgatggcaaagtgtgacccaaggcacggaaagtacatggcatgttgtttgatgtaccgaggagatgttgttcccaaagatgttaatgctgccgttggcaccatcaagacaaagaggactgttcagtttgttgactggtgcccaactgggttcaaatgtggaatcaactaccaacctccaacagttgttccaggtggtgacctcgctaaggttcagagagctgtatgcatgatcagtaacaacacagcagttgcagaggtgttctcacggatcgaccacaagtttgatctcatgtatgcgaagagggcattcgtgcactggtacgttggtgaaggaatggaggaaggtgaattcgatgacaagaccaacgtcaaggccgcctggggtaaggtcggcgcgcacgctggcgagtatggtgcggaggccctggagaggatgttcctgtccttccccaccaccaagacctacttcccgcacttcgacctgagccacggctctgcccaggttaagggccacggcaagaaggtggccgacgcgctgaccaacgccgtggcgcacgtggacgacatgcccaacgcgctgtccgccctgagcgacctgcacgcgcac

SEQ ID NO: 357 - protein, 503 aa, Arabidopsis thaliana
  peptide (1)..(503): Ceres Seq. ID no. 14307864
  misc_feature (49)..(246): Pfam Name: Pfam Description:  Tubulin/FtsZ family, GTPase domain
  misc_feature (1)..(437): NCBI GI NO: 15241168 NR Description: tubulin alpha-3/alpha-5 chain (TUA3)
  misc_feature (1)..(441): NCBI GI NO: 135399 NR Description: Tubulin alpha-1 chain
  misc_feature (1)..(441): NCBI GI NO: 464846 NR Description: Tubulin alpha-6 chain (Alpha-6 tubulin)
  misc_feature (1)..(441): NCBI GI NO: 6094431 NR Description: Tubulin alpha-3 chain (Alpha-3 tubulin)
  misc_feature (1)..(441): NCBI GI NO: 25396545 NR Description: alpha tubulin [Physcomitrella patens]
  misc_feature (1)..(441): NCBI GI NO: 8928419 NR Description: Tubulin alpha-1 chain
  misc_feature (1)..(441): NCBI GI NO: 401161 NR Description: Tubulin alpha-5 chain (Alpha-5 tubulin)
  misc_feature (1)..(441): NCBI GI NO: 8928404 NR Description: Tubulin alpha chain
  misc_feature (1)..(441): NCBI GI NO: 7271241 NR Description: alpha-tubulin [Miscanthus sinensis]
  misc_feature (1)..(444): NCBI GI NO: 15029368 NR Description: alpha tubulin subunit [Rosa hybrid cultivar]
MREIISIHIGQAGIQVGNSCWELYCLEHGIQPDGMMPSDTTVGVAHDAFNTFFSETGAGKHVPRAVFVDLEPTVIDEVRTGTYRQLFHPEQLISGKEDAANNFARGHYTVGKEIVDLCLDRVRKLADNCTGLQGFLVFNAVGGGTGSGLGSLLLERLSVDYGKKSKLGFTIYPSPQVSTAVVEPYNSVLSTHSLLEHTDVAVLLDNEAIYDICRRSLDIERPTYTNLNRLISQIISSLTTSLRFDGAINVDITEFQTNLVPYPRIHFMLSSYAPVISAAKAYHEQLSVPEITNAVFEPASMMAKCDPRHGKYMACCLMYRGDVVPKDVNAAVGTIKTKRTVQFVDWCPTGFKCGINYQPPTVVPGGDLAKVQRAVCMISNNTAVAEVFSRIDHKFDLMYAKRAFVHWYVGEGMEEGEFDDKTNVKAAWGKVGAHAGEYGAEALERMFLSFPTTKTYFPHFDLSHGSAQVKGHGKKVADALTNAVAHVDDMPNALSALSDLHAH

SEQ ID NO: 358 - protein, 469 aa, Arabidopsis thaliana
  peptide (1)..(469): Ceres Seq. ID no. 14307865
  misc_feature (15)..(212): Pfam Name: Pfam Description:  Tubulin/FtsZ family, GTPase domain
  misc_feature (1)..(403): NCBI GI NO: 15241168 NR Description: tubulin alpha-3/alpha-5 chain (TUA3)
  misc_feature (1)..(407): NCBI GI NO: 135399 NR Description: Tubulin alpha-1 chain
  misc_feature (1)..(407): NCBI GI NO: 464846 NR Description: Tubulin alpha-6 chain (Alpha-6 tubulin)
  misc_feature (1)..(407): NCBI GI NO: 6094431 NR Description: Tubulin alpha-3 chain (Alpha-3 tubulin)
  misc_feature (1)..(407): NCBI GI NO: 25396545 NR Description: alpha tubulin [Physcomitrella patens]
  misc_feature (1)..(407): NCBI GI NO: 8928419 NR Description: Tubulin alpha-1 chain
  misc_feature (1)..(407): NCBI GI NO: 401161 NR Description: Tubulin alpha-5 chain (Alpha-5 tubulin)
  misc_feature (1)..(407): NCBI GI NO: 8928404 NR Description: Tubulin alpha chain
  misc_feature (1)..(407): NCBI GI NO: 7271241 NR Description: alpha-tubulin [Miscanthus sinensis]
  misc_feature (1)..(410): NCBI GI NO: 15029368 NR Description: alpha tubulin subunit [Rosa hybrid cultivar]
MMPSDTTVGVAHDAFNTFFSETGAGKHVPRAVFVDLEPTVIDEVRTGTYRQLFHPEQLISGKEDAANNFARGHYTVGKEIVDLCLDRVRKLADNCTGLQGFLVFNAVGGGTGSGLGSLLLERLSVDYGKKSKLGFTIYPSPQVSTAVVEPYNSVLSTHSLLEHTDVAVLLDNEAIYDICRRSLDIERPTYTNLNRLISQIISSLTTSLRFDGAINVDITEFQTNLVPYPRIHFMLSSYAPVISAAKAYHEQLSVPEITNAVFEPASMMAKCDPRHGKYMACCLMYRGDVVPKDVNAAVGTIKTKRTVQFVDWCPTGFKCGINYQPPTVVPGGDLAKVQRAVCMISNNTAVAEVFSRIDHKFDLMYAKRAFVHWYVGEGMEEGEFDDKTNVKAAWGKVGAHAGEYGAEALERMFLSFPTTKTYFPHFDLSHGSAQVKGHGKKVADALTNAVAHVDDMPNALSALSDLHAH

SEQ ID NO: 359 - protein, 468 aa, Arabidopsis thaliana
  peptide (1)..(468): Ceres Seq. ID no. 14307866
  misc_feature (14)..(211): Pfam Name: Pfam Description:  Tubulin/FtsZ family, GTPase domain
  misc_feature (1)..(402): NCBI GI NO: 15241168 NR Description: tubulin alpha-3/alpha-5 chain (TUA3)
  misc_feature (1)..(406): NCBI GI NO: 135399 NR Description: Tubulin alpha-1 chain
  misc_feature (1)..(406): NCBI GI NO: 464846 NR Description: Tubulin alpha-6 chain (Alpha-6 tubulin)
  misc_feature (1)..(406): NCBI GI NO: 6094431 NR Description: Tubulin alpha-3 chain (Alpha-3 tubulin)
  misc_feature (1)..(406): NCBI GI NO: 25396545 NR Description: alpha tubulin [Physcomitrella patens]
  misc_feature (1)..(406): NCBI GI NO: 8928419 NR Description: Tubulin alpha-1 chain
  misc_feature (1)..(406): NCBI GI NO: 401161 NR Description: Tubulin alpha-5 chain (Alpha-5 tubulin)
  misc_feature (1)..(406): NCBI GI NO: 8928404 NR Description: Tubulin alpha chain
  misc_feature (1)..(406): NCBI GI NO: 7271241 NR Description: alpha-tubulin [Miscanthus sinensis]
  misc_feature (1)..(409): NCBI GI NO: 15029368 NR Description: alpha tubulin subunit [Rosa hybrid cultivar]
MPSDTTVGVAHDAFNTFFSETGAGKHVPRAVFVDLEPTVIDEVRTGTYRQLFHPEQLISGKEDAANNFARGHYTVGKEIVDLCLDRVRKLADNCTGLQGFLVFNAVGGGTGSGLGSLLLERLSVDYGKKSKLGFTIYPSPQVSTAVVEPYNSVLSTHSLLEHTDVAVLLDNEAIYDICRRSLDIERPTYTNLNRLISQIISSLTTSLRFDGAINVDITEFQTNLVPYPRIHFMLSSYAPVISAAKAYHEQLSVPEITNAVFEPASMMAKCDPRHGKYMACCLMYRGDVVPKDVNAAVGTIKTKRTVQFVDWCPTGFKCGINYQPPTVVPGGDLAKVQRAVCMISNNTAVAEVFSRIDHKFDLMYAKRAFVHWYVGEGMEEGEFDDKTNVKAAWGKVGAHAGEYGAEALERMFLSFPTTKTYFPHFDLSHGSAQVKGHGKKVADALTNAVAHVDDMPNALSALSDLHAH

SEQ ID NO: 360 - DNA, 571 bp, Arabidopsis thaliana
  misc_feature (1)..(571): Ceres Seq. ID no. 12420691
gtagaatcttcccgtactttacttttccggaggaatagaaaattgggggctagggttcgcaattgtagttttcgagcgaagaagatgatcgaggtggttctcaacgatcgtttagggaaaaaagttagggtgaagtgtaacgatgatgacacgatcggtgatctgaagaagcttgtcgcggcacaaaccggaacacgagccgagaagatcagaattcagaagtggtacaacatctacaaggatcacatcactctcaaggactatgagatccatgacggcatgggtcttgagctttactacaactaggccaatcgaaggagctaagctgaaggagtgttgttgatttggacacctacataaactcatatcaaccatgttacatctaaaaaagacacaagtatgttgtaagacgtgataacttcaaatttgtggtaataataatacattcactgtcaatggttttaaacccttccaaattgtcagattgatttctggttatctctaagtttgtagtatattagtctttttggttgtattgatgtgctctttctccaaatgttacccatcttcc

SEQ ID NO: 361 - protein, 101 aa, Arabidopsis thaliana
  peptide (1)..(101): Ceres Seq. ID no. 12420692
  misc_feature (29)..(101): NCBI GI NO: 15238924 NR Description: ubiquitin-like protein; protein id: At5g42300
  misc_feature (29)..(101): NCBI GI NO: 15230632 NR Description: putative protein; protein id: At3g45180.1
  misc_feature (29)..(101): NCBI GI NO: 23482066 NR Description: ubiquitin-like protein [Plasmodium yoelii yoelii]
  misc_feature (29)..(101): NCBI GI NO: 23509060 NR Description: ubiquitin-like protein, putative
  misc_feature (25)..(100): NCBI GI NO: 38492721 NR Description: Chain A
  misc_feature (26)..(100): NCBI GI NO: 40889756 NR Description: Chain A
  misc_feature (29)..(100): NCBI GI NO: 13236510 NR Description: ubiquitin-like 5 [Homo sapiens]
  misc_feature (29)..(100): NCBI GI NO: 30585153 NR Description: Homo sapiens ubiquitin-like 5
  misc_feature (29)..(100): NCBI GI NO: 33416599 NR Description: Unknown (protein for MGC:66388) [Danio rerio]
  misc_feature (29)..(100): NCBI GI NO: 17507389 NR Description: UBiquitin-Like family UBL-5 (8.7 kD) (ubl-5)
VESSRTLLFRRNRKLGARVRNCSFRAKKMIEVVLNDRLGKKVRVKCNDDDTIGDLKKLVAAQTGTRAEKIRIQKWYNIYKDHITLKDYEIHDGMGLELYYN

SEQ ID NO: 362 - protein, 73 aa, Arabidopsis thaliana
  peptide (1)..(73): Ceres Seq. ID no. 12420693
  misc_feature (1)..(73): NCBI GI NO: 15238924 NR Description: ubiquitin-like protein; protein id: At5g42300
  misc_feature (1)..(73): NCBI GI NO: 15230632 NR Description: putative protein; protein id: At3g45180.1
  misc_feature (1)..(73): NCBI GI NO: 23482066 NR Description: ubiquitin-like protein [Plasmodium yoelii yoelii]
  misc_feature (1)..(73): NCBI GI NO: 23509060 NR Description: ubiquitin-like protein, putative
  misc_feature (1)..(72): NCBI GI NO: 38492721 NR Description: Chain A
  misc_feature (1)..(72): NCBI GI NO: 40889756 NR Description: Chain A
  misc_feature (1)..(72): NCBI GI NO: 13236510 NR Description: ubiquitin-like 5 [Homo sapiens]
  misc_feature (1)..(72): NCBI GI NO: 30585153 NR Description: Homo sapiens ubiquitin-like 5
  misc_feature (1)..(72): NCBI GI NO: 33416599 NR Description: Unknown (protein for MGC:66388) [Danio rerio]
  misc_feature (1)..(72): NCBI GI NO: 17507389 NR Description: UBiquitin-Like family UBL-5 (8.7 kD) (ubl-5)
MIEVVLNDRLGKKVRVKCNDDDTIGDLKKLVAAQTGTRAEKIRIQKWYNIYKDHITLKDYEIHDGMGLELYYN

SEQ ID NO: 363 - DNA, 592 bp, Arabidopsis thaliana
  misc_feature (1)..(592): Ceres Seq. ID no. 12323993
atcaaaatctttacaatatttatcatgtatgattctatcaagtgagatggaacggtatgcaatttttccgtttaataatgtgttttcgcttacaggttgaacaagtcactccagtagcagtagagaacgttgaggtaccaacaaagacagtggaggagacagtggtggagacagaggtgacccaacagccggaagaatccgtccccgccgtgacagaacaaaaatccgaagcaccaattgtagaaacaaacgaagaagtggttgtggaagaggcagagaagaaagatgaagaaaccgagaagaaaacagaggagaaagacgagaagacagaagtgatcacggaaactccggtagttgaggaggaggagaagaaagctgaggaagtgaccgaaactccggcggttgtggaggaggagaagaagacagaggtggttgaggagaaacagactgaggttgcggctgctgaggaagtcgccgttgagaaggccgaggagtaaagaggaaggaagaagctatatatgaccttttttggtctcatatcgttttctgtttattttattttatcaacatttcataagtattttctatgttt

SEQ ID NO: 364 - protein, 146 aa, Arabidopsis thaliana
  peptide (1)..(146): Ceres Seq. ID no. 12323994
  misc_feature (33)..(140): Pfam Name: Pfam Description:  DREPP plasma membrane polypeptide
  misc_feature (12)..(146): NCBI GI NO: 30682601 NR Description: expressed protein [Arabidopsis thaliana]
  misc_feature (47)..(146): NCBI GI NO: 18391349 NR Description: expressed protein; protein id: At1g12080
  misc_feature (47)..(146): NCBI GI NO: 15231671 NR Description: putative protein; protein id: At3g59370.1
  misc_feature (12)..(142): NCBI GI NO: 18407594 NR Description: expressed protein; protein id: At1g62480
  misc_feature (12)..(142): NCBI GI NO: 21555836 NR Description: unknown [Arabidopsis thaliana]
  misc_feature (12)..(138): NCBI GI NO: 18391349 NR Description: expressed protein; protein id: At1g12080
  misc_feature (18)..(146): NCBI GI NO: 9049359 NR Description: vacuolar calcium binding protein
  misc_feature (12)..(146): NCBI GI NO: 9049359 NR Description: vacuolar calcium binding protein
  misc_feature (14)..(146): NCBI GI NO: 22999045 NR Description: hypothetical protein [Magnetococcus sp. MC-1]
  misc_feature (15)..(146): NCBI GI NO: 22999045 NR Description: hypothetical protein [Magnetococcus sp. MC-1]
MQFFRLIMCFRLQVEQVTPVAVENVEVPTKTVEETVVETEVTQQPEESVPAVTEQKSEAPIVETNEEVVVEEAEKKDEETEKKTEEKDEKTEVITETPVVEEEEKKAEEVTETPAVVEEEKKTEVVEEKQTEVAAAEEVAVEKAEE

SEQ ID NO: 365 - protein, 139 aa, Arabidopsis thaliana
  peptide (1)..(139): Ceres Seq. ID no. 12323995
  misc_feature (26)..(133): Pfam Name: Pfam Description:  DREPP plasma membrane polypeptide
  misc_feature (5)..(139): NCBI GI NO: 30682601 NR Description: expressed protein [Arabidopsis thaliana]
  misc_feature (40)..(139): NCBI GI NO: 18391349 NR Description: expressed protein; protein id: At1g12080
  misc_feature (40)..(139): NCBI GI NO: 15231671 NR Description: putative protein; protein id: At3g59370.1
  misc_feature (5)..(135): NCBI GI NO: 18407594 NR Description: expressed protein; protein id: At1g62480
  misc_feature (5)..(135): NCBI GI NO: 21555836 NR Description: unknown [Arabidopsis thaliana]
  misc_feature (5)..(131): NCBI GI NO: 18391349 NR Description: expressed protein; protein id: At1g12080
  misc_feature (11)..(139): NCBI GI NO: 9049359 NR Description: vacuolar calcium binding protein
  misc_feature (5)..(139): NCBI GI NO: 9049359 NR Description: vacuolar calcium binding protein
  misc_feature (7)..(139): NCBI GI NO: 22999045 NR Description: hypothetical protein [Magnetococcus sp. MC-1]
  misc_feature (8)..(139): NCBI GI NO: 22999045 NR Description: hypothetical protein [Magnetococcus sp. MC-1]
MCFRLQVEQVTPVAVENVEVPTKTVEETVVETEVTQQPEESVPAVTEQKSEAPIVETNEEVVVEEAEKKDEETEKKTEEKDEKTEVITETPVVEEEEKKAEEVTETPAVVEEEKKTEVVEEKQTEVAAAEEVAVEKAEE

SEQ ID NO: 366 - DNA, 1305 bp, Arabidopsis thaliana
  misc_feature (1)..(1305): Ceres Seq. ID no. 14307843
aaaaattgaaaattgaaaataaaaccttccaaagtagcatcctttatcgctgcaatggcgatgagagagctctcgcagcttaacagagacagcgacggtgatgaagaagtatgggtcaaacactattcatccaaccatcagatacttctcgtcggcgaaggagatttctcattctctcacagcttagccactctcttcggctctgcttccaatatctgcgcttcctctctcgattcatacgatgttgtggttagaaagtacaagaaggcaagatcaaaccttaaaactttgaagagacttggagctttacttttacatggagttgatgctaccacactgcattttcaccctgaccttcgttatagaagatttgatcgcgtcatcttcaacttccctcacgccggtttccacggcagagagtctgattcctctcttatacggaagcatagagaactggtgtttggatttttcaatggtgcaagccgtttactaagagctaatggggaagttcatgtctctcacaagaacaaagcacctttttctgagtggaatctcgaggagctcgctagcagatgctttcttgtgttgattcaacgtgtggccttcgagaagaacaattaccctggttatgagaataagagaggagatgggcgtagatgtgaccaacctttccttttgggagagtgcagtactttcaagttcagattctctcgtgtcgctaaggaactttatgcagagaaagtgagatcgagagaatctgaacagacttcactctctgctttgttctatgcccatctctcaaaagaagcgggaattcctgatggtgtgctcaacattgtaactggttttggatcaactgctggagctgccattgcctcccatatggacgtagacaaagttagtttcactgggtcaacagatgttggaaggaagataatgcaagccgcagccgcaagtaatctcaaaaaagtttcccttgaattaggcgggaaatcgccacttctcatattcaacgacgctgatattgacaaagccgccgatcttgcgcttctcggttgcttttacaacaagggtgaaatttgcgtggcgagctctcgtgtgtttgttcaagaaggtatatacgataaggttgtggagaagttagtagagaaggctaaagattggaccgttggtgatccttttgattccactgctcgacaaggaccttatcgtatataatatatatctaccccatatgtaatttgtaatgtgcctttgactgtgatgagttatctctccctctctaccaactttcttcatatatat

SEQ ID NO: 367 - protein, 387 aa, Arabidopsis thaliana
  peptide (1)..(387): Ceres Seq. ID no. 14307844
  misc_feature (1)..(270): NCBI GI NO: 18405537 NR Description: hypothetical protein [Arabidopsis thaliana]
  misc_feature (1)..(129): NCBI GI NO: 8778493 NR Description: F20N2.17 [Arabidopsis thaliana]
  misc_feature (130)..(240): NCBI GI NO: 8778493 NR Description: F20N2.17 [Arabidopsis thaliana]
  misc_feature (1)..(129): NCBI GI NO: 8778331 NR Description: F14J16.3 [Arabidopsis thaliana]
  misc_feature (129)..(240): NCBI GI NO: 8778331 NR Description: F14J16.3 [Arabidopsis thaliana]
  misc_feature (63)..(236): NCBI GI NO: 8778331 NR Description: F14J16.3 [Arabidopsis thaliana]
  misc_feature (1)..(63): NCBI GI NO: 8778331 NR Description: F14J16.3 [Arabidopsis thaliana]
  misc_feature (63)..(236): NCBI GI NO: 8778492 NR Description: F20N2.18 [Arabidopsis thaliana]
  misc_feature (6)..(63): NCBI GI NO: 8778492 NR Description: F20N2.18 [Arabidopsis thaliana]
  misc_feature (233)..(384): NCBI GI NO: 18404212 NR Description: aldehyde dehydrogenase (ALDH1a)
MAMRELSQLNRDSDGDEEVWVKHYSSNHQILLVGEGDFSFSHSLATLFGSASNICASSLDSYDVVVRKYKKARSNLKTLKRLGALLLHGVDATTLHFHPDLRYRRFDRVIFNFPHAGFHGRESDSSLIRKHRELVFGFFNGASRLLRANGEVHVSHKNKAPFSEWNLEELASRCFLVLIQRVAFEKNNYPGYENKRGDGRRCDQPFLLGECSTFKFRFSRVAKELYAEKVRSRESEQTSLSALFYAHLSKEAGIPDGVLNIVTGFGSTAGAAIASHMDVDKVSFTGSTDVGRKIMQAAAASNLKKVSLELGGKSPLLIFNDADIDKAADLALLGCFYNKGEICVASSRVFVQEGIYDKVVEKLVEKAKDWTVGDPFDSTARQGPYRI

SEQ ID NO: 368 - protein, 385 aa, Arabidopsis thaliana
  peptide (1)..(385): Ceres Seq. ID no. 14307845
  misc_feature (1)..(268): NCBI GI NO: 18405537 NR Description: hypothetical protein [Arabidopsis thaliana]
  misc_feature (1)..(127): NCBI GI NO: 8778493 NR Description: F20N2.17 [Arabidopsis thaliana]
  misc_feature (128)..(238): NCBI GI NO: 8778493 NR Description: F20N2.17 [Arabidopsis thaliana]
  misc_feature (1)..(127): NCBI GI NO: 8778331 NR Description: F14J16.3 [Arabidopsis thaliana]
  misc_feature (127)..(238): NCBI GI NO: 8778331 NR Description: F14J16.3 [Arabidopsis thaliana]
  misc_feature (61)..(234): NCBI GI NO: 8778331 NR Description: F14J16.3 [Arabidopsis thaliana]
  misc_feature (1)..(61): NCBI GI NO: 8778331 NR Description: F14J16.3 [Arabidopsis thaliana]
  misc_feature (61)..(234): NCBI GI NO: 8778492 NR Description: F20N2.18 [Arabidopsis thaliana]
  misc_feature (4)..(61): NCBI GI NO: 8778492 NR Description: F20N2.18 [Arabidopsis thaliana]
  misc_feature (231)..(382): NCBI GI NO: 18404212 NR Description: aldehyde dehydrogenase (ALDH1a)
MRELSQLNRDSDGDEEVWVKHYSSNHQILLVGEGDFSFSHSLATLFGSASNICASSLDSYDVVVRKYKKARSNLKTLKRLGALLLHGVDATTLHFHPDLRYRRFDRVIFNFPHAGFHGRESDSSLIRKHRELVFGFFNGASRLLRANGEVHVSHKNKAPFSEWNLEELASRCFLVLIQRVAFEKNNYPGYENKRGDGRRCDQPFLLGECSTFKFRFSRVAKELYAEKVRSRESEQTSLSALFYAHLSKEAGIPDGVLNIVTGFGSTAGAAIASHMDVDKVSFTGSTDVGRKIMQAAAASNLKKVSLELGGKSPLLIFNDADIDKAADLALLGCFYNKGEICVASSRVFVQEGIYDKVVEKLVEKAKDWTVGDPFDSTARQGPYRI

SEQ ID NO: 369 - DNA, 1578 bp, Arabidopsis thaliana
  misc_feature (1)..(1578): Ceres Seq. ID no. 12421854
gacctttggtttctgtgttgtgtgatatttactacgaaaccacttgtcaccaaaggttcttctttcttttagcgttgggttcgtgattccaagatcaatggttgtgaacttcactagttagagatactgaatcaaagagatgattcttccgagaattgggtaaatctatcgattctgattttctggattaaagaactagtaacctattttcattccatagcttcttcagatcatacattctcgcaagtgttcgatacgggtgtagaagaagaagagtctttctatgctcctgatcatgatgtcttgactctgcttcaacctaacttcaccaccaacgatgtctagtagtaccaagaacattccaaaacctcctcctcttccttgtattacctaccagcgttttcaatctagtacaaggaaaccttcgagcttaatgcgccttgtgcctaaagaagcacttgaaacttgggataagcttttcaaggaaggatctggagcagatacatatgttgaaaccgataacaagtctcactttcctgcccattcaagtgtcctggctgcagcctcaccagttatagcgacacttctgaatcaatcgagggataagaatgggaatacatacctcaaaatccatggagttccttgtgaagcagtctacatgttcattaggtttctatactcttcctgctacgaggaggaagaaatgaagaagtttgtgctccatttattggttctgtcacattgctactcggtcccatctcttaaaagactttgtgtagagattctcgatcaaggatggattaacaaggagaatgtgatcgatgtgcttcaactagcgagaaactgtgacgtgacaaggatttgctttgtatgtctttccatggtcatcaaagacttcaaatctgtatcttcaacagagggatggaaagtgatgaaacgctctaatcctttgctcgaacaagagctcattgaggcagtcatcgaatccgacagtaggaaacaagaaagaagaagaaaactggaggagagagaagtgtatttgcagctctatgaagccatggaagctcttgtccacatatgtcgtgaaggttgtgggacaattggacctcgcgataaggcccttaaaggaagccataccgtgtgtaaattcccggcgtgtaaagggcttgaaggtgcgctcagacatttcttgggatgcaagtctagggcttcatgttctcattgcaaaaggatgtggcagcttcttcagcttcactcttgtatctgtgatgattctaattcttgcaaagtttctctctgctggaatttcaaggagaaaatgaagaagcttagcaagaaagaacaatctaaatggcgattgcttgtagaaaacattattagggcgaggaacagtctcgggcccttctcgtcacgtccttctggtttgatatagaaacaggttttagattttagtgtatagccagttagacacaaaaagaaaacgtacataggcgcagggtatagtgtatattgcgcaccaatacggcgcacaatagtggttttgaacaaacattgtctatatcaagttggttgttatat

SEQ ID NO: 370 - protein, 364 aa, Arabidopsis thaliana
  peptide (1)..(364): Ceres Seq. ID no. 12421855
  misc_feature (44)..(154): Pfam Name: Pfam Description:  BTB/POZ domain
  misc_feature (1)..(322): NCBI GI NO: 15221235 NR Description: hypothetical protein; protein id: At1g05690.1
  misc_feature (2)..(356): NCBI GI NO: 15240763 NR Description: putative protein; protein id: At5g67480
  misc_feature (4)..(356): NCBI GI NO: 21537174 NR Description: unknown [Arabidopsis thaliana]
  misc_feature (4)..(356): NCBI GI NO: 7485765 NR Description: hypothetical protein F19F18
  misc_feature (4)..(356): NCBI GI NO: 26453150 NR Description: unknown protein [Arabidopsis thaliana]
  misc_feature (4)..(356): NCBI GI NO: 18420081 NR Description: putative protein; protein id: At4g37610
  misc_feature (1)..(291): NCBI GI NO: 34907566 NR Description: B1078G07.24
  misc_feature (55)..(364): NCBI GI NO: 15242656 NR Description: putative protein; protein id: At5g63160.1
  misc_feature (45)..(350): NCBI GI NO: 18408618 NR Description: putative protein; protein id: At3g48360
  misc_feature (45)..(350): NCBI GI NO: 7487530 NR Description: hypothetical protein T29H11
MSSSTKNIPKPPPLPCITYQRFQSSTRKPSSLMRLVPKEALETWDKLFKEGSGADTYVETDNKSHFPAHSSVLAAASPVIATLLNQSRDKNGNTYLKIHGVPCEAVYMFIRFLYSSCYEEEEMKKFVLHLLVLSHCYSVPSLKRLCVEILDQGWINKENVIDVLQLARNCDVTRICFVCLSMVIKDFKSVSSTEGWKVMKRSNPLLEQELIEAVIESDSRKQERRRKLEEREVYLQLYEAMEALVHICREGCGTIGPRDKALKGSHTVCKFPACKGLEGALRHFLGCKSRASCSHCKRMWQLLQLHSCICDDSNSCKVSLCWNFKEKMKKLSKKEQSKWRLLVENIIRARNSLGPFSSRPSGLI

SEQ ID NO: 371 - protein, 332 aa, Arabidopsis thaliana
  peptide (1)..(332): Ceres Seq. ID no. 12421856
  misc_feature (12)..(122): Pfam Name: Pfam Description:  BTB/POZ domain
  misc_feature (1)..(290): NCBI GI NO: 15221235 NR Description: hypothetical protein; protein id: At1g05690.1
  misc_feature (1)..(324): NCBI GI NO: 15240763 NR Description: putative protein; protein id: At5g67480
  misc_feature (1)..(324): NCBI GI NO: 21537174 NR Description: unknown [Arabidopsis thaliana]
  misc_feature (1)..(324): NCBI GI NO: 7485765 NR Description: hypothetical protein F19F18
  misc_feature (1)..(324): NCBI GI NO: 18420081 NR Description: putative protein; protein id: At4g37610
  misc_feature (1)..(324): NCBI GI NO: 26453150 NR Description: unknown protein [Arabidopsis thaliana]
  misc_feature (1)..(259): NCBI GI NO: 34907566 NR Description: B1078G07.24
  misc_feature (23)..(332): NCBI GI NO: 15242656 NR Description: putative protein; protein id: At5g63160.1
  misc_feature (13)..(318): NCBI GI NO: 18408618 NR Description: putative protein; protein id: At3g48360
  misc_feature (13)..(318): NCBI GI NO: 7487530 NR Description: hypothetical protein T29H11
MRLVPKEALETWDKLFKEGSGADTYVETDNKSHFPAHSSVLAAASPVIATLLNQSRDKNGNTYLKIHGVPCEAVYMFIRFLYSSCYEEEEMKKFVLHLLVLSHCYSVPSLKRLCVEILDQGWINKENVIDVLQLARNCDVTRICFVCLSMVIKDFKSVSSTEGWKVMKRSNPLLEQELIEAVIESDSRKQERRRKLEEREVYLQLYEAMEALVHICREGCGTIGPRDKALKGSHTVCKFPACKGLEGALRHFLGCKSRASCSHCKRMWQLLQLHSCICDDSNSCKVSLCWNFKEKMKKLSKKEQSKWRLLVENIIRARNSLGPFSSRPSGLI

SEQ ID NO: 372 - protein, 257 aa, Arabidopsis thaliana
  peptide (1)..(257): Ceres Seq. ID no. 12421857
  misc_feature (122)..(214): Pfam Name: Pfam Description:  TAZ zinc finger
  misc_feature (1)..(215): NCBI GI NO: 15221235 NR Description: hypothetical protein; protein id: At1g05690.1
  misc_feature (1)..(249): NCBI GI NO: 15240763 NR Description: putative protein; protein id: At5g67480
  misc_feature (1)..(249): NCBI GI NO: 21537174 NR Description: unknown [Arabidopsis thaliana]
  misc_feature (1)..(249): NCBI GI NO: 7485765 NR Description: hypothetical protein F19F18
  misc_feature (1)..(249): NCBI GI NO: 18420081 NR Description: putative protein; protein id: At4g37610
  misc_feature (1)..(249): NCBI GI NO: 26453150 NR Description: unknown protein [Arabidopsis thaliana]
  misc_feature (1)..(184): NCBI GI NO: 34907566 NR Description: B1078G07.24
  misc_feature (1)..(257): NCBI GI NO: 15242656 NR Description: putative protein; protein id: At5g63160.1
  misc_feature (1)..(243): NCBI GI NO: 18408618 NR Description: putative protein; protein id: At3g48360
  misc_feature (1)..(243): NCBI GI NO: 7487530 NR Description: hypothetical protein T29H11
MFIRFLYSSCYEEEEMKKFVLHLLVLSHCYSVPSLKRLCVEILDQGWINKENVIDVLQLARNCDVTRICFVCLSMVIKDFKSVSSTEGWKVMKRSNPLLEQELIEAVIESDSRKQERRRKLEEREVYLQLYEAMEALVHICREGCGTIGPRDKALKGSHTVCKFPACKGLEGALRHFLGCKSRASCSHCKRMWQLLQLHSCICDDSNSCKVSLCWNFKEKMKKLSKKEQSKWRLLVENIIRARNSLGPFSSRPSGLI

SEQ ID NO: 373 - DNA, 3885 bp, Arabidopsis thaliana
  misc_feature (1)..(3885): Ceres Seq. ID no. 12388487
aaaccatcctctcctttctctctctagatttttatcccctttccctctctctctctctctctcctagggttttcgtctctctcgttcactgttaatagtcttaacggagaggtttgattagcctccgggaagattctactgcgaactttggacacatctctctctgccatggcggctgagaagttaagggacttgagccagccgattgacgtcggtgtgctcgatgccactgttgcggccttctttgttaccggatctaaagaagagagagctgctgcggaccagattttgcgggatttgcaggctaatccagatatgtggcttcaagttgtccacattctacaaaatacaaacagcttggataccaagttctttgctctgcaggttctagaaggtgttataaagtatagatggaatgcactgcctgttgaacaacgagatggaatgaaaaattacatctcagaggttattgtacagctctcgagtaatgaagcatctttcagatcagaaaggctctatgtcaacaagctaaatgtcattttggtccagatcgtgaaacatgattggccggcaaagtggacaagcttcattcctgatctagttgcagctgctaaaactagcgaaactatctgcgaaaattgcatggccattttgaaactcctaagtgaagaggtttttgatttctcaagaggagaaatgactcagcagaagattaaagagctgaaacaatctctaaacagtgagtttaaactcattcatgagttatgcctatatgtcctctcagcttctcaaagacaggatcttatacgtgcaacactgtctgcattgcatgcctatctttcctggattccattgggttacatttttgagtctactttgcttgagaccctccttaaattttttcctgtgccagcatataggaacctcactattcaatgtctgaccgaggtcgcagctcttaatttcggggacttctacaatgttcaatatgtcaaaatgtataccatatttatagggcagctgcggataattctcccaccgagtacaaagatccctgaggcatattccagtggaagtggtgaagaacaagcatttatccagaacctggcactatttttcacttcctttttcaagtttcatattcgagtcctagaatcaacgccagaagttgtctctttgttactcgctggtctagaatatctcattaatatatcttatgttgacgacactgaagtatttaaggtttgtttggactattggaactcgttggtgttggagctatttgatgcgcatcataattctgataaccctgcagtaagtgcaagcctgatgggtttgcagcctttccttcctggtatggttgatggccttggttctcaagtcatgcagcggcgtcaactttattctcacccaatgtccaaattaagagggttaatgattaaccgcatggcgaagcctgaagaagtgcttattgttgaagatgaaaatgggaacatcgttcgtgaaaccatgaaggacaatgatgttcttgtccaatataagataatgcgggagacattaatctacctctcacaccttgaccatgatgataccgagaagcagatgttgaggaagctaaacaaacaattaagtggggaggaatgggcatggaacaatttgaacactttgtgctgggctattgggtctatttccggatctatggcagaagatcaggaaaacaggtttttggtgatggtcattcgtgatttgttgaatttatgtgaaattaccaagggaaaagacaataaagccgttattgcaagcaacatcatgtatgtcgttggccagtatccaagattcttaagggcccattggaagtttttgaagacagttgtgaacaagttgtttgaattcatgcatgaaacacatcctggtgttcaggacatggcctgtgatacattcttgaaaatagttcaaaagtgcaagcgaaaattcgttattgtacaggttggagagaatgaaccatttgtatctgaacttctaacaggccttgcaacaactgttcaagatcttgagcctcatcaaatacactcattttatgaatcagttggtaatatgatccaagcagaatcagatcctcagaagagagatgaatatctccagaggttgatggcactccccaaccagaaatgggcagaaatcataggacaggcacgccacagtgtagaattcctcaaggatcaagttgtgatacgtacagtgctaaacatcctacagactaatactagtgctgctacttcactgggaacatacttcttatcccaaatttccttgattttcttggatatgttgaatgtatacagaatgtacagtgagcttgtgtcaaccaacattactgagggaggaccatatgcttccaagacatcttttgtaaaactcttaagatcggttaagagggaaacacttaagctgatagaaacctttttagacaaagctgaagaccagccacacatagggaaacaatttgtgccgccaatgatggaatcagtacttggtgactatgcgaggaatgtgcctgatgctagggaatccgaagttctttcactctttgcaacgattataaacaagtacaaggcaacaatgttagacgacgtgcctcacatatttgaagctgtattccagtgtacattggagatgataactaagaactttgaagattatccagaacaccgcctcaagtttttctcattactccgtgctattgctacgttttgtttccctgccttgataaagttatcaagtccgcaactgaagctagtgatggattcaattatctgggcatttagacatactgagagaaatattgctgaaaccgggcttaatcttttgcttgagatgctgaaaaactttcagcaatctgaattttgtaatcaattctaccggtcatactttatgcaaatcgagcaagaaatatttgccgttttgaccgataccttccataagcctggcttcaagctacatgtgttggtgctgcagcaactgttttgcctgcctgagagcggtgctttgacagaacccttgtgggatgctacaaccgttccttacccgtatccggacaacgttgcatttgttcgcgaatacaccattaagctactgagctcttcattcccaaacatgactgcagcagaggtcacacaatttgtgaatggactatacgagtctagaaatgacccgtctggatttaagaataacattcgtgacttccttgtacagtctaaggagttttccgctcaggataacaaagatctctatgctgaggaagcagctgcacagagagagagagaacgtcaaagaatgctttcaattcctgggcttattgctcctaatgagattcaagacgagatggtggactcataaaattaagaagggtgcaacaagaagaagcttcctgtgttcaatgggctggattttttgtaatcataggtttttgaaaacaggaaagagttcaaggagagattaatttccccgaccgtatctctactaccgtattccgaagcttctcaattcgattttgaggattggaaaagctaagaaaacagagatctttttggggataaattagtgtcttgtttggttaattaattgggtttaatgtagatttaaacattagggaccttctctagttatctcatatggttggctcctttttgctttgacctttttttgggggtttgtttctattactcagtgattcgtgttttaggtgcaagatatttttttagactctatctttgtcaccccctagggggtttaaaattgtaagattgacttgtggtgatgtttctcattaaaatcgtccactttaaagtgtgctttgacaattttatcaaacaaaactttgaattt

SEQ ID NO: 374 - DNA, 2663 bp, Arabidopsis thaliana
  misc_feature (1)..(2663): Ceres Seq. ID no. 13591835
acctctcttacctcactctccttaaacctttaatagggtttttaggttactctttgttcaactactacaaactcttttctctttagagattgagagattgtaaaaaaatctcaaatcttttccttcacaactttcaaatctaatggctcctgctttgagtagaagtctctacacatctcctttgacttcagttccaatcactcctgtctcttctcgtctctctcatctgagaagctcgtttctcccacacggcggcgctttaagaaccggcgtttcgtgtagctggaatctcgaaaagagatgtaaccgattcgccgtgaagtgtgacgccgccgtggcggagaaagagaccactgaagaagggtcaggtgagaagtttgagtaccaagctgaggttagtagattgttggatttgattgttcatagcttatacagtcacaaggaggtgtttctcagggagcttgtaagtaatgcaagtgatgctttggataagctgaggttcttgagtgtaacagagccttctttgcttggagatggtggagatcttgagattaggattaagcctgatcctgataacggcaccatcaccataactgatactggtattggaatgacaaaggaagaacttattgattgccttggaactattgctcaaagtggtacttcgaaattcttgaaggctctaaaggaaaacaaggaccttggtgctgacaacggtttgatcggacagtttggtgttgggttttactctgctttcttagttgctgagaaggttgttgtgtccaccaaaagccccaaatctgacaagcaatatgtttgggaatcggttgccgatagtagctcgtatctgatcagagaagaaacagaccctgataacattctacgtcgtggaacacaaatcaccttgtatctgagggaggatgataaatacgaatttgcggagtctacaaggatcaagaacctcgtgaagaattactctcagttcgttgggtttcctatctatacatggcaggagaaatcaaggactatagaggtcgaagaggacgaaccagttaaggaaggagaagagggtgagccaaagaaaaagaagaccactaaaactgagaagtattgggattgggaactagccaacgagaccaaaccgctatggatgcgcaattcgaaggaagtggaaaaaggagagtacaatgagttctacaaaaaggctttcaatgagttcttggatccacttgctcacacacacttcacaactgagggtgaggttgagttcaggagcattttgtacatccctgggatgggtcctcttaacaatgaagatgttacaaacccgaaaacaaagaacattcgtctctacgtgaagcgtgtgtttatctctgacgattttgatggagagcttttcccgagatatctgagctttgtgaagggagttgtggactctgatgatcttcctcttaatgtttctcgtgaaattctccaagaaagcagaattgtaagaatcatgagaaagaggctcattagaaaaacctttgacatgatacaagaaatctctgagagtgaaaacaaagaggattacaagaaattctgggagaactttggtagattccttaaattgggttgtattgaagacaccggtaaccacaagcgtatcacaccgctacttagattcttcagttccaagaatgaagaggaattgacaagcttggatgattatatcgagaacatgggagagaaccaaaaggcgatctactacctcgcaactgatagtcttaaaagtgccaagtctgcccctttcttggagaaactaatccaaaaagatatcgaggttctatatttggttgaaccaatcgatgaagttgctattcagaatttgcaaacctacaaagaaaagaaattcgttgatatcagtaaagaagatttggaactcggagatgaagatgaagtaaaggacagggaagcgaaacaagagtttaaccttctctgtgactggataaaacagcagctcggtgacaaagttgcaaaagtccaagtctcaaaccgtttgagctcttctccttgtgtgcttgtctctggcaaattcgggtggtcagctaatatggaaaggctaatgaaggcacaggctcttggagacacttcaagcctggagttcatgagaggtaggagaatactagagatcaatccagatcatcccatcatcaaagacttgaacgctgcttgtaagaatgcaccagagagcactgaagcaacaagagtggtcgatctcttgtatgacactgctataatatcaagtggattcactcctgatagcccggccgagctcgggaacaagatatatgagatgatggcaatggcggttggaggaagatggggcagagttgaagaagaagaagaaagctcgactgtgaatgaaggagatgacaaaagcggagaaacagaggtagttgaaccatctgaagtgagggcagagagtgatccttggcaagattgatccttttttaccttcttttgtttgcagtgatttttttttgacagaacgctttatctttccattagcagtatcatgggcctaatgaaagcccataattaaatcacgcgtgaacgagatttatccaatacagtatttgtagtttttttttgataattaaaataattttagagaatttaca

SEQ ID NO: 375 - protein, 780 aa, Arabidopsis thaliana
  peptide (1)..(780): Ceres Seq. ID no. 13591836
  misc_feature (264)..(772): Pfam Name: Pfam Description:  Hsp90 protein
  misc_feature (1)..(771): NCBI GI NO: 15231505 NR Description: heat shock protein -related [Arabidopsis thaliana]
  misc_feature (290)..(767): NCBI GI NO: 6016267 NR Description: Heat shock protein HSP 90-alpha (HSP 86)
  misc_feature (67)..(361): NCBI GI NO: 6016267 NR Description: Heat shock protein HSP 90-alpha (HSP 86)
  misc_feature (71)..(477): NCBI GI NO: 18855040 NR Description: heat shock protein 90 [Oryza sativa]
  misc_feature (472)..(777): NCBI GI NO: 18855040 NR Description: heat shock protein 90 [Oryza sativa]
  misc_feature (58)..(780): NCBI GI NO: 63509 NR Description: hsp 108 [Gallus gallus]
  misc_feature (291)..(767): NCBI GI NO: 1170383 NR Description: HEAT SHOCK PROTEIN HSP 90-ALPHA (HSP 86)
  misc_feature (67)..(319): NCBI GI NO: 1170383 NR Description: HEAT SHOCK PROTEIN HSP 90-ALPHA (HSP 86)
  misc_feature (71)..(477): NCBI GI NO: 6863054 NR Description: heat shock protein 90 [Oryza sativa]
  misc_feature (472)..(777): NCBI GI NO: 6863054 NR Description: heat shock protein 90 [Oryza sativa]
MAPALSRSLYTSPLTSVPITPVSSRLSHLRSSFLPHGGALRTGVSCSWNLEKRCNRFAVKCDAAVAEKETTEEGSGEKFEYQAEVSRLLDLIVHSLYSHKEVFLRELVSNASDALDKLRFLSVTEPSLLGDGGDLEIRIKPDPDNGTITITDTGIGMTKEELIDCLGTIAQSGTSKFLKALKENKDLGADNGLIGQFGVGFYSAFLVAEKVVVSTKSPKSDKQYVWESVADSSSYLIREETDPDNILRRGTQITLYLREDDKYEFAESTRIKNLVKNYSQFVGFPIYTWQEKSRTIEVEEDEPVKEGEEGEPKKKKTTKTEKYWDWELANETKPLWMRNSKEVEKGEYNEFYKKAFNEFLDPLAHTHFTTEGEVEFRSILYIPGMGPLNNEDVTNPKTKNIRLYVKRVFISDDFDGELFPRYLSFVKGVVDSDDLPLNVSREILQESRIVRIMRKRLIRKTFDMIQEISESENKEDYKKFWENFGRFLKLGCIEDTGNHKRITPLLRFFSSKNEEELTSLDDYIENMGENQKAIYYLATDSLKSAKSAPFLEKLIQKDIEVLYLVEPIDEVAIQNLQTYKEKKFVDISKEDLELGDEDEVKDREAKQEFNLLCDWIKQQLGDKVAKVQVSNRLSSSPCVLVSGKFGWSANMERLMKAQALGDTSSLEFMRGRRILEINPDHPIIKDLNAACKNAPESTEATRVVDLLYDTAIISSGFTPDSPAELGNKIYEMMAMAVGGRWGRVEEEEESSTVNEGDDKSGETEVVEPSEVRAESDPWQD

SEQ ID NO: 376 - protein, 624 aa, Arabidopsis thaliana
  peptide (1)..(624): Ceres Seq. ID no. 13591837
  misc_feature (108)..(616): Pfam Name: Pfam Description:  Hsp90 protein
  misc_feature (1)..(615): NCBI GI NO: 15231505 NR Description: heat shock protein -related [Arabidopsis thaliana]
  misc_feature (134)..(611): NCBI GI NO: 6016267 NR Description: Heat shock protein HSP 90-alpha (HSP 86)
  misc_feature (1)..(205): NCBI GI NO: 6016267 NR Description: Heat shock protein HSP 90-alpha (HSP 86)
  misc_feature (1)..(321): NCBI GI NO: 18855040 NR Description: heat shock protein 90 [Oryza sativa]
  misc_feature (316)..(621): NCBI GI NO: 18855040 NR Description: heat shock protein 90 [Oryza sativa]
  misc_feature (1)..(624): NCBI GI NO: 63509 NR Description: hsp 108 [Gallus gallus]
  misc_feature (135)..(611): NCBI GI NO: 1170383 NR Description: HEAT SHOCK PROTEIN HSP 90-ALPHA (HSP 86)
  misc_feature (1)..(163): NCBI GI NO: 1170383 NR Description: HEAT SHOCK PROTEIN HSP 90-ALPHA (HSP 86)
  misc_feature (1)..(321): NCBI GI NO: 6863054 NR Description: heat shock protein 90 [Oryza sativa]
  misc_feature (316)..(621): NCBI GI NO: 6863054 NR Description: heat shock protein 90 [Oryza sativa]
MTKEELIDCLGTIAQSGTSKFLKALKENKDLGADNGLIGQFGVGFYSAFLVAEKVVVSTKSPKSDKQYVWESVADSSSYLIREETDPDNILRRGTQITLYLREDDKYEFAESTRIKNLVKNYSQFVGFPIYTWQEKSRTIEVEEDEPVKEGEEGEPKKKKTTKTEKYWDWELANETKPLWMRNSKEVEKGEYNEFYKKAFNEFLDPLAHTHFTTEGEVEFRSILYIPGMGPLNNEDVTNPKTKNIRLYVKRVFISDDFDGELFPRYLSFVKGVVDSDDLPLNVSREILQESRIVRIMRKRLIRKTFDMIQEISESENKEDYKKFWENFGRFLKLGCIEDTGNHKRITPLLRFFSSKNEEELTSLDDYIENMGENQKAIYYLATDSLKSAKSAPFLEKLIQKDIEVLYLVEPIDEVAIQNLQTYKEKKFVDISKEDLELGDEDEVKDREAKQEFNLLCDWIKQQLGDKVAKVQVSNRLSSSPCVLVSGKFGWSANMERLMKAQALGDTSSLEFMRGRRILEINPDHPIIKDLNAACKNAPESTEATRVVDLLYDTAIISSGFTPDSPAELGNKIYEMMAMAVGGRWGRVEEEEESSTVNEGDDKSGETEVVEPSEVRAESDPWQD

SEQ ID NO: 377 - protein, 444 aa, Arabidopsis thaliana
  peptide (1)..(444): Ceres Seq. ID no. 13591838
  misc_feature (1)..(436): Pfam Name: Pfam Description:  Hsp90 protein
  misc_feature (1)..(435): NCBI GI NO: 15231505 NR Description: heat shock protein -related [Arabidopsis thaliana]
  misc_feature (1)..(431): NCBI GI NO: 6016267 NR Description: Heat shock protein HSP 90-alpha (HSP 86)
  misc_feature (1)..(25): NCBI GI NO: 6016267 NR Description: Heat shock protein HSP 90-alpha (HSP 86)
  misc_feature (1)..(141): NCBI GI NO: 18855040 NR Description: heat shock protein 90 [Oryza sativa]
  misc_feature (136)..(441): NCBI GI NO: 18855040 NR Description: heat shock protein 90 [Oryza sativa]
  misc_feature (1)..(444): NCBI GI NO: 63509 NR Description: hsp 108 [Gallus gallus]
  misc_feature (1)..(431): NCBI GI NO: 1170383 NR Description: HEAT SHOCK PROTEIN HSP 90-ALPHA (HSP 86)
  misc_feature (1)..(141): NCBI GI NO: 6863054 NR Description: heat shock protein 90 [Oryza sativa]
  misc_feature (136)..(441): NCBI GI NO: 6863054 NR Description: heat shock protein 90 [Oryza sativa]
  misc_feature (1)..(139): NCBI GI NO: 19570870 NR Description: SHEPHERD [Arabidopsis thaliana]
MRNSKEVEKGEYNEFYKKAFNEFLDPLAHTHFTTEGEVEFRSILYIPGMGPLNNEDVTNPKTKNIRLYVKRVFISDDFDGELFPRYLSFVKGVVDSDDLPLNVSREILQESRIVRIMRKRLIRKTFDMIQEISESENKEDYKKFWENFGRFLKLGCIEDTGNHKRITPLLRFFSSKNEEELTSLDDYIENMGENQKAIYYLATDSLKSAKSAPFLEKLIQKDIEVLYLVEPIDEVAIQNLQTYKEKKFVDISKEDLELGDEDEVKDREAKQEFNLLCDWIKQQLGDKVAKVQVSNRLSSSPCVLVSGKFGWSANMERLMKAQALGDTSSLEFMRGRRILEINPDHPIIKDLNAACKNAPESTEATRVVDLLYDTAIISSGFTPDSPAELGNKIYEMMAMAVGGRWGRVEEEEESSTVNEGDDKSGETEVVEPSEVRAESDPWQD

SEQ ID NO: 378 - DNA, 549 bp, Arabidopsis thaliana
  misc_feature (1)..(549): Ceres Seq. ID no. 12397083
atatcctgatttccccactcgacgctgatttcttctctgcttctgtaatttctccaattcattgatcagatcagccatggaagacgagattgaattgaaaactgctcctgctgatttccggtttcctacaacaaatcaaactaggcactgcttcactcggtacatcgagtttcacaggtgtacaactgcaaagggagaggagtctaatgactgtgaaaggtttgccaagtattaccgtgccctctgtcctggagaatgggttgacaagtggaacgagcagagggagagtggaacttttccaggtcctctttgaaccaagccttcaatcttgatgaagaggcaatcaagtccgtaataatacatggtttcaaagttaatttcttgcttgcgtgtgtatgttttggccttattatttcctctctagtgtaagtgttttattgggatgtctaagaaaggccaatcaaattataatatgaaaacattccgcttattttggttggaacttataataccaaatgcataactagactaatggtggatggaatttcc

SEQ ID NO: 379 - protein, 78 aa, Arabidopsis thaliana
  peptide (1)..(78): Ceres Seq. ID no. 12397084
  misc_feature (3)..(77): Pfam Name: Pfam Description:  Cytochrome oxidase c subunit VIb
  misc_feature (1)..(78): NCBI GI NO: 18424030 NR Description: Expressed protein; protein id: At5g57815
  misc_feature (1)..(78): NCBI GI NO: 21592329 NR Description: cytochrome c oxidase subunit 6b
  misc_feature (1)..(78): NCBI GI NO: 15234375 NR Description: putative protein; protein id: At4g28060.1
  misc_feature (4)..(78): NCBI GI NO: 9967162 NR Description: cytochrome c oxidase subunit 6b
  misc_feature (4)..(78): NCBI GI NO: 4586449 NR Description: cytochrome c oxidase subunit 6b-1
  misc_feature (3)..(78): NCBI GI NO: 15219886 NR Description: cytochrome c oxidase subunit, putative
  misc_feature (3)..(78): NCBI GI NO: 21554378 NR Description: cytochrome c oxidase subunit, putative
  misc_feature (4)..(78): NCBI GI NO: 34906824 NR Description: putative cytochrome c oxidase subunit 6b-1
  misc_feature (4)..(78): NCBI GI NO: 22204116 NR Description: putative cytochrome c oxidase subunit
  misc_feature (6)..(76): NCBI GI NO: 38048151 NR Description: similar to Drosophila melanogaster CG14235
MEDEIELKTAPADFRFPTTNQTRHCFTRYIEFHRCTTAKGEESNDCERFAKYYRALCPGEWVDKWNEQRESGTFPGPL

SEQ ID NO: 380 - protein, 41 aa, Arabidopsis thaliana
  peptide (1)..(41): Ceres Seq. ID no. 12397085
MTVKGLPSITVPSVLENGLTSGTSRGRVELFQVLFEPSLQS

SEQ ID NO: 381 - DNA, 1708 bp, Arabidopsis thaliana
  misc_feature (1)..(1708): Ceres Seq. ID no. 13580438
aaccgattcatatctttcttcttcttcctctacagcttcttcataaatctctctctcttctcctctcttctcaaagatcgaacctttcgatttcagtctcttcagagttctttcgttttcatcgaaacaatggcgaagaacgttgggatttaggctatgaatatctatttccctcccacctgtgttcaacaggaagctttggaagcacatgatggagcaagcaaagggaaatacactattggacttggccaagattgcttagctttttgcactgagcttgaagatgttatctctatgagtttcaatgcggtgacatcactttttgagaagtataagattgaccctaaccaaatcgggcgtcttgaagtaggaagtgagactgttattgacaaaagcaagtccatcaagaccttcttgatgcagctctttgagaaatgtggaaacactgatgtcgaaggtgttgactcgaccaatgcttgctatggtggaactgcagcttgttaaactgtgtcaattgggttgagagtaactcttgggatggacgttatggcctcgtcatttgtactgacagcgcggtttatgcagaaggacccgcaaggcccactggaggagctgcagcgattgctatgttgataggacctgatgctcctatcgttttcgaaagcaaattgagagcaagccacatggctcatgtctatgacttttacaagcccaatcttgctagcgagtacccggttgttgatggtaagctttcacagacttgctacctcatggctcttgactcctgctataaacatttatgcaacaagttcgagaagatcgagggcaaagagttctccataaatgatgctgattacattgttttccattctccatacaataaacttgtacagaaaagctttgccctctcttgtacaacgacttcttgagaaacgcaagctccattgacgaggctgccaaagaaaagttcaccccttattcatctttgacccttgacgagagttaccaaagccgtgatcttgaaaaggtgtcacaacaaatttcgaaaccgttttatgatgctaaagtgcaaccaacgactttaataccaaaggaagtcggtaacatgtacactgcttctctctacgctgcatttgcttccctcatccacaataaacacaatgatttggcgggaaagcgggtggttatgttctcttatggaagtggctccaccgcaacaatgttctcattacgcctcaacgacaataagcctcctttcagcatttcaaacattgcatctgtaatggatgttggcggtaaattgaaagctagacatgagtatgcacctgagaagtttgtggagacaatgaagctaatggaacataggtatggagcaaaggactttgtgacaaccaaggagggtattatagatcttttggcaccgggaacttattatctgaaagaggttgattccttgtaccggagattctatggcaagaaaggtgaagatggatctgtagccaatggacactgattcttgaaaaggaacaaatcataaaaagtcacctgaaaatgttatgttttacttgcaccattttaatcgttttataagtttgttattactttgatttagggacaaagaaggaatgtattctctgtttttatttactgtttgatttactctctcatgcaaatgataatttggaacttattggaatctctattttgc

SEQ ID NO: 382 - protein, 135 aa, Arabidopsis thaliana
  peptide (1)..(135): Ceres Seq. ID no. 13580439
  misc_feature (1)..(125): Pfam Name: Pfam Description:  Hydroxymethylglutaryl-coenzyme A synthase
  misc_feature (1)..(135): NCBI GI NO: 1143390 NR Description: hydroxymethylglutaryl-CoA synthase
  misc_feature (1)..(135): NCBI GI NO: 15234313 NR Description: hydroxymethylglutaryl-CoA synthase
  misc_feature (1)..(135): NCBI GI NO: 7799986 NR Description: HMG-CoA synthase [Brassica juncea]
  misc_feature (1)..(135): NCBI GI NO: 11192005 NR Description: HMG-CoA synthase [Brassica juncea]
  misc_feature (1)..(135): NCBI GI NO: 11192003 NR Description: HMG-CoA synthase [Brassica juncea]
  misc_feature (1)..(134): NCBI GI NO: 11192007 NR Description: HMG-CoA synthase [Brassica juncea]
  misc_feature (1)..(135): NCBI GI NO: 30681902 NR Description: hydroxymethylglutaryl-CoA synthase
  misc_feature (1)..(135): NCBI GI NO: 16417956 NR Description: hydroxymethylglutaryl coenzyme A synthase
  misc_feature (1)..(135): NCBI GI NO: 14916100 NR Description: hydroxymethylglutaryl coenzyme A synthase
  misc_feature (1)..(135): NCBI GI NO: 34902200 NR Description: Putative hydroxymethylglutaryl coenzyme A synthase
MYTASLYAAFASLIHNKHNDLAGKRVVMFSYGSGSTATMFSLRLNDNKPPFSISNIASVMDVGGKLKARHEYAPEKFVETMKLMEHRYGAKDFVTTKEGIIDLLAPGTYYLKEVDSLYRRFYGKKGEDGSVANGH

SEQ ID NO: 383 - protein, 115 aa, Arabidopsis thaliana
  peptide (1)..(115): Ceres Seq. ID no. 13580440
  misc_feature (1)..(114): Pfam Name: Pfam Description:  Hydroxymethylglutaryl-coenzyme A synthase
  misc_feature (1)..(114): NCBI GI NO: 1143390 NR Description: hydroxymethylglutaryl-CoA synthase
  misc_feature (1)..(114): NCBI GI NO: 15234313 NR Description: hydroxymethylglutaryl-CoA synthase
  misc_feature (1)..(114): NCBI GI NO: 7799986 NR Description: HMG-CoA synthase [Brassica juncea]
  misc_feature (1)..(114): NCBI GI NO: 11192005 NR Description: HMG-CoA synthase [Brassica juncea]
  misc_feature (1)..(114): NCBI GI NO: 11192003 NR Description: HMG-CoA synthase [Brassica juncea]
  misc_feature (1)..(114): NCBI GI NO: 11192007 NR Description: HMG-CoA synthase [Brassica juncea]
  misc_feature (47)..(114): NCBI GI NO: 30681902 NR Description: hydroxymethylglutaryl-CoA synthase
  misc_feature (1)..(114): NCBI GI NO: 16417956 NR Description: hydroxymethylglutaryl coenzyme A synthase
  misc_feature (1)..(114): NCBI GI NO: 14916100 NR Description: hydroxymethylglutaryl coenzyme A synthase
  misc_feature (1)..(114): NCBI GI NO: 34902200 NR Description: Putative hydroxymethylglutaryl coenzyme A synthase
MNIYFPPTCVQQEALEAHDGASKGKYTIGLGQDCLAFCTELEDVISMSFNAVTSLFEKYKIDPNQIGRLEVGSETVIDKSKSIKTFLMQLFEKCGNTDVEGVDSTNACYGGTAAC

SEQ ID NO: 384 - protein, 108 aa, Arabidopsis thaliana
  peptide (1)..(108): Ceres Seq. ID no. 13580441
  misc_feature (1)..(98): Pfam Name: Pfam Description:  Hydroxymethylglutaryl-coenzyme A synthase
  misc_feature (1)..(108): NCBI GI NO: 1143390 NR Description: hydroxymethylglutaryl-CoA synthase
  misc_feature (1)..(108): NCBI GI NO: 15234313 NR Description: hydroxymethylglutaryl-CoA synthase
  misc_feature (1)..(108): NCBI GI NO: 7799986 NR Description: HMG-CoA synthase [Brassica juncea]
  misc_feature (1)..(108): NCBI GI NO: 11192005 NR Description: HMG-CoA synthase [Brassica juncea]
  misc_feature (1)..(108): NCBI GI NO: 11192003 NR Description: HMG-CoA synthase [Brassica juncea]
  misc_feature (1)..(107): NCBI GI NO: 11192007 NR Description: HMG-CoA synthase [Brassica juncea]
  misc_feature (1)..(108): NCBI GI NO: 30681902 NR Description: hydroxymethylglutaryl-CoA synthase
  misc_feature (1)..(108): NCBI GI NO: 16417956 NR Description: hydroxymethylglutaryl coenzyme A synthase
  misc_feature (1)..(108): NCBI GI NO: 14916100 NR Description: hydroxymethylglutaryl coenzyme A synthase
  misc_feature (1)..(108): NCBI GI NO: 34902200 NR Description: Putative hydroxymethylglutaryl coenzyme A synthase
MFSYGSGSTATMFSLRLNDNKPPFSISNIASVMDVGGKLKARHEYAPEKFVETMKLMEHRYGAKDFVTTKEGIIDLLAPGTYYLKEVDSLYRRFYGKKGEDGSVANGH

SEQ ID NO: 385 - DNA, 1184 bp, Arabidopsis thaliana
  misc_feature (1)..(1184): Ceres Seq. ID no. 13488582
acacactttaacgcatttctcaaaattacgttgccaaagtctggtcagagctacaaatcaaatttgacagactgcaatttccaatccaacgactgcgaatgaagtttaatggcgactagatcgccttataagagacaaacgaagcgatccatgattcagtctcttccagcttcttcttctgcatcatctcgccgccgattcatttctcggaagaggttcgcgatgatgattcctcttgctctcctctccggcgccgttttcctattctttatgccattcaatagctggggccaatcatctggttcttctctggatctctcccataggatcaatgaaattgaaagtagttgctgagtttcctcatgatccggacgcctttactcagggtcttctttatgcgggaaacgatacactgttcgaatccactggtctatacgggaagtcttcagtgaggaaagtggatctacgaacaggaaaggttgaaattcttgaaaaaatggacaatacatattttggagagggtttaacactccttggagaaaggctctttcaagtcgcatggttgacgaacacgggtttcacatatgaccttcgcaacttaagtaaagtaaaaccatttaaacatcatatgaaagatggatggggactggctaccgatggaaaagcgttatttggaagtgatggcacttctacattatatcggatggaccctcaaacaatgaaagttactgataagcatatagtcagatataatggccgtgaggtacgttaccttaatgagctcgagtacataaacaacgaagtttgggcaaatgtgtggcagtctgattgtattgctagaatttcacccaaggacggatctctgcttggatggatactgctttcaaaattaagtcggggattgctgaaatctggacataggggtattgatgttttgaatggcatagcatgggacagtgacaagcaacgcctctttgtaacggggaaactgtggccaaagctgtaccaaatcaagctaaaacaagcatcagcaaagagccgaaattatatcgagcaacaatgcttggtatgaaaatattgtgcatggtaatggttataatgtatactggctataatttaccataatttctgaacattagcatttagcaaacttcaatgattgaagatgagaatcaaaacctcgc

SEQ ID NO: 386 - protein, 246 aa, Arabidopsis thaliana
  peptide (1)..(246): Ceres Seq. ID no. 13488583
  misc_feature (2)..(236): Pfam Name: Pfam Description:  Glutamine cyclotransferase
  misc_feature (2)..(246): NCBI GI NO: 21536884 NR Description: glutamine cyclotransferase precursor-like protein
  misc_feature (2)..(246): NCBI GI NO: 18416607 NR Description: glutamine cyclotransferase precursor
  misc_feature (2)..(246): NCBI GI NO: 7484984 NR Description: glutaminyl-peptide cyclotransferase homolog L73G19
  misc_feature (3)..(245): NCBI GI NO: 7484740 NR Description: glutaminyl-peptide cyclotransferase (EC 2
  misc_feature (1)..(244): NCBI GI NO: 24413973 NR Description: putative glutaminyl-peptide cyclotransferase
  misc_feature (1)..(233): NCBI GI NO: 16126885 NR Description: glutamine cyclotransferase
  misc_feature (1)..(229): NCBI GI NO: 21231655 NR Description: glutamine cyclotransferase
  misc_feature (1)..(231): NCBI GI NO: 22970826 NR Description: hypothetical protein [Chloroflexus aurantiacus]
  misc_feature (4)..(229): NCBI GI NO: 31790364 NR Description: putative glutamine cyclotransferase
  misc_feature (5)..(231): NCBI GI NO: 21243055 NR Description: glutamine cyclotransferase
MKLKVVAEFPHDPDAFTQGLLYAGNDTLFESTGLYGKSSVRKVDLRTGKVEILEKMDNTYFGEGLTLLGERLFQVAWLTNTGFTYDLRNLSKVKPFKHHMKDGWGLATDGKALFGSDGTSTLYRMDPQTMKVTDKHIVRYNGREVRYLNELEYINNEVWANVWQSDCIARISPKDGSLLGWILLSKLSRGLLKSGHRGIDVLNGIAWDSDKQRLFVTGKLWPKLYQIKLKQASAKSRNYIEQQCLV

SEQ ID NO: 387 - protein, 191 aa, Arabidopsis thaliana
  peptide (1)..(191): Ceres Seq. ID no. 13488584
  misc_feature (1)..(181): Pfam Name: Pfam Description:  Glutamine cyclotransferase
  misc_feature (1)..(191): NCBI GI NO: 21536884 NR Description: glutamine cyclotransferase precursor-like protein
  misc_feature (1)..(191): NCBI GI NO: 18416607 NR Description: glutamine cyclotransferase precursor
  misc_feature (1)..(191): NCBI GI NO: 7484984 NR Description: glutaminyl-peptide cyclotransferase homolog L73G19
  misc_feature (1)..(190): NCBI GI NO: 7484740 NR Description: glutaminyl-peptide cyclotransferase (EC 2
  misc_feature (1)..(189): NCBI GI NO: 24413973 NR Description: putative glutaminyl-peptide cyclotransferase
  misc_feature (1)..(178): NCBI GI NO: 16126885 NR Description: glutamine cyclotransferase
  misc_feature (1)..(174): NCBI GI NO: 21231655 NR Description: glutamine cyclotransferase
  misc_feature (1)..(176): NCBI GI NO: 22970826 NR Description: hypothetical protein [Chloroflexus aurantiacus]
  misc_feature (1)..(174): NCBI GI NO: 31790364 NR Description: putative glutamine cyclotransferase
  misc_feature (1)..(176): NCBI GI NO: 21243055 NR Description: glutamine cyclotransferase
MDNTYFGEGLTLLGERLFQVAWLTNTGFTYDLRNLSKVKPFKHHMKDGWGLATDGKALFGSDGTSTLYRMDPQTMKVTDKHIVRYNGREVRYLNELEYINNEVWANVWQSDCIARISPKDGSLLGWILLSKLSRGLLKSGHRGIDVLNGIAWDSDKQRLFVTGKLWPKLYQIKLKQASAKSRNYIEQQCLV

SEQ ID NO: 388 - protein, 147 aa, Arabidopsis thaliana
  peptide (1)..(147): Ceres Seq. ID no. 13488585
  misc_feature (1)..(137): Pfam Name: Pfam Description:  Glutamine cyclotransferase
  misc_feature (1)..(147): NCBI GI NO: 21536884 NR Description: glutamine cyclotransferase precursor-like protein
  misc_feature (1)..(147): NCBI GI NO: 18416607 NR Description: glutamine cyclotransferase precursor
  misc_feature (1)..(147): NCBI GI NO: 7484984 NR Description: glutaminyl-peptide cyclotransferase homolog L73G19
  misc_feature (1)..(146): NCBI GI NO: 7484740 NR Description: glutaminyl-peptide cyclotransferase (EC 2
  misc_feature (1)..(145): NCBI GI NO: 24413973 NR Description: putative glutaminyl-peptide cyclotransferase
  misc_feature (1)..(134): NCBI GI NO: 16126885 NR Description: glutamine cyclotransferase
  misc_feature (1)..(130): NCBI GI NO: 21231655 NR Description: glutamine cyclotransferase
  misc_feature (1)..(132): NCBI GI NO: 22970826 NR Description: hypothetical protein [Chloroflexus aurantiacus]
  misc_feature (1)..(130): NCBI GI NO: 31790364 NR Description: putative glutamine cyclotransferase
  misc_feature (1)..(132): NCBI GI NO: 21243055 NR Description: glutamine cyclotransferase
MKDGWGLATDGKALFGSDGTSTLYRMDPQTMKVTDKHIVRYNGREVRYLNELEYINNEVWANVWQSDCIARISPKDGSLLGWILLSKLSRGLLKSGHRGIDVLNGIAWDSDKQRLFVTGKLWPKLYQIKLKQASAKSRNYIEQQCLV

SEQ ID NO: 389 - DNA, 1334 bp, Arabidopsis thaliana
  misc_feature (1)..(1334): Ceres Seq. ID no. 13608536
acaaaggaaaacgttaatggtggatctgagcactgtcaatgtcatcaccaccgaagtagagttgactccactcaacagaaactgaaactggaaagtttgagacttttaagatgtcagaaacagaatttaaagtgttgcttgagacattcacatttcctgctgattctgctcccttcaagagttgtcatgcctctaccatagttgaggttgttaaagatcatttcttggctgcgtatttcggaggcaccagggaaggagcacctgatgtcaaaatctggttgcagcatttcaaggatggtcaatgggattcaccggttattgttgatgaagagccaggagttccaatgtataaccctgtcttgttcaaacttccatctcatgagctcttattgttctacaaaatcggccaggaggttcaaaaatggagtggttgcatgaaacgatcatatgataaaggtataacttggactgaaagagaacagcttcctcctgggattctcggtcctatcaaaaacaagcccattttgcttgaagacggtactctcctttgcggatcatctgttgagagttggaattcttggggagcatggatggaggtcacttcagatgcgggtagaacatggagaaagaaagggccaatatacattcaaggcaagagtcttagcgtgatccaaccagttccataccaaaccgcagctgggaacttacggattttactcagatcctttactggcattgacagaatctgtatctcagagtctttggatggcggtgagaactggagttttgcagtaccaacggttctcccaaacccaaattcaggtattgatggagtcaagcttaaggatggtaggctagtgcttgcttacaacacagactcaagaggtgtgctcaaattaggagtttctttagacgacggtgattcatggaccgatattttaacgttggaggaatctccgggaatggagtattcgtacccggctgttatacaagccggagacggcaatgtccacgtcacctatacatataacaggacacaaattaagcatgtggtgctcaagactgcgacagatatcgattcgaagccataccgacatggtgaagcaggaggaggacacgtgaacttggatttgtacgaaccaaacattaattaattagctatttgtctcttgaaccatcgatgtggagtgtgacttccttcttacggaagaacaaagaatgttctctttcttgtcttgtaagttattgattgatcgattcttgagtttgtaaaagttgccactagttgatgaatattattgagattgtttataatatatttattgtaatcatac

SEQ ID NO: 390 - protein, 347 aa, Arabidopsis thaliana
  peptide (1)..(347): Ceres Seq. ID no. 13608537
  misc_feature (1)..(347): NCBI GI NO: 30696915 NR Description: expressed protein [Arabidopsis thaliana]
  misc_feature (1)..(347): NCBI GI NO: 30696919 NR Description: expressed protein [Arabidopsis thaliana]
  misc_feature (1)..(347): NCBI GI NO: 21536870 NR Description: unknown [Arabidopsis thaliana]
  misc_feature (137)..(347): NCBI GI NO: 9759267 NR Description: gene_id:MRI1
  misc_feature (1)..(139): NCBI GI NO: 9759267 NR Description: gene_id:MRI1
  misc_feature (1)..(309): NCBI GI NO: 26452755 NR Description: unknown protein [Arabidopsis thaliana]
  misc_feature (4)..(317): NCBI GI NO: 34393670 NR Description: alpha-rhamnosidase-like protein
  misc_feature (5)..(316): NCBI GI NO: 23617011 NR Description: hypothetial protein~similar to Arabidopsis thalianachromosome 5
  misc_feature (15)..(316): NCBI GI NO: 21243816 NR Description: conserved hypothetical protein
  misc_feature (15)..(319): NCBI GI NO: 21232340 NR Description: conserved hypothetical protein
MSETEFKVLLETFTFPADSAPFKSCHASTIVEVVKDHFLAAYFGGTREGAPDVKIWLQHFKDGQWDSPVIVDEEPGVPMYNPVLFKLPSHELLLFYKIGQEVQKWSGCMKRSYDKGITWTEREQLPPGILGPIKNKPILLEDGTLLCGSSVESWNSWGAWMEVTSDAGRTWRKKGPIYIQGKSLSVIQPVPYQTAAGNLRILLRSFTGIDRICISESLDGGENWSFAVPTVLPNPNSGIDGVKLKDGRLVLAYNTDSRGVLKLGVSLDDGDSWTDILTLEESPGMEYSYPAVIQAGDGNVHVTYTYNRTQIKHVVLKTATDIDSKPYRHGEAGGGHVNLDLYEPNIN

SEQ ID NO: 391 - protein, 269 aa, Arabidopsis thaliana
  peptide (1)..(269): Ceres Seq. ID no. 13608538
  misc_feature (1)..(269): NCBI GI NO: 30696915 NR Description: expressed protein [Arabidopsis thaliana]
  misc_feature (1)..(269): NCBI GI NO: 30696919 NR Description: expressed protein [Arabidopsis thaliana]
  misc_feature (1)..(269): NCBI GI NO: 21536870 NR Description: unknown [Arabidopsis thaliana]
  misc_feature (59)..(269): NCBI GI NO: 9759267 NR Description: gene_id:MRI1
  misc_feature (1)..(61): NCBI GI NO: 9759267 NR Description: gene_id:MRI1
  misc_feature (1)..(231): NCBI GI NO: 26452755 NR Description: unknown protein [Arabidopsis thaliana]
  misc_feature (1)..(239): NCBI GI NO: 34393670 NR Description: alpha-rhamnosidase-like protein
  misc_feature (1)..(238): NCBI GI NO: 23617011 NR Description: hypothetial protein~similar to Arabidopsis thalianachromosome 5
  misc_feature (1)..(238): NCBI GI NO: 21243816 NR Description: conserved hypothetical protein
  misc_feature (1)..(241): NCBI GI NO: 21232340 NR Description: conserved hypothetical protein
MYNPVLFKLPSHELLLFYKIGQEVQKWSGCMKRSYDKGITWTEREQLPPGILGPIKNKPILLEDGTLLCGSSVESWNSWGAWMEVTSDAGRTWRKKGPIYIQGKSLSVIQPVPYQTAAGNLRILLRSFTGIDRICISESLDGGENWSFAVPTVLPNPNSGIDGVKLKDGRLVLAYNTDSRGVLKLGVSLDDGDSWTDILTLEESPGMEYSYPAVIQAGDGNVHVTYTYNRTQIKHVVLKTATDIDSKPYRHGEAGGGHVNLDLYEPNIN

SEQ ID NO: 392 - protein, 239 aa, Arabidopsis thaliana
  peptide (1)..(239): Ceres Seq. ID no. 13608539
  misc_feature (1)..(239): NCBI GI NO: 30696915 NR Description: expressed protein [Arabidopsis thaliana]
  misc_feature (1)..(239): NCBI GI NO: 30696919 NR Description: expressed protein [Arabidopsis thaliana]
  misc_feature (1)..(239): NCBI GI NO: 21536870 NR Description: unknown [Arabidopsis thaliana]
  misc_feature (29)..(239): NCBI GI NO: 9759267 NR Description: gene_id:MRI1
  misc_feature (1)..(31): NCBI GI NO: 9759267 NR Description: gene_id:MRI1
  misc_feature (1)..(201): NCBI GI NO: 26452755 NR Description: unknown protein [Arabidopsis thaliana]
  misc_feature (1)..(209): NCBI GI NO: 34393670 NR Description: alpha-rhamnosidase-like protein
  misc_feature (1)..(208): NCBI GI NO: 23617011 NR Description: hypothetial protein~similar to Arabidopsis thalianachromosome 5
  misc_feature (1)..(208): NCBI GI NO: 21243816 NR Description: conserved hypothetical protein
  misc_feature (1)..(211): NCBI GI NO: 21232340 NR Description: conserved hypothetical protein
MKRSYDKGITWTEREQLPPGILGPIKNKPILLEDGTLLCGSSVESWNSWGAWMEVTSDAGRTWRKKGPIYIQGKSLSVIQPVPYQTAAGNLRILLRSFTGIDRICISESLDGGENWSFAVPTVLPNPNSGIDGVKLKDGRLVLAYNTDSRGVLKLGVSLDDGDSWTDILTLEESPGMEYSYPAVIQAGDGNVHVTYTYNRTQIKHVVLKTATDIDSKPYRHGEAGGGHVNLDLYEPNIN

SEQ ID NO: 393 - DNA, 1343 bp, Arabidopsis thaliana
  misc_feature (1)..(1343): Ceres Seq. ID no. 12333607
atcttcaccatcttcaatccatccgcccttgcagaccagagtcaaatccgcagcacaacaagccaatggctccatttctcggaggacctcagccaatcaactattgaagtctccatccccaccataatcgccgcctttctctcgttcttcgccgcctctatctccagcgccggaggaatcggcggcggtggactcttcctctcgataatgacaatcatcgccggtctcgaaatgaaaacagcttcaagcttctcagcgttcatggtaaccggcgtctctttcgctaacgtgggatgcaatcttttcctgagaaaccctaaatcaagagacaaaaccctaatcgacttcgatttagctcttactattcagccatgtctacttctcggagtaagtattggtgtgatctgtaaccgtatgttcccaaattggcttgtgttgtttctcttcgctgtgttcctcgcctggtcaacgatgaagacttgtaaaaagggagtttcttactggaatttggagtcggaaagagcgaagattaagagtccaagagacgttgatggcatcgaggtagcgagatcgccgcttctgagtgaagaaagagaagatgtgagacagagagggatgattaggtttccatggatgaagcttggagttttagtgatcatttggttattgttcttctctattaatcttttccgcggaaacaaatacggtcagggaatcatatcgatcaagccatgtggagctctctactggttcctctcctcgcttcaaatacctctcactatcttctttactctctgcatttacttcagtgacaatgttcaaagcaaccacacatcgcatagtaaccaaaactctgaacaggagactggagttggaggaagacaaaacaagttgatgctccctgtaatggctctcttggctggagttttgggtggcctctttggtattggtggtggaatgctcattagtcctcttcttctccaaatcggtattgctccagaggtaactgcagctacatgttcgttcatggttttgttttcttcatcaatgtctgcaatccagtacctactactaggcatggaacatgctggaaccgctgcgatatttgctctggtctgtttcgtggcatcactggttggactaatggtggttaagaaggttatagccaagtatgggagggcttcgatcattgtgtttgcagttggtatcgtcatggcacttagcactgtactgatgacaacccatggagcttttaatgtttggaatgattttgtctctggtcgctacatgggtttcaaattaccctgttaagaaccaaaattaaataaatccagttcttgttt

SEQ ID NO: 394 - protein, 436 aa, Arabidopsis thaliana
  peptide (1)..(436): Ceres Seq. ID no. 12333608
  misc_feature (1)..(436): NCBI GI NO: 15220419 NR Description: hypothetical protein; protein id: At1g11540.1
  misc_feature (12)..(436): NCBI GI NO: 6554197 NR Description: T23J18.20 [Arabidopsis thaliana]
  misc_feature (7)..(436): NCBI GI NO: 15220600 NR Description: unknown protein; protein id: At1g61740
  misc_feature (52)..(436): NCBI GI NO: 11358507 NR Description: membrane protein
  misc_feature (22)..(366): NCBI GI NO: 15233579 NR Description: hypothetical protein; protein id: At4g21250.1
  misc_feature (386)..(436): NCBI GI NO: 15233579 NR Description: hypothetical protein; protein id: At4g21250.1
  misc_feature (11)..(436): NCBI GI NO: 34908754 NR Description: P0415A04.10
  misc_feature (32)..(417): NCBI GI NO: 34908752 NR Description: P0415A04.9
  misc_feature (307)..(436): NCBI GI NO: 15233581 NR Description: hypothetical protein; protein id: At4g21260.1
  misc_feature (68)..(190): NCBI GI NO: 15233581 NR Description: hypothetical protein; protein id: At4g21260.1
IFTIFNPSALADQSQIRSTTSQWLHFSEDLSQSTIEVSIPTIIAAFLSFFAASISSAGGIGGGGLFLSIMTIIAGLEMKTASSFSAFMVTGVSFANVGCNLFLRNPKSRDKTLIDFDLALTIQPCLLLGVSIGVICNRMFPNWLVLFLFAVFLAWSTMKTCKKGVSYWNLESERAKIKSPRDVDGIEVARSPLLSEEREDVRQRGMIRFPWMKLGVLVIIWLLFFSINLFRGNKYGQGIISIKPCGALYWFLSSLQIPLTIFFTLCIYFSDNVQSNHTSHSNQNSEQETGVGGRQNKLMLPVMALLAGVLGGLFGIGGGMLISPLLLQIGIAPEVTAATCSFMVLFSSSMSAIQYLLLGMEHAGTAAIFALVCFVASLVGLMVVKKVIAKYGRASIIVFAVGIVMALSTVLMTTHGAFNVWNDFVSGRYMGFKLPC

SEQ ID NO: 395 - protein, 367 aa, Arabidopsis thaliana
  peptide (1)..(367): Ceres Seq. ID no. 12333609
  misc_feature (1)..(367): NCBI GI NO: 15220419 NR Description: hypothetical protein; protein id: At1g11540.1
  misc_feature (1)..(367): NCBI GI NO: 6554197 NR Description: T23J18.20 [Arabidopsis thaliana]
  misc_feature (1)..(367): NCBI GI NO: 15220600 NR Description: unknown protein; protein id: At1g61740
  misc_feature (1)..(367): NCBI GI NO: 11358507 NR Description: membrane protein
  misc_feature (1)..(297): NCBI GI NO: 15233579 NR Description: hypothetical protein; protein id: At4g21250.1
  misc_feature (317)..(367): NCBI GI NO: 15233579 NR Description: hypothetical protein; protein id: At4g21250.1
  misc_feature (1)..(367): NCBI GI NO: 34908754 NR Description: P0415A04.10
  misc_feature (1)..(348): NCBI GI NO: 34908752 NR Description: P0415A04.9
  misc_feature (238)..(367): NCBI GI NO: 15233581 NR Description: hypothetical protein; protein id: At4g21260.1
  misc_feature (1)..(121): NCBI GI NO: 15233581 NR Description: hypothetical protein; protein id: At4g21260.1
MTIIAGLEMKTASSFSAFMVTGVSFANVGCNLFLRNPKSRDKTLIDFDLALTIQPCLLLGVSIGVICNRMFPNWLVLFLFAVFLAWSTMKTCKKGVSYWNLESERAKIKSPRDVDGIEVARSPLLSEEREDVRQRGMIRFPWMKLGVLVIIWLLFFSINLFRGNKYGQGIISIKPCGALYWFLSSLQIPLTIFFTLCIYFSDNVQSNHTSHSNQNSEQETGVGGRQNKLMLPVMALLAGVLGGLFGIGGGMLISPLLLQIGIAPEVTAATCSFMVLFSSSMSAIQYLLLGMEHAGTAAIFALVCFVASLVGLMVVKKVIAKYGRASIIVFAVGIVMALSTVLMTTHGAFNVWNDFVSGRYMGFKLPC

SEQ ID NO: 396 - protein, 359 aa, Arabidopsis thaliana
  peptide (1)..(359): Ceres Seq. ID no. 12333610
  misc_feature (1)..(359): NCBI GI NO: 15220419 NR Description: hypothetical protein; protein id: At1g11540.1
  misc_feature (1)..(359): NCBI GI NO: 6554197 NR Description: T23J18.20 [Arabidopsis thaliana]
  misc_feature (1)..(359): NCBI GI NO: 15220600 NR Description: unknown protein; protein id: At1g61740
  misc_feature (1)..(359): NCBI GI NO: 11358507 NR Description: membrane protein
  misc_feature (1)..(289): NCBI GI NO: 15233579 NR Description: hypothetical protein; protein id: At4g21250.1
  misc_feature (309)..(359): NCBI GI NO: 15233579 NR Description: hypothetical protein; protein id: At4g21250.1
  misc_feature (1)..(359): NCBI GI NO: 34908754 NR Description: P0415A04.10
  misc_feature (1)..(340): NCBI GI NO: 34908752 NR Description: P0415A04.9
  misc_feature (230)..(359): NCBI GI NO: 15233581 NR Description: hypothetical protein; protein id: At4g21260.1
  misc_feature (1)..(113): NCBI GI NO: 15233581 NR Description: hypothetical protein; protein id: At4g21260.1
MKTASSFSAFMVTGVSFANVGCNLFLRNPKSRDKTLIDFDLALTIQPCLLLGVSIGVICNRMFPNWLVLFLFAVFLAWSTMKTCKKGVSYWNLESERAKIKSPRDVDGIEVARSPLLSEEREDVRQRGMIRFPWMKLGVLVIIWLLFFSINLFRGNKYGQGIISIKPCGALYWFLSSLQIPLTIFFTLCIYFSDNVQSNHTSHSNQNSEQETGVGGRQNKLMLPVMALLAGVLGGLFGIGGGMLISPLLLQIGIAPEVTAATCSFMVLFSSSMSAIQYLLLGMEHAGTAAIFALVCFVASLVGLMVVKKVIAKYGRASIIVFAVGIVMALSTVLMTTHGAFNVWNDFVSGRYMGFKLPC

SEQ ID NO: 397 - DNA, 1624 bp, Arabidopsis thaliana
  misc_feature (1)..(1624): Ceres Seq. ID no. 12738384
gtcgatttagccctaacctatacggctgctacatccagatttcctcatcctctattagggaagaagaaccaaaaccctaatcctatcttctcctcttataaatcgcttcaacaacagtttctttctcttctgatttgatccatgatttctcatctggaaccctagtttatacatccatcgggtgttactgttctttatctgggcaatcagtggttagtcaaaagtataggattttcatttaaagatttgattttgcgttgaaatcgaacgaacccagatttcatattttgtctctgttttggcttttttatctttttaggtgtttttgttccttttgtatatctgtcgagacttctaggtgtgaaatcaaagcttgtttggtttatatcgatcttggttttagctgaatcgttgttaagatggctggaggtggaaacaggagagatgaaggatcgatcacgatccagagcactaatttgtttgcagcattggacactcgtaagaagaagaagaagtctgacaaggcagggaagagcaaagggtcttctaagtcacgagagccagagaaggagcctgagcctcaggtctattgggctcctacgcctttgaaagttaagtcttgggctgatattgatgatgaagacgacgatgatgactattatgcaaccactgctcctcctcagtctggttggagtacttctctgccttcccatactgattccaaagacgttcatgttgaggaaagtgaaagtgaggaagatattcttgatgaaggtgatgatgatgtggaggaagagcaggaacaggaaacagaggtacaggttcatccagagcctgaggtgaagaaagctcctgaagttcctgcacctcctaaagaggcagagaggcaactttccaagaaagagaggaaaaagaaggaacttgctgagcttgaagctttgttggctgattttggagttgcccccaaggagaacaatggcctagaggaatctcaagaggctggacaagaaaagaaagaagatgtcaatggagagggagagaagaaggagaatgcagcaggtggggagtcaaaggcatcaaaaaagaagaaaaagaaggataagcagaaggaggtaaaagaatctcaagagcaacaagcaaacaacaatgccgatgctgtagatgaagctgctgggtctgaaccaactgaggaagaatctccaattgacgtcaaggaaaggataaagaagcttgcatccatgaagaagaagaagtcaggcaaagaggtggatgctgcagctaaagctgctgcggaggaggcagctgcaagacgtaagaagctggccgcggcaaagaagaaggagaagaatcactataaccaacagcctgtgcggtaaaatcctgaatcaccaccattttgatcttgatggaaatgcaaatatgaacatgtatttcgccgtatattgttcatatgagtctctgtcctaataaatcttttgaagggtctggttcttagagttaaagacattgaatcctttttctagtcttattacaatgaacaggctaaagacaaaactactctctggagattttcatttctttttgaacacctttgttttcttaatatcagaccttttttaggttc

SEQ ID NO: 398 - protein, 318 aa, Arabidopsis thaliana
  peptide (1)..(318): Ceres Seq. ID no. 12738385
  misc_feature (95)..(315): Pfam Name: Pfam Description:  Caldesmon
  misc_feature (1)..(318): NCBI GI NO: 18400901 NR Description: expressed protein; protein id: At2g25670
  misc_feature (1)..(318): NCBI GI NO: 21537167 NR Description: unknown [Arabidopsis thaliana]
  misc_feature (1)..(318): NCBI GI NO: 17529066 NR Description: unknown protein [Arabidopsis thaliana]
  misc_feature (1)..(318): NCBI GI NO: 15233865 NR Description: putative protein; protein id: At4g32610.1
  misc_feature (1)..(318): NCBI GI NO: 33620414 NR Description: M355 [Lilium longiflorum]
  misc_feature (108)..(318): NCBI GI NO: 34906156 NR Description: P0509B06.15
  misc_feature (1)..(130): NCBI GI NO: 34906156 NR Description: P0509B06.15
  misc_feature (107)..(318): NCBI GI NO: 7522210 NR Description: hypothetical protein pAFD103 - apple tree
  misc_feature (25)..(301): NCBI GI NO: 8096269 NR Description: KED [Nicotiana tabacum]
  misc_feature (25)..(308): NCBI GI NO: 23001116 NR Description: hypothetical protein [Magnetococcus sp. MC-1]
MAGGGNRRDEGSITIQSTNLFAALDTRKKKKKSDKAGKSKGSSKSREPEKEPEPQVYWAPTPLKVKSWADIDDEDDDDDYYATTAPPQSGWSTSLPSHTDSKDVHVEESESEEDILDEGDDDVEEEQEQETEVQVHPEPEVKKAPEVPAPPKEAERQLSKKERKKKELAELEALLADFGVAPKENNGLEESQEAGQEKKEDVNGEGEKKENAAGGESKASKKKKKKDKQKEVKESQEQQANNNADAVDEAAGSEPTEEESPIDVKERIKKLASMKKKKSGKEVDAAAKAAAEEAAARRKKLAAAKKKEKNHYNQQPVR

SEQ ID NO: 399 - DNA, 919 bp, Arabidopsis thaliana
  misc_feature (1)..(919): Ceres Seq. ID no. 13497757
aacattcatttggaggaggagacctgaatctttgcaatctcgcaacagaaacggcgatgggaagatcagctctgattcacttgcttcgctcccaatcccgacgtctctcttcctccaccttcacttcaggatatcatcaccggtcaatagcaggatcatggtcatcatcagtgaacccgaaggtcagattccaggttccatcccttagccagagaagctgggcatcatttggagcaaagactagagaggacgatgatgagcacaagatcagcatcggaccccaagagaagaaagaagagaaggatggaggtgtggtttactatggaccaatctcatcaaccataaagaaagtgaaactcctctcactctccacttgctgtctatcagtctctcttggcccggtcatcactttcatgacttccccgggactgaatgtgatcatgaaaggtgctgttgcctctactgtgatcttccttagcgcatccacaaccgctgctctccactggtttgttagtccctacgtgcacaagctgaggtggcagcctggttcagacacttttgaggtcgagatgatgacttggctcggcacatttagcgcaaagacactgaaattctcagacatacgttatccagacacgcaaagaccgtatgtgagcttcaaggctgatgggaatttctactttgtggatgcagatcattgccctaacaaggcattgttggctaggctcactcctccaaaggatgctcatgactctgctttcaagaacttgtaatccaaattcgtttcttttgttatactctttttttgggtgtggatttttgttgggtttgtaagctctttaagatacttggatacctcctccccttctcatcactaatacccaaaaaaaatgcaaataagaaaagaccggtttgatcc

SEQ ID NO: 400 - protein, 256 aa, Arabidopsis thaliana
  peptide (1)..(256): Ceres Seq. ID no. 13497758
  misc_feature (19)..(256): NCBI GI NO: 18403955 NR Description: expressed protein [Arabidopsis thaliana]
  misc_feature (69)..(256): NCBI GI NO: 29126334 NR Description: unknown protein
HSFGGGDLNLCNLATETAMGRSALIHLLRSQSRRLSSSTFTSGYHHRSIAGSWSSSVNPKVRFQVPSLSQRSWASFGAKTREDDDEHKISIGPQEKKEEKDGGVVYYGPISSTIKKVKLLSLSTCCLSVSLGPVITFMTSPGLNVIMKGAVASTVIFLSASTTAALHWFVSPYVHKLRWQPGSDTFEVEMMTWLGTFSAKTLKFSDIRYPDTQRPYVSFKADGNFYFVDADHCPNKALLARLTPPKDAHDSAFKNL

SEQ ID NO: 401 - protein, 238 aa, Arabidopsis thaliana
  peptide (1)..(238): Ceres Seq. ID no. 13497759
  misc_feature (1)..(238): NCBI GI NO: 18403955 NR Description: expressed protein [Arabidopsis thaliana]
  misc_feature (51)..(238): NCBI GI NO: 29126334 NR Description: unknown protein
MGRSALIHLLRSQSRRLSSSTFTSGYHHRSIAGSWSSSVNPKVRFQVPSLSQRSWASFGAKTREDDDEHKISIGPQEKKEEKDGGVVYYGPISSTIKKVKLLSLSTCCLSVSLGPVITFMTSPGLNVIMKGAVASTVIFLSASTTAALHWFVSPYVHKLRWQPGSDTFEVEMMTWLGTFSAKTLKFSDIRYPDTQRPYVSFKADGNFYFVDADHCPNKALLARLTPPKDAHDSAFKNL

SEQ ID NO: 402 - DNA, 893 bp, Arabidopsis thaliana
  misc_feature (1)..(893): Ceres Seq. ID no. 13491749
tggccgacagtttgaagtaaagccagcaaatcgtgaaagccatttacttttagatctctctctgcactctctgactttgtccgcaaagtagatctgctgcaatggcttctcctcttctcccaacttcgactactcctgatcaacttcccggcggcgatccacagttgctgagctctctacgcgtcctcttgtcccgcgttctagccaccgtccgtcacgcttctgcagatgccagaccctgggcagagctcgttgaccggtcagcgttttcccggccaccatcgctctcggaggcaacgtcacgagtaaggaagaacttttcctatttccgagccaattacataaccttagtggcaatcttactcgccgcgtctctgctcacgcaccctttcgctctcttcctcctcgcatcgctggccgcttcttggcttttcctctactttttccgtccggcggatcagccgttggtcattggaggacgcacgttctccgatcttgagacgctagggatactctgcctgtccactgtggtggtgatgttcatgaccagcgttggatcgctcttgatgtccactctagcagttgggatcatgggcgtggccatccacggagcgtttcgtgctcccgaagacctgtttcttgaagaacaagaagccattggatctggacttttcgcattcttcaacaacaatgcctctaatgcagctgccgctgccatagccacctcagcaatgtcacgcgttcgagtctgagattgttgaagagactacattcctacaccgcatttccaaagtgtgatatttattcatattgaattgttgtaacttgtaaccattcttttgtcatttctgttttgtttactttgttgctggaattttgaaacacaattcatc

SEQ ID NO: 403 - protein, 216 aa, Arabidopsis thaliana
  peptide (1)..(216): Ceres Seq. ID no. 13491750
  misc_feature (1)..(216): NCBI GI NO: 15240698 NR Description: expressed protein [Arabidopsis thaliana]
  misc_feature (1)..(214): NCBI GI NO: 15239101 NR Description: expressed protein [Arabidopsis thaliana]
  misc_feature (1)..(214): NCBI GI NO: 18072825 NR Description: prenylated Rab receptor 2 [Arabidopsis thaliana]
  misc_feature (2)..(206): NCBI GI NO: 15226664 NR Description: expressed protein [Arabidopsis thaliana]
  misc_feature (1)..(207): NCBI GI NO: 15224494 NR Description: expressed protein [Arabidopsis thaliana]
  misc_feature (4)..(214): NCBI GI NO: 15241022 NR Description: expressed protein [Arabidopsis thaliana]
  misc_feature (1)..(204): NCBI GI NO: 15228824 NR Description: expressed protein [Arabidopsis thaliana]
  misc_feature (1)..(204): NCBI GI NO: 15450978 NR Description: putative protein [Arabidopsis thaliana]
  misc_feature (1)..(192): NCBI GI NO: 40539036 NR Description: putative prenylated rab acceptor protein
  misc_feature (29)..(197): NCBI GI NO: 18390939 NR Description: expressed protein [Arabidopsis thaliana]
MASPLLPTSTTPDQLPGGDPQLLSSLRVLLSRVLATVRHASADARPWAELVDRSAFSRPPSLSEATSRVRKNFSYFRANYITLVAILLAASLLTHPFALFLLASLAASWLFLYFFRPADQPLVIGGRTFSDLETLGILCLSTVVVMFMTSVGSLLMSTLAVGIMGVAIHGAFRAPEDLFLEEQEAIGSGLFAFFNNNASNAAAAAIATSAMSRVRV

SEQ ID NO: 404 - DNA, 1980 bp, Arabidopsis thaliana
  misc_feature (1)..(1980): Ceres Seq. ID no. 13489005
ctacgtcagggaaaaaacaatggcatcatcatcatcatcacatttgttttgacgctccaagaaaatttgcatggcgacacattctatgatcattccttctccttcttcttcttcctcgtctctcgctactgctgcgtctccgtttaaagagactctaccactctttagtagatctctcacattcccgagaaaatccttgttttctcaggttcgcttgagattcttcgccgagaaacattctcagcttgatacttcaaatgggtgtgccactaatttcgcttctttacaagattctggagatcaacttacagaggaacatgttacaaaaggagagtctactcttagtattacagttgttggagcgtcaggggacttagccaagaagaagatatttcctgcattgtttgctctcttttatgagggttgtcttcctcaggacttttctgtttttggttatgctcggactaaactcactcatgaagagcttcgtgacatgattagtagtactttaacttgccggattgatcagagggaaaaatgtggggataagatggagcagttcttgaaaagatgcttttaccattcgggtcagtataactcggaagaggattttgcggaactaaacaagaagctcaaagagaaagaggcaggaaagatatcaaacaggctgtactatttgtcgatacccccaaacatattcgttgatgtggttaggtgtgcaagtcttagagcctcctcagagaatggctggacaagggtcattgtggaaaagccatttggtcgtgactctgaatcatccggagagttaactagatgtctgaaacagtatcttacagaggagcaaatcttcaggattgatcactatttgggaaaggagcttgttgagaacctttcagtgctccgattctcaaatcttgttttcgagcctctgtggtcaagaaattacatacgcaacgttcagctgattttttctgaggatttcggaacagaagggcgtggaggttactttgatcaatatggaatcatacgagacatcatgcaaaaccatctcttgcaaatacttgcactttttgcaatggagacgccagtgagcttagatgctgaggacataagaagtgaaaaggtgaaagttttgagatcaatgaaaccgttgcggcttgaagatgtggttgttggtcaatacaaaggccataacaagggaggaaaaacttatccaggttatacagacgatccaacggttccaaatcacagtctcactcctacatttgctgcagcagccatgttcatcaacaatgcgagatgggacggtgttccttttcttatgaaagctggaaaagctctccataccagaggagcagagatcagagttcagttcagacatgtcccaggaaacttgtacaagaaaagttttgctactaatttagacaatgcaacaaatgaactagtgattagagttcagcctgatgaagggatatacctgaggatcaacaacaaagttcctggtcttggaatgagactagatcgcagcgaccttaaccttctatatcgatccaggtatccaagagagataccagatgcatatgaaagactgcttctcgatgcaatcgaaggagagaggaggttgtttatcagaagtgatgagctagatgcagcatgggatctattcacaccggctttgaaggaactagaggagaagaaaatcattcctgagctctatccatatggaagcagaggtcctgttggtgcacattaccttgcatctaagtacaatgtgagatggggagatcttggagaagcttaagctttcgacagaaacaatatgatttggtgttaatatgagtaaactaacttgtcgatattatcaatgcgtagataaatccttgttaccaaaacttgctttttctctgacattttttgattgtttttggttctaaatcgagcatttcggaggaatgtaccaaaactcttgcaggaatagac

SEQ ID NO: 405 - protein, 576 aa, Arabidopsis thaliana
  peptide (1)..(576): Ceres Seq. ID no. 13489006
  misc_feature (86)..(273): Pfam Name: Pfam Description:  Glucose-6-phosphate dehydrogenase
  misc_feature (1)..(576): NCBI GI NO: 15238612 NR Description: glucose-6-phosphate dehydrogenase
  misc_feature (1)..(576): NCBI GI NO: 3021305 NR Description: plastidic glucose-6-phosphate dehydrogenase
  misc_feature (64)..(576): NCBI GI NO: 1174336 NR Description: glucose-6-phosphate 1-dehydrogenase
  misc_feature (14)..(573): NCBI GI NO: 3023818 NR Description: Glucose-6-phosphate 1-dehydrogenase
  misc_feature (10)..(573): NCBI GI NO: 7431274 NR Description: glucose-6-phosphate 1-dehydrogenase (EC 1
  misc_feature (36)..(575): NCBI GI NO: 3334193 NR Description: Glucose-6-phosphate 1-dehydrogenase
  misc_feature (53)..(573): NCBI GI NO: 33304517 NR Description: putative plastidic glucose-6-phosphate dehydrogenase
  misc_feature (13)..(573): NCBI GI NO: 24745908 NR Description: glucose 6-phosphate dehydrogenase
  misc_feature (86)..(573): NCBI GI NO: 9392607 NR Description: plastidic glucose 6-phosphate dehydrogenase
  misc_feature (13)..(573): NCBI GI NO: 5734502 NR Description: glucose-6-phosphate 1-dehydrogenase
MATHSMIIPSPSSSSSSLATAASPFKETLPLFSRSLTFPRKSLFSQVRLRFFAEKHSQLDTSNGCATNFASLQDSGDQLTEEHVTKGESTLSITVVGASGDLAKKKIFPALFALFYEGCLPQDFSVFGYARTKLTHEELRDMISSTLTCRIDQREKCGDKMEQFLKRCFYHSGQYNSEEDFAELNKKLKEKEAGKISNRLYYLSIPPNIFVDVVRCASLRASSENGWTRVIVEKPFGRDSESSGELTRCLKQYLTEEQIFRIDHYLGKELVENLSVLRFSNLVFEPLWSRNYIRNVQLIFSEDFGTEGRGGYFDQYGIIRDIMQNHLLQILALFAMETPVSLDAEDIRSEKVKVLRSMKPLRLEDVVVGQYKGHNKGGKTYPGYTDDPTVPNHSLTPTFAAAAMFINNARWDGVPFLMKAGKALHTRGAEIRVQFRHVPGNLYKKSFATNLDNATNELVIRVQPDEGIYLRINNKVPGLGMRLDRSDLNLLYRSRYPREIPDAYERLLLDAIEGERRLFIRSDELDAAWDLFTPALKELEEKKIIPELYPYGSRGPVGAHYLASKYNVRWGDLGEA

SEQ ID NO: 406 - protein, 571 aa, Arabidopsis thaliana
  peptide (1)..(571): Ceres Seq. ID no. 13489007
  misc_feature (81)..(268): Pfam Name: Pfam Description:  Glucose-6-phosphate dehydrogenase
  misc_feature (1)..(571): NCBI GI NO: 15238612 NR Description: glucose-6-phosphate dehydrogenase
  misc_feature (1)..(571): NCBI GI NO: 3021305 NR Description: plastidic glucose-6-phosphate dehydrogenase
  misc_feature (59)..(571): NCBI GI NO: 1174336 NR Description: glucose-6-phosphate 1-dehydrogenase
  misc_feature (9)..(568): NCBI GI NO: 3023818 NR Description: Glucose-6-phosphate 1-dehydrogenase
  misc_feature (5)..(568): NCBI GI NO: 7431274 NR Description: glucose-6-phosphate 1-dehydrogenase (EC 1
  misc_feature (31)..(570): NCBI GI NO: 3334193 NR Description: Glucose-6-phosphate 1-dehydrogenase
  misc_feature (48)..(568): NCBI GI NO: 33304517 NR Description: putative plastidic glucose-6-phosphate dehydrogenase
  misc_feature (8)..(568): NCBI GI NO: 24745908 NR Description: glucose 6-phosphate dehydrogenase
  misc_feature (81)..(568): NCBI GI NO: 9392607 NR Description: plastidic glucose 6-phosphate dehydrogenase
  misc_feature (8)..(568): NCBI GI NO: 5734502 NR Description: glucose-6-phosphate 1-dehydrogenase
MIIPSPSSSSSSLATAASPFKETLPLFSRSLTFPRKSLFSQVRLRFFAEKHSQLDTSNGCATNFASLQDSGDQLTEEHVTKGESTLSITVVGASGDLAKKKIFPALFALFYEGCLPQDFSVFGYARTKLTHEELRDMISSTLTCRIDQREKCGDKMEQFLKRCFYHSGQYNSEEDFAELNKKLKEKEAGKISNRLYYLSIPPNIFVDVVRCASLRASSENGWTRVIVEKPFGRDSESSGELTRCLKQYLTEEQIFRIDHYLGKELVENLSVLRFSNLVFEPLWSRNYIRNVQLIFSEDFGTEGRGGYFDQYGIIRDIMQNHLLQILALFAMETPVSLDAEDIRSEKVKVLRSMKPLRLEDVVVGQYKGHNKGGKTYPGYTDDPTVPNHSLTPTFAAAAMFINNARWDGVPFLMKAGKALHTRGAEIRVQFRHVPGNLYKKSFATNLDNATNELVIRVQPDEGIYLRINNKVPGLGMRLDRSDLNLLYRSRYPREIPDAYERLLLDAIEGERRLFIRSDELDAAWDLFTPALKELEEKKIIPELYPYGSRGPVGAHYLASKYNVRWGDLGEA

SEQ ID NO: 407 - protein, 435 aa, Arabidopsis thaliana
  peptide (1)..(435): Ceres Seq. ID no. 13489008
  misc_feature (1)..(132): Pfam Name: Pfam Description:  Glucose-6-phosphate dehydrogenase
  misc_feature (1)..(435): NCBI GI NO: 15238612 NR Description: glucose-6-phosphate dehydrogenase
  misc_feature (1)..(435): NCBI GI NO: 3021305 NR Description: plastidic glucose-6-phosphate dehydrogenase
  misc_feature (1)..(435): NCBI GI NO: 1174336 NR Description: glucose-6-phosphate 1-dehydrogenase
  misc_feature (1)..(432): NCBI GI NO: 3023818 NR Description: Glucose-6-phosphate 1-dehydrogenase
  misc_feature (1)..(432): NCBI GI NO: 7431274 NR Description: glucose-6-phosphate 1-dehydrogenase (EC 1
  misc_feature (1)..(434): NCBI GI NO: 3334193 NR Description: Glucose-6-phosphate 1-dehydrogenase
  misc_feature (1)..(432): NCBI GI NO: 33304517 NR Description: putative plastidic glucose-6-phosphate dehydrogenase
  misc_feature (1)..(432): NCBI GI NO: 24745908 NR Description: glucose 6-phosphate dehydrogenase
  misc_feature (1)..(432): NCBI GI NO: 9392607 NR Description: plastidic glucose 6-phosphate dehydrogenase
  misc_feature (1)..(432): NCBI GI NO: 5734502 NR Description: glucose-6-phosphate 1-dehydrogenase
MISSTLTCRIDQREKCGDKMEQFLKRCFYHSGQYNSEEDFAELNKKLKEKEAGKISNRLYYLSIPPNIFVDVVRCASLRASSENGWTRVIVEKPFGRDSESSGELTRCLKQYLTEEQIFRIDHYLGKELVENLSVLRFSNLVFEPLWSRNYIRNVQLIFSEDFGTEGRGGYFDQYGIIRDIMQNHLLQILALFAMETPVSLDAEDIRSEKVKVLRSMKPLRLEDVVVGQYKGHNKGGKTYPGYTDDPTVPNHSLTPTFAAAAMFINNARWDGVPFLMKAGKALHTRGAEIRVQFRHVPGNLYKKSFATNLDNATNELVIRVQPDEGIYLRINNKVPGLGMRLDRSDLNLLYRSRYPREIPDAYERLLLDAIEGERRLFIRSDELDAAWDLFTPALKELEEKKIIPELYPYGSRGPVGAHYLASKYNVRWGDLGEA

SEQ ID NO: 408 - DNA, 637 bp, Arabidopsis thaliana
  misc_feature (1)..(637): Ceres Seq. ID no. 12322668
attattgttgagtgttgagtttttttcgctccgcctctctgaaactcgccgctagtaagcttcttcttcacttgtgctcttcttcgacgagatgaaccgtattggattgataaggggatcatcatccaaggatgtagtccggagaacgtttgcagcagcagctagtaaagccaagaaaggtggcaaaggaggtggagccagcgatgctcctaaaggttccagcttgaccaaagagatcaaatccaccactgttgttggtgccaatactctcaaagacggatctgatcccaagatcttgcctgattctgattaccctgattggctctggcatctcctcgataagcgaccagctctcagtgagcttaggaggaagaacgtcgagactcttccctacgatgatctcaaacgttttgtcaagctcgacacacggggtaaaatcaaggagaacaactccatcaaggccaaaaactgagagatgtaagatgttttcaactctctcactgttgctgttttctttgtatgtgggaactatgcttgctaataagtagattcttccagttagattacatttccaaggcgttattatgctcttgtatgttctcagacactcttagtatatccaagaaattgctgcttc

SEQ ID NO: 409 - protein, 126 aa, Arabidopsis thaliana
  peptide (1)..(126): Ceres Seq. ID no. 12322669
  misc_feature (1)..(126): NCBI GI NO: 18395929 NR Description: expressed protein; protein id: At3g01740
  misc_feature (15)..(126): NCBI GI NO: 15241366 NR Description: putative protein; protein id: At5g14290.1
MNRIGLIRGSSSKDVVRRTFAAAASKAKKGGKGGGASDAPKGSSLTKEIKSTTVVGANTLKDGSDPKILPDSDYPDWLWHLLDKRPALSELRRKNVETLPYDDLKRFVKLDTRGKIKENNSIKAKN

SEQ ID NO: 410 - DNA, 788 bp, Arabidopsis thaliana
  misc_feature (1)..(788): Ceres Seq. ID no. 12738636
ctcttccaatttcgtttcgacatatttcgcgattcgtctaaggttttgttactgattgagaaaacatgggaggtgacaatgataatgacaaagacaaagggtttcatgggtatcctcccgctggatacccaccccctggggcttatccacccgctggatacccacaacaaggttaccctccaccacccggtgcttacccgcctgcaggttatcctccgggtgcctacccacctgcacctggtggttatcctccagcccctggttatggtggttatcctccagctcctggttatggaggttatcctcctgcacctggtcatggtggttaccctcctgctggctatcctgctcatcactcaggacacgcaggaggaattgggggtatgattgcaggtggctgcagctgcctatggagctcaccacgtagctcatagctctcacggtccttacggacatgctgcatatggtcacggttttggccatggtcatggctatggctatggtcatggtcatggtaagttcaagcatgggaagcacgggaagttcaagcatgggaagcatggaatgtttggaggaggcaagttcaagaagtggaagtgatctagttaataccttttgtgaatctgtctggactgaccaatgtttcaaataagccctaaacattatataagttgactttcgtcggttagattgctggttcgagttggaataattgaaacttaattagtatcaaatcttattgtatactttaaagctatcgttggctttataatgatagattctggttt

SEQ ID NO: 411 - protein, 128 aa, Arabidopsis thaliana
  peptide (1)..(128): Ceres Seq. ID no. 12738637
LFQFRFDIFRDSSKVLLLIEKTWEVTMIMTKTKGFMGILPLDTHPLGLIHPLDTHNKVTLHHPVLTRLQVILRVPTHLHLVVILQPLVMVVILQLLVMEVILLHLVMVVTLLLAILLITQDTQEELGV

SEQ ID NO: 412 - protein, 122 aa, Arabidopsis thaliana
  peptide (1)..(122): Ceres Seq. ID no. 12738638
  misc_feature (47)..(105): Pfam Name: 20 copies Pfam Description: Collagen triple helix repeat
  misc_feature (1)..(113): NCBI GI NO: 18422542 NR Description: expressed protein; protein id: At5g45350
  misc_feature (1)..(110): NCBI GI NO: 15234178 NR Description: putative protein; protein id: At4g19200
  misc_feature (12)..(113): NCBI GI NO: 33668156 NR Description: GPRP [Oryza sativa (indica cultivar-group)]
  misc_feature (1)..(113): NCBI GI NO: 6478148 NR Description: putative glycine and proline-rich protein
  misc_feature (12)..(113): NCBI GI NO: 13543234 NR Description: Unknown (protein for MGC:12025) [Mus musculus]
  misc_feature (1)..(110): NCBI GI NO: 7487135 NR Description: hypothetical protein T18B16
  misc_feature (1)..(111): NCBI GI NO: 15238005 NR Description: glycine/proline-rich protein
  misc_feature (1)..(105): NCBI GI NO: 18398103 NR Description: expressed protein; protein id: At1g31750
  misc_feature (1)..(105): NCBI GI NO: 21553447 NR Description: putative glycine and proline-rich protein
  misc_feature (31)..(106): NCBI GI NO: 13543234 NR Description: Unknown (protein for MGC:12025) [Mus musculus]
MGGDNDNDKDKGFHGYPPAGYPPPGAYPPAGYPQQGYPPPPGAYPPAGYPPGAYPPAPGGYPPAPGYGGYPPAPGYGGYPPAPGHGGYPPAGYPAHHSGHAGGIGGMIAGGCSCLWSSPRSS

SEQ ID NO: 413 - protein, 102 aa, Arabidopsis thaliana
  peptide (1)..(102): Ceres Seq. ID no. 12738639
MIMTKTKGFMGILPLDTHPLGLIHPLDTHNKVTLHHPVLTRLQVILRVPTHLHLVVILQPLVMVVILQLLVMEVILLHLVMVVTLLLAILLITQDTQEELGV

SEQ ID NO: 414 - DNA, 756 bp, Arabidopsis thaliana
  misc_feature (1)..(756): Ceres Seq. ID no. 12332182
aaaaaatttctcaaaatcgcaaaatctttgcctctttcttctctaatcgaactaaatcttaaaactttgctgattgattgattttcgattccgggagaagaaaaatggtatctgggttgattaatgagaaccctatcatttacccaaagaaagagaggcgtcttcgtactgatacaagcattactgatgagcttacaccagaaccaattgatcaacttgagatttttgatcatataagagatatcaaagatccagagcatcctaatactctggaagatctcagagtagttacagaagactcagttgaagtggatgatgagaacagttatgttagggttacgttcactccaactgtcgaacattgtagcatggcaaccgttatcggtctttgtgtccgtgtgaaacttctacgaagccttccttctcgatacaagattgatataagggtagcacctggttctcatgcaacagaagatgcattgaataaacaactaaacgataaagaacgtgtggcggctgcactagagaatccaaacctcgtggagatggttgatgaatgcctgccatcagaagagtgaattgcttttattttcttgtgagcaagtaatttacacaagcctggtggtctcagtttacactatcaatacatgtctctgttttatttgcaaagattttgatccatcacatcgactaggacttgcattgtaatacttactctgatttcaagttttttctcaatcatttcaataaagtccc

SEQ ID NO: 415 - protein, 157 aa, Arabidopsis thaliana
  peptide (1)..(157): Ceres Seq. ID no. 12332183
  misc_feature (36)..(115): Pfam Name: Pfam Description:  Domain of unknown function DUF59
  misc_feature (1)..(157): NCBI GI NO: 28973748 NR Description: unknown protein [Arabidopsis thaliana]
  misc_feature (1)..(157): NCBI GI NO: 15221347 NR Description: unknown protein; protein id: At1g68310.1
  misc_feature (1)..(153): NCBI GI NO: 38347077 NR Description: OSJNBa0006A01.18
  misc_feature (1)..(153): NCBI GI NO: 15232658 NR Description: hypothetical protein; protein id: At3g09380.1
  misc_feature (40)..(153): NCBI GI NO: 38567963 NR Description: OSJNBa0093F12.4
  misc_feature (1)..(157): NCBI GI NO: 34896898 NR Description: hypothetical protein
  misc_feature (1)..(153): NCBI GI NO: 20455368 NR Description: Hypothetical protein At3g09380
  misc_feature (4)..(153): NCBI GI NO: 7706343 NR Description: CGI-128 protein [Homo sapiens]
  misc_feature (1)..(156): NCBI GI NO: 24662341 NR Description: CG7949-PA [Drosophila melanogaster]
  misc_feature (4)..(153): NCBI GI NO: 21312046 NR Description: RIKEN cDNA 1110019N10 [Mus musculus]
MVSGLINENPIIYPKKERRLRTDTSITDELTPEPIDQLEIFDHIRDIKDPEHPNTLEDLRVVTEDSVEVDDENSYVRVTFTPTVEHCSMATVIGLCVRVKLLRSLPSRYKIDIRVAPGSHATEDALNKQLNDKERVAAALENPNLVEMVDECLPSEE

SEQ ID NO: 416 - DNA, 1265 bp, Arabidopsis thaliana
  misc_feature (1)..(1265): Ceres Seq. ID no. 13494325
tggtttcagaaaagctttaacctaatttcacttcgtctctctctcgcgctcccaatttctccgccggcgggaaaaccatgtcgcacttcggaaggtcaggtccaccggatatcagcgacacctactcacttctcgtccttaacatcaccttccgtacgactgctgatgatctctatcctctattcgcaaagtatggaaaggtcgttgatgtgtttattcccagagatcgaaggactggtgattcgcgtggttttgcgtttgttcggtataagtataaagacgaagctcacaaagcagtggaaaggcttgatggaagagttgttgatggcagagaaataactgttcagtttgcgaaatatgggccaaatgctgaaaaaatttccaaaggaagagttgtggaaccaccgccgaagtcacgaagatctagaagccgtagtcctaggcggagtcgtagtcctaggaggagccgtagcccgcctagacgtcgtagtcccagaagaagccgcagtcctcgtaggaggtcccgagatgactatagggaaaaagactaccggaagcggagcaggagcagaagctatgacaggcgtgaaaggcatgaggagaaggatagagatcatcgtcgtcgcactaggtctcgtagtgccagcccagatgaaaaacgcagagtcagaggccgttatgataatgagagccgcagtcacagtcgttccttgagtgcatctcctgctcgccgcagccctagaagttcctccccacagaaaacctctcctgctagagaagtttctcctgataagcgtagcaatgagaggtctccatctcctcgtcgcagcctcagcccaagaagccctgctttgcaaaaggcctctccttctaaggagatgtctcctgaaaggcgtagcaatgagaggtccccatctcctggtagccctgctcctctgcgcaaagttgatgctgcttctcgaagtcaatctccttatgctgcggaatgactgcagccacttgtgaaagtgatacggtgtatgatgaaaaacacgtttgcttgtactgatgatgtttcatcattaagcactggaacgtctaccctctgtagtattacttgctttccgtaggtgccctcaaactactgagtactgactgtatctttgtttcctgttatcgttctggtttagtgttcatgtgcaagaattattactgtttgaacagcctttttagtctctgttttatttgaatcttctctggtttggaattcatagcattctaactct

SEQ ID NO: 417 - protein, 303 aa, Arabidopsis thaliana
  peptide (1)..(303): Ceres Seq. ID no. 13494326
  misc_feature (18)..(89): Pfam Name: a.k.a. RRM, RBD, or RNP domain Pfam Description: RNA recognition motif.
  misc_feature (1)..(303): NCBI GI NO: 15237641 NR Description: arginine/serine-rich splicing factor SC35
  misc_feature (1)..(303): NCBI GI NO: 9843653 NR Description: splicing factor SC35 [Arabidopsis thaliana]
  misc_feature (1)..(280): NCBI GI NO: 33146621 NR Description: putative splicing factor, arginine/serine-rich 2
  misc_feature (1)..(288): NCBI GI NO: 7446336 NR Description: probable arginine/serine-rich splicing factor - alfalfa
  misc_feature (4)..(216): NCBI GI NO: 28279759 NR Description: Similar to splicing factor
  misc_feature (4)..(234): NCBI GI NO: 266991 NR Description: Splicing factor, arginine/serine-rich 2
  misc_feature (4)..(234): NCBI GI NO: 6755478 NR Description: splicing factor, arginine/serine-rich 2
  misc_feature (4)..(234): NCBI GI NO: 4506899 NR Description: splicing factor, arginine/serine-rich 2
  misc_feature (5)..(279): NCBI GI NO: 15055543 NR Description: Splicing factor, arginine/serine-rich, 46kD
  misc_feature (4)..(221): NCBI GI NO: 39794351 NR Description: Unknown (protein for MGC:75633)
MSHFGRSGPPDISDTYSLLVLNITFRTTADDLYPLFAKYGKVVDVFIPRDRRTGDSRGFAFVRYKYKDEAHKAVERLDGRVVDGREITVQFAKYGPNAEKISKGRVVEPPPKSRRSRSRSPRRSRSPRRSRSPPRRRSPRRSRSPRRRSRDDYREKDYRKRSRSRSYDRRERHEEKDRDHRRRTRSRSASPDEKRRVRGRYDNESRSHSRSLSASPARRSPRSSSPQKTSPAREVSPDKRSNERSPSPRRSLSPRSPALQKASPSKEMSPERRSNERSPSPGSPAPLRKVDAASRSQSPYAAE

SEQ ID NO: 418 - DNA, 867 bp, Arabidopsis thaliana
  misc_feature (1)..(867): Ceres Seq. ID no. 12397096
ataaaacaaaaaacatcctccgaagcagctactcctcctcagttgttgttccgccgtcccgccatcagatcccaatcaaagatttaggtaataatttaccatagaagaaatggcagagtctactcagatggaagttgagacagcaacagaaggaactgtgccattgccgcctaaaccaaccttcaagcctttgaaagctcatgaaatgtctgatggtaaagtccagttcaggaaaatagctgtaccaccaaaccgatactcgcctctcaagaaagcatggttggatatctacacacccatttacgatcagatgaaggttgacataaggatgaatctcaaagcccgcaaagtcgagcttaaaacccgagctgacactcccgacatcagtaatcttcagactctgcggattttgtacacgctttcatgcttggttttgatatccctgatgctatctctcttttgagaatggacgagctttatgttgagtcttttgagatcaaggatgtgaagactcttaaaggtgagcatttgtctagagccattggtaggttgtctggtaaaggagggaagacaaagtttgctattgagaactcgaccaagacgaggattgtgattgcagacactaggattcatattttgggagctttctctaatattaaagtcgcaaggagttcactttgcagtcttattatgggatctcctgctgggaaagtttactctaagctcagatctgtctctgctagattgaacgaatagttttgaatggcgaaattttgaaacattaacttgcttttgttcggagtgatctttgtaatgaaattttgaagaaacaaatgttatggtgttctttataaaatttgttatggg

SEQ ID NO: 419 - protein, 117 aa, Arabidopsis thaliana
  peptide (1)..(117): Ceres Seq. ID no. 12397097
  misc_feature (1)..(96): NCBI GI NO: 18399930 NR Description: expressed protein; protein id: At3g13230
  misc_feature (1)..(96): NCBI GI NO: 34908792 NR Description: P0415A04.33
  misc_feature (22)..(96): NCBI GI NO: 34902190 NR Description: Hypothetical protein
  misc_feature (4)..(96): NCBI GI NO: 33669476 NR Description: partner of Nob1 [Sorghum bicolor]
  misc_feature (3)..(96): NCBI GI NO: 20129085 NR Description: CG11738-PA [Drosophila melanogaster]
  misc_feature (1)..(95): NCBI GI NO: 33989460 NR Description: Unknown (protein for MGC:65782) [Danio rerio]
  misc_feature (1)..(95): NCBI GI NO: 34147041 NR Description: putatative 28 kDa protein [Bos taurus]
  misc_feature (2)..(95): NCBI GI NO: 33669478 NR Description: partner of Nob1 [Oryzias latipes]
  misc_feature (13)..(95): NCBI GI NO: 40018534 NR Description: putatative 28 kDa protein; partner of Nob1
  misc_feature (13)..(95): NCBI GI NO: 13384846 NR Description: RIKEN cDNA 1810003N24 [Mus musculus]
MAESTQMEVETATEGTVPLPPKPTFKPLKAHEMSDGKVQFRKIAVPPNRYSPLKKAWLDIYTPIYDQMKVDIRMNLKARKVELKTRADTPDISNLQTLRILYTLSCLVLISLMLSLF

SEQ ID NO: 420 - protein, 111 aa, Arabidopsis thaliana
  peptide (1)..(111): Ceres Seq. ID no. 12397098
  misc_feature (1)..(90): NCBI GI NO: 18399930 NR Description: expressed protein; protein id: At3g13230
  misc_feature (1)..(90): NCBI GI NO: 34908792 NR Description: P0415A04.33
  misc_feature (16)..(90): NCBI GI NO: 34902190 NR Description: Hypothetical protein
  misc_feature (1)..(90): NCBI GI NO: 33669476 NR Description: partner of Nob1 [Sorghum bicolor]
  misc_feature (1)..(90): NCBI GI NO: 20129085 NR Description: CG11738-PA [Drosophila melanogaster]
  misc_feature (1)..(89): NCBI GI NO: 33989460 NR Description: Unknown (protein for MGC:65782) [Danio rerio]
  misc_feature (1)..(89): NCBI GI NO: 34147041 NR Description: putatative 28 kDa protein [Bos taurus]
  misc_feature (1)..(89): NCBI GI NO: 33669478 NR Description: partner of Nob1 [Oryzias latipes]
  misc_feature (7)..(89): NCBI GI NO: 40018534 NR Description: putatative 28 kDa protein; partner of Nob1
  misc_feature (7)..(89): NCBI GI NO: 13384846 NR Description: RIKEN cDNA 1810003N24 [Mus musculus]
MEVETATEGTVPLPPKPTFKPLKAHEMSDGKVQFRKIAVPPNRYSPLKKAWLDIYTPIYDQMKVDIRMNLKARKVELKTRADTPDISNLQTLRILYTLSCLVLISLMLSLF

SEQ ID NO: 421 - protein, 110 aa, Arabidopsis thaliana
  peptide (1)..(110): Ceres Seq. ID no. 12397099
  misc_feature (1)..(110): NCBI GI NO: 18399930 NR Description: expressed protein; protein id: At3g13230
  misc_feature (1)..(110): NCBI GI NO: 34908792 NR Description: P0415A04.33
  misc_feature (1)..(110): NCBI GI NO: 34902190 NR Description: Hypothetical protein
  misc_feature (5)..(110): NCBI GI NO: 33669476 NR Description: partner of Nob1 [Sorghum bicolor]
  misc_feature (1)..(110): NCBI GI NO: 20129085 NR Description: CG11738-PA [Drosophila melanogaster]
  misc_feature (1)..(110): NCBI GI NO: 33989460 NR Description: Unknown (protein for MGC:65782) [Danio rerio]
  misc_feature (1)..(110): NCBI GI NO: 34147041 NR Description: putatative 28 kDa protein [Bos taurus]
  misc_feature (1)..(110): NCBI GI NO: 33669478 NR Description: partner of Nob1 [Oryzias latipes]
  misc_feature (1)..(107): NCBI GI NO: 40018534 NR Description: putatative 28 kDa protein; partner of Nob1
  misc_feature (1)..(107): NCBI GI NO: 13384846 NR Description: RIKEN cDNA 1810003N24 [Mus musculus]
MLGFDIPDAISLLRMDELYVESFEIKDVKTLKGEHLSRAIGRLSGKGGKTKFAIENSTKTRIVIADTRIHILGAFSNIKVARSSLCSLIMGSPAGKVYSKLRSVSARLNE

SEQ ID NO: 422 - DNA, 1121 bp, Arabidopsis thaliana
  misc_feature (1)..(1121): Ceres Seq. ID no. 13501438
accaatccttcacttcctttcacgatccaaaacaaaacacaagaaaatgcaacaaaatcttctccatctctgaactcaaaaactcattcactgagaaaaatggagacccttctctcccctcgtgcgctctctcctcctctcaatcccaaacctttgtcccttcaccagaccaaacccacttcacattcattgtctctctcaaaacccaccaccttctccggtcctaaacacctctccacccggttcactaaaccggaatcaagaaactggttaatagatgcaaagcaaggactagctgctttagctttatctctaactctcactttctcacctgttggcactgctttagcctctgagttcaatatcctcaacgatggtccacctaaagaaacttacgtagtcgatgacgctggtgttcttagtcgagtgacgaagtcagatcttaagaagcttttgtctgatcttgaatacagaaagaaactgagactcaatttcatcactgtccgaaagctcaccagtaaagcagatgcgtttgagtatgcagaccaggttttggaaaaatggtatccttctattgaagaaggtaacaataagggtattgttgttttgataacaagtcagaaggaaggagctattactggtggtcctgcttttattgaagctgttggtgaaaacattcttgatgctaccgtctccgaaaatcttcccgtactagcaacggacgaaaaatacaacgaggcggtatatagcagtgcgaaaaggttggttgcagctatagacggtcaaccagatcccgggggtccaaccgtaaaggatagcaagagagaatcaaatttcaagacgaaagaagaaaccgatgagaagcgaggacagttcagtcttgtcgttggaggattacttgtaattgcctttgtagttcccatggcacaatactttgcttatgtctccaggaagtaagtaagtaaactcggttcactctcgtaaaccaaaccgatcaggtcagaactttgatttacctcggttatttggttatggtttcttggtaaattggtttatttgaacaatataagtaaataataacagaaaactaaagaatgaatgaaaccatccgattgtaacgg

SEQ ID NO: 423 - protein, 318 aa, Arabidopsis thaliana
  peptide (1)..(318): Ceres Seq. ID no. 13501439
  misc_feature (34)..(318): NCBI GI NO: 18405061 NR Description: thylakoid lumen 18.3 kDa protein
  misc_feature (98)..(316): NCBI GI NO: 23041448 NR Description: hypothetical protein
  misc_feature (89)..(314): NCBI GI NO: 22297947 NR Description: ORF_ID:tll0404~hypothetical protein
  misc_feature (100)..(316): NCBI GI NO: 17231592 NR Description: hypothetical protein [Nostoc sp. PCC 7120]
  misc_feature (89)..(315): NCBI GI NO: 16330824 NR Description: hypothetical protein [Synechocystis sp. PCC 6803]
  misc_feature (87)..(314): NCBI GI NO: 23128295 NR Description: hypothetical protein [Nostoc punctiforme]
  misc_feature (107)..(315): NCBI GI NO: 13812326 NR Description: hypothetical protein [Guillardia theta]
TNPSLPFTIQNKTQENATKSSPSLNSKTHSLRKMETLLSPRALSPPLNPKPLSLHQTKPTSHSLSLSKPTTFSGPKHLSTRFTKPESRNWLIDAKQGLAALALSLTLTFSPVGTALASEFNILNDGPPKETYVVDDAGVLSRVTKSDLKKLLSDLEYRKKLRLNFITVRKLTSKADAFEYADQVLEKWYPSIEEGNNKGIVVLITSQKEGAITGGPAFIEAVGENILDATVSENLPVLATDEKYNEAVYSSAKRLVAAIDGQPDPGGPTVKDSKRESNFKTKEETDEKRGQFSLVVGGLLVIAFVVPMAQYFAYVSRK

SEQ ID NO: 424 - protein, 285 aa, Arabidopsis thaliana
  peptide (1)..(285): Ceres Seq. ID no. 13501440
  misc_feature (1)..(285): NCBI GI NO: 18405061 NR Description: thylakoid lumen 18.3 kDa protein
  misc_feature (65)..(283): NCBI GI NO: 23041448 NR Description: hypothetical protein
  misc_feature (56)..(281): NCBI GI NO: 22297947 NR Description: ORF_ID:tll0404~hypothetical protein
  misc_feature (67)..(283): NCBI GI NO: 17231592 NR Description: hypothetical protein [Nostoc sp. PCC 7120]
  misc_feature (56)..(282): NCBI GI NO: 16330824 NR Description: hypothetical protein [Synechocystis sp. PCC 6803]
  misc_feature (54)..(281): NCBI GI NO: 23128295 NR Description: hypothetical protein [Nostoc punctiforme]
  misc_feature (74)..(282): NCBI GI NO: 13812326 NR Description: hypothetical protein [Guillardia theta]
METLLSPRALSPPLNPKPLSLHQTKPTSHSLSLSKPTTFSGPKHLSTRFTKPESRNWLIDAKQGLAALALSLTLTFSPVGTALASEFNILNDGPPKETYVVDDAGVLSRVTKSDLKKLLSDLEYRKKLRLNFITVRKLTSKADAFEYADQVLEKWYPSIEEGNNKGIVVLITSQKEGAITGGPAFIEAVGENILDATVSENLPVLATDEKYNEAVYSSAKRLVAAIDGQPDPGGPTVKDSKRESNFKTKEETDEKRGQFSLVVGGLLVIAFVVPMAQYFAYVSRK

SEQ ID NO: 425 - DNA, 1069 bp, Arabidopsis thaliana
  misc_feature (1)..(1069): Ceres Seq. ID no. 13593680
ggtgaagccaaaggcatcgtgagcaaaatccgcagttttctacattaatggattgtttctgttctagagcttctcttccgtctctgtgatttctgggtagattctaggatttctatttgcatctctaacctgagagctgctaatagtccacacaactttttagtttgtgagttttcctaatttagggttaggacaaatttctgtatttttcatccaaggggataaagatgtatgctgataaattggaggctgagtctggaagcaggaaggtcgttaaggatcgtatcaatggcggttctggagacatctctactcgcgtgcgacaagtgactgggaagaggcaaaggcaggacgacaaatgggagcatgatcttttcagtagtgacaaacctcaactttcaaatcgcagggttgatcctagagatcttcgtttgaagctccaaaagagacatcatgggtctcaaagtgggcgagaagctggttcaggcgtgcgggatttacgggatcagctctctgggacaatgaatcagcaaccaaaaaacagtgacccaccaaaatccaaagcggaggctgctaggccaagtatgaagagcgtagcgactgaaacagagactagaaaaacttccagtcaagctaccaggaagaaatcacagcaggctgattcatcggttgatagctttcttgaatcattgggtctcgagaaatattcaacagcgtttcaagtggaagaagttgatatggatgctctcatgcatatgacagatgatgacctcaaggctatgctcataccgatgggtccgaggaagaagatacttcttgctttgggatctaaaccctaagagcttagtgccatctacctgatggttggaagctcaggtgaatggtctctggagttgttacattaagaattgtcagaaatgaattggctctttttctcttgattgtattttgcccattttaagagcttagaatttggttagacatctgtaatcgtaaacatggtgaaacatacactgtttgattgcaccacttttgatgtgagagaagccttaagataaacacaacaacg

SEQ ID NO: 426 - protein, 203 aa, Arabidopsis thaliana
  peptide (1)..(203): Ceres Seq. ID no. 13593681
  misc_feature (141)..(203): Pfam Name: Sterile alpha motif Pfam Description: SAM domain
  misc_feature (1)..(203): NCBI GI NO: 18397861 NR Description: expressed protein [Arabidopsis thaliana]
  misc_feature (1)..(200): NCBI GI NO: 30695517 NR Description: expressed protein [Arabidopsis thaliana]
  misc_feature (1)..(189): NCBI GI NO: 39546279 NR Description: OSJNBa0083D01.12
  misc_feature (73)..(203): NCBI GI NO: 22330538 NR Description: expressed protein [Arabidopsis thaliana]
MYADKLEAESGSRKVVKDRINGGSGDISTRVRQVTGKRQRQDDKWEHDLFSSDKPQLSNRRVDPRDLRLKLQKRHHGSQSGREAGSGVRDLRDQLSGTMNQQPKNSDPPKSKAEAARPSMKSVATETETRKTSSQATRKKSQQADSSVDSFLESLGLEKYSTAFQVEEVDMDALMHMTDDDLKAMLIPMGPRKKILLALGSKP

SEQ ID NO: 427 - protein, 105 aa, Arabidopsis thaliana
  peptide (1)..(105): Ceres Seq. ID no. 13593682
  misc_feature (43)..(105): Pfam Name: Sterile alpha motif Pfam Description: SAM domain
  misc_feature (1)..(105): NCBI GI NO: 18397861 NR Description: expressed protein [Arabidopsis thaliana]
  misc_feature (1)..(102): NCBI GI NO: 30695517 NR Description: expressed protein [Arabidopsis thaliana]
  misc_feature (1)..(91): NCBI GI NO: 39546279 NR Description: OSJNBa0083D01.12
  misc_feature (1)..(105): NCBI GI NO: 22330538 NR Description: expressed protein [Arabidopsis thaliana]
MNQQPKNSDPPKSKAEAARPSMKSVATETETRKTSSQATRKKSQQADSSVDSFLESLGLEKYSTAFQVEEVDMDALMHMTDDDLKAMLIPMGPRKKILLALGSKP

SEQ ID NO: 428 - DNA, 722 bp, Arabidopsis thaliana
  misc_feature (1)..(722): Ceres Seq. ID no. 13497755
gaatttattctcatgtttgtttgtttctcactttaccaatctcacttacagatcttccttcttcttcctcttcctcttcttcttccttaaaccctacaagcttctactctattgacaatttgattccgagtttacatcgataatggcggaccaaacctccgattcaacatctcccgtggctcctctctccgtatcttctcctactgctactaagaaagataataccaatcctgttgattcgaagctcacggaattgaatgaatcaagggctgagttactaaacaggatccagaatctgaaacaggacttgcaaagttggagaggtaaattggacactcaagttaaagtctaccgtgaggagctctctgggctaaagaagactctgaatcttgaagttgagcagcttcgtgaggaattcaaagatctgaaaactaccttgaatcaacagcaagatgatgtttccgctagcctgaaaagcttaggcctacaagattcaaaagagcaaattgataagagaagtgaggtgacagaagagaaagtggaagctctatcgactgatgataatgccaaagaagcagaacattagataatatgaaattgtttgttcttatgatattctcgccactactgttaccactaccttgagattgtactagtatgcttaatatgtagttccgcggtttagttgattctaatgatgcaccatgacacaatggtttgct

SEQ ID NO: 429 - protein, 147 aa, Arabidopsis thaliana
  peptide (1)..(147): Ceres Seq. ID no. 13497756
  misc_feature (1)..(147): NCBI GI NO: 30683404 NR Description: expressed protein [Arabidopsis thaliana]
  misc_feature (1)..(147): NCBI GI NO: 18175846 NR Description: unknown protein [Arabidopsis thaliana]
  misc_feature (1)..(147): NCBI GI NO: 21592347 NR Description: unknown [Arabidopsis thaliana]
  misc_feature (1)..(123): NCBI GI NO: 7485072 NR Description: hypothetical protein - Arabidopsis thaliana
  misc_feature (11)..(120): NCBI GI NO: 29370843 NR Description: unknown [Oryza sativa (japonica cultivar-group)]
  misc_feature (26)..(147): NCBI GI NO: 7485072 NR Description: hypothetical protein - Arabidopsis thaliana
  misc_feature (14)..(145): NCBI GI NO: 22831125 NR Description: contains ESTs D41314
MADQTSDSTSPVAPLSVSSPTATKKDNTNPVDSKLTELNESRAELLNRIQNLKQDLQSWRGKLDTQVKVYREELSGLKKTLNLEVEQLREEFKDLKTTLNQQQDDVSASLKSLGLQDSKEQIDKRSEVTEEKVEALSTDDNAKEAEH

SEQ ID NO: 430 - DNA, 967 bp, Arabidopsis thaliana
  misc_feature (1)..(967): Ceres Seq. ID no. 13497723
atttacaactgtggataagccttttagtctgactcagctttctcaagatccgaaaacacactgacccaacccggttcgattttgcttaaccggacaagatacattaatctgcctaatcttcaattatttaaaagctaactaaacgttatacgtactaatcacttcttcccctataaataaacctttctaatttctcatctcaaatcacactgcatcacaaaacccaaatcggaacttaaaccaaaagacaaacaaaaacgccgtcgtttcacgatgctttcttcttccccaaccttcttcgctactccatttctctcttcttcttcttcttcttctccgtcgttctcttctacttcaccaccgtcacgcatttcccggatctcgccgtcgctttctacaaccaccgcgtcctacacctgcgccgaagatctaccgagattacgccaaatcccgcagcgattttcagcaaccgcgtctctctacgagatccttgaaattcccgtcggctcgacgagtcaagagatcaaatcagcttaccggcgactagccaggatctgtcatcccgatgtagcgagaaatagtcgggataactcgtcggcggacgatttcatgaagatccacgcagcgtattgcacgctttcggatcccgagaaacgcgccgtttatgatcggaggactcttcttcggagccggccgttaacggctggatacggcagttacggtggacggaattgggaaaccgatcagtgctggtagcgagttgactcgatgtgtcgagttggtccaaaaccattgaattggttgtaattagagcaaacccagagattctgggtggttgtgccacgtaggatcaacacggtttatcgtgccacgtaggatctgtcgcgttgttagcctttgtatccataattagtaagtagtctgtatttagtatttaccatctaataaagaaaataaaaatttatgt

SEQ ID NO: 431 - protein, 160 aa, Arabidopsis thaliana
  peptide (1)..(160): Ceres Seq. ID no. 13497724
  misc_feature (68)..(135): Pfam Name: Pfam Description:  DnaJ domain
  misc_feature (1)..(160): NCBI GI NO: 15227919 NR Description: J11 protein, putative [Arabidopsis thaliana]
  misc_feature (1)..(160): NCBI GI NO: 15233446 NR Description: DnaJ protein family [Arabidopsis thaliana]
  misc_feature (1)..(160): NCBI GI NO: 9843641 NR Description: J11 protein [Arabidopsis thaliana]
  misc_feature (28)..(160): NCBI GI NO: 7488763 NR Description: DnaJ protein homolog - kidney bean (fragment)
  misc_feature (1)..(160): NCBI GI NO: 15231204 NR Description: DnaJ protein family [Arabidopsis thaliana]
  misc_feature (53)..(160): NCBI GI NO: 34863272 NR Description: similar to hypothetical protein FLJ40417
  misc_feature (17)..(133): NCBI GI NO: 6691127 NR Description: DnaJ-like protein [Arabidopsis thaliana]
  misc_feature (17)..(133): NCBI GI NO: 15236355 NR Description: DnaJ protein family [Arabidopsis thaliana]
  misc_feature (17)..(133): NCBI GI NO: 30682610 NR Description: DnaJ protein family [Arabidopsis thaliana]
  misc_feature (69)..(157): NCBI GI NO: 11061652 NR Description: DNAJ protein [Leishmania major]
MLSSSPTFFATPFLSSSSSSSPSFSSTSPPSRISRISPSLSTTTASYTCAEDLPRLRQIPQRFSATASLYEILEIPVGSTSQEIKSAYRRLARICHPDVARNSRDNSSADDFMKIHAAYCTLSDPEKRAVYDRRTLLRSRPLTAGYGSYGGRNWETDQCW

SEQ ID NO: 432 - DNA, 988 bp, Arabidopsis thaliana
  misc_feature (1)..(988): Ceres Seq. ID no. 12396938
aaacataccgaattacatatatatctcgctcgctctcttctttgttcttgctccttgttctagttcggatttttcttttgaagtgaaatggttaacgctacagttgcgagaaacattgccggcatttgtggaaatgtcatctccttgttcttgttcttatctcccatacctacgttcataaccatatacaagaagaaaaaggtggaggagtacaaagctgacccatacttagccacggttctaaattgcgcactatgggtcttttatggcttaccaatggttcaaccagatagtctccttgtgatcaccataaatggtaccggtttagccattgagctggtgtatctcgctatcttcttcttcttttctccaactagtcgcaaggtgaaagtggggctatggttaataggagagatggtgtttgtaggaatagtagccacatgcacattgctattgttccacacacataaccagagatcttcttttgttggaatcttttgtgtcatttttgttagtctcatgtatattgctcctctcaccatcatgagtaaggtgatcaagaccaaaagtgtgaagtacatgccattctctctctcacttgccaatttcctcaatggtgtcgtttgggttatttatgcacttattaagttcgaccttttcattttgattggaaatggacttggaacggtatcaggagcagtacaacttatactctatgcttgctattacaagacaacaccaaaagatgatgaagatgaagaagatgaggagaatctttctaaggttaactctcagttacaacttagtggcaacagtggacaagctaaacgagtttcagcttgattatatgtttggattcatgagatatgaatttagttttatgtttttttttaagcttttggctgatttaactttaagtaactctattattttcgcgtttcctttttgtaaaatgcaaactctttttcttctatgaaagatattaacc

SEQ ID NO: 433 - protein, 251 aa, Arabidopsis thaliana
  peptide (1)..(251): Ceres Seq. ID no. 12396939
  misc_feature (9)..(98): Pfam Name: Pfam Description:  MtN3/saliva family
  misc_feature (39)..(251): NCBI GI NO: 11994120 NR Description: contains similarity to nodulin MtN3 protein~gene_id:MMG15
  misc_feature (1)..(251): NCBI GI NO: 18405611 NR Description: Expressed protein; protein id: At3g28007
  misc_feature (1)..(251): NCBI GI NO: 21592355 NR Description: contains similarity to nodulin MtN3 protein
  misc_feature (1)..(234): NCBI GI NO: 34912454 NR Description: P0681B11.31
  misc_feature (1)..(235): NCBI GI NO: 34912462 NR Description: MtN3-like protein
  misc_feature (1)..(194): NCBI GI NO: 10177463 NR Description: contains similarity to MtN3 protein~gene_id:MQB2
  misc_feature (8)..(246): NCBI GI NO: 18413388 NR Description: putative protein; protein id: At4g10850
  misc_feature (1)..(217): NCBI GI NO: 15219732 NR Description: hypothetical protein; protein id: At1g66770.1
  misc_feature (28)..(246): NCBI GI NO: 7486148 NR Description: hypothetical protein F25I24
  misc_feature (1)..(231): NCBI GI NO: 18421965 NR Description: putative protein; protein id: At5g40260
MVNATVARNIAGICGNVISLFLFLSPIPTFITIYKKKKVEEYKADPYLATVLNCALWVFYGLPMVQPDSLLVITINGTGLAIELVYLAIFFFFSPTSRKVKVGLWLIGEMVFVGIVATCTLLLFHTHNQRSSFVGIFCVIFVSLMYIAPLTIMSKVIKTKSVKYMPFSLSLANFLNGVVWVIYALIKFDLFILIGNGLGTVSGAVQLILYACYYKTTPKDDEDEEDEENLSKVNSQLQLSGNSGQAKRVSA

SEQ ID NO: 434 - protein, 188 aa, Arabidopsis thaliana
  peptide (1)..(188): Ceres Seq. ID no. 12396940
  misc_feature (1)..(188): NCBI GI NO: 11994120 NR Description: contains similarity to nodulin MtN3 protein~gene_id:MMG15
  misc_feature (1)..(188): NCBI GI NO: 18405611 NR Description: Expressed protein; protein id: At3g28007
  misc_feature (1)..(188): NCBI GI NO: 21592355 NR Description: contains similarity to nodulin MtN3 protein
  misc_feature (1)..(171): NCBI GI NO: 34912454 NR Description: P0681B11.31
  misc_feature (1)..(172): NCBI GI NO: 34912462 NR Description: MtN3-like protein
  misc_feature (1)..(131): NCBI GI NO: 10177463 NR Description: contains similarity to MtN3 protein~gene_id:MQB2
  misc_feature (1)..(183): NCBI GI NO: 18413388 NR Description: putative protein; protein id: At4g10850
  misc_feature (1)..(154): NCBI GI NO: 15219732 NR Description: hypothetical protein; protein id: At1g66770.1
  misc_feature (1)..(183): NCBI GI NO: 7486148 NR Description: hypothetical protein F25I24
  misc_feature (1)..(168): NCBI GI NO: 18421965 NR Description: putative protein; protein id: At5g40260
MVQPDSLLVITINGTGLAIELVYLAIFFFFSPTSRKVKVGLWLIGEMVFVGIVATCTLLLFHTHNQRSSFVGIFCVIFVSLMYIAPLTIMSKVIKTKSVKYMPFSLSLANFLNGVVWVIYALIKFDLFILIGNGLGTVSGAVQLILYACYYKTTPKDDEDEEDEENLSKVNSQLQLSGNSGQAKRVSA

SEQ ID NO: 435 - protein, 142 aa, Arabidopsis thaliana
  peptide (1)..(142): Ceres Seq. ID no. 12396941
  misc_feature (1)..(142): NCBI GI NO: 11994120 NR Description: contains similarity to nodulin MtN3 protein~gene_id:MMG15
  misc_feature (1)..(142): NCBI GI NO: 18405611 NR Description: Expressed protein; protein id: At3g28007
  misc_feature (1)..(142): NCBI GI NO: 21592355 NR Description: contains similarity to nodulin MtN3 protein
  misc_feature (1)..(125): NCBI GI NO: 34912454 NR Description: P0681B11.31
  misc_feature (1)..(126): NCBI GI NO: 34912462 NR Description: MtN3-like protein
  misc_feature (1)..(85): NCBI GI NO: 10177463 NR Description: contains similarity to MtN3 protein~gene_id:MQB2
  misc_feature (1)..(137): NCBI GI NO: 18413388 NR Description: putative protein; protein id: At4g10850
  misc_feature (1)..(108): NCBI GI NO: 15219732 NR Description: hypothetical protein; protein id: At1g66770.1
  misc_feature (1)..(137): NCBI GI NO: 7486148 NR Description: hypothetical protein F25I24
  misc_feature (1)..(122): NCBI GI NO: 18421965 NR Description: putative protein; protein id: At5g40260
MVFVGIVATCTLLLFHTHNQRSSFVGIFCVIFVSLMYIAPLTIMSKVIKTKSVKYMPFSLSLANFLNGVVWVIYALIKFDLFILIGNGLGTVSGAVQLILYACYYKTTPKDDEDEEDEENLSKVNSQLQLSGNSGQAKRVSA

SEQ ID NO: 436 - DNA, 1243 bp, Arabidopsis thaliana
  misc_feature (1)..(1243): Ceres Seq. ID no. 12562371
attgtaacttgtaaccagtgtcggctaatttcgacttttgtagatctttttctgctctttctctctctctctctctctctctctctctctctctcttgtattatttctatctcccccgccgtcgaaagagaaacgtcgatcggagaacctttgaaatgtcgactggattagatatgtctctcgacgacatgatcgccaagaaccgtaagtctcgtggtggagccggccccgctcgtggaaccggatccggatccggaccgggtccgactcgccgcaacaaccctaatcggaaatcaacccgatctgctccataccaatcagccaaggcgccggagtccacctggggtcacgacatgttctccgatagatctgaagatcaccgatcgggacgttcctccgccggaatcgaaactggaaccaagctctacatttccaatttggattacggtgtcatgaacgaagacatcaaggaactgtttgctgaagttggagaacttaaacgctacacagttcattttgatagaagtggaagatcaaagggaactgctgaagtagtgtattctcggcgtggcgatgcactcgcagctgtgaagaagtataatgatgttcagctggatggaaaacccatgaagatagagattgtgggcactaatcttcaaactgctgcagccccgtctggtagacctgcgaatggaaactccaatggtgctccatggagaggaggacaagggagaggaggtcaacaacgaggtggtggacgaggaggcggtggccgaggtggtggtggtcgtggtaggcgtcctggtaagggccctgcagagaagatttctgcggaagatcttgatgcggatcttgataagtaccattctggagatatggagacaaactaaggaacgtgactgatcttctcaaaccggtaggggttttaggaggaagagaatcgagaaaatgtttgccagaggctttaccacttagcgcctttttggctgtgttgttcatttgtttcattagaatgactttacagaattgagaatatgtgttatttaaagttgttgtctatcttaataccctcaagtgaaaggcagaggaaggaataccaatttcgtttacagatcatatgcaggcaaaagagttttcagaaatcaggtttagttacttgtattgtgtctcttatccaagccatgccttgtggtattatgagcgcagaattttgattgaatattgttcatttgcattaaagtat

SEQ ID NO: 437 - protein, 244 aa, Arabidopsis thaliana
  peptide (1)..(244): Ceres Seq. ID no. 12562372
  misc_feature (90)..(160): Pfam Name: a.k.a. RRM, RBD, or RNP domain Pfam Description: RNA recognition motif.
  misc_feature (1)..(244): NCBI GI NO: 30697310 NR Description: RNA and export factor binding protein, putative
  misc_feature (1)..(244): NCBI GI NO: 30697313 NR Description: RNA and export factor binding protein, putative
  misc_feature (1)..(244): NCBI GI NO: 21555029 NR Description: transcriptional coactivator-like protein
  misc_feature (1)..(244): NCBI GI NO: 9757916 NR Description: RNA and export factor binding protein 2-I-like protein
  misc_feature (14)..(244): NCBI GI NO: 6755763 NR Description: RNA and export factor binding protein 1
  misc_feature (1)..(36): NCBI GI NO: 6755763 NR Description: RNA and export factor binding protein 1
  misc_feature (18)..(244): NCBI GI NO: 30411083 NR Description: Similar to THO complex 4 [Homo sapiens]
  misc_feature (1)..(36): NCBI GI NO: 30411083 NR Description: Similar to THO complex 4 [Homo sapiens]
  misc_feature (18)..(219): NCBI GI NO: 11358209 NR Description: hypothetical protein T22P11
  misc_feature (18)..(219): NCBI GI NO: 30679669 NR Description: RNA and export factor binding protein, putative
MSTGLDMSLDDMIAKNRKSRGGAGPARGTGSGSGPGPTRRNNPNRKSTRSAPYQSAKAPESTWGHDMFSDRSEDHRSGRSSAGIETGTKLYISNLDYGVMNEDIKELFAEVGELKRYTVHFDRSGRSKGTAEVVYSRRGDALAAVKKYNDVQLDGKPMKIEIVGTNLQTAAAPSGRPANGNSNGAPWRGGQGRGGQQRGGGRGGGGRGGGGRGRRPGKGPAEKISAEDLDADLDKYHSGDMETN

SEQ ID NO: 438 - protein, 238 aa, Arabidopsis thaliana
  peptide (1)..(238): Ceres Seq. ID no. 12562373
  misc_feature (84)..(154): Pfam Name: a.k.a. RRM, RBD, or RNP domain Pfam Description: RNA recognition motif.
  misc_feature (1)..(238): NCBI GI NO: 30697310 NR Description: RNA and export factor binding protein, putative
  misc_feature (1)..(238): NCBI GI NO: 30697313 NR Description: RNA and export factor binding protein, putative
  misc_feature (1)..(238): NCBI GI NO: 21555029 NR Description: transcriptional coactivator-like protein
  misc_feature (1)..(238): NCBI GI NO: 9757916 NR Description: RNA and export factor binding protein 2-I-like protein
  misc_feature (8)..(238): NCBI GI NO: 6755763 NR Description: RNA and export factor binding protein 1
  misc_feature (1)..(30): NCBI GI NO: 6755763 NR Description: RNA and export factor binding protein 1
  misc_feature (12)..(238): NCBI GI NO: 30411083 NR Description: Similar to THO complex 4 [Homo sapiens]
  misc_feature (1)..(30): NCBI GI NO: 30411083 NR Description: Similar to THO complex 4 [Homo sapiens]
  misc_feature (12)..(213): NCBI GI NO: 11358209 NR Description: hypothetical protein T22P11
  misc_feature (12)..(213): NCBI GI NO: 30679669 NR Description: RNA and export factor binding protein, putative
MSLDDMIAKNRKSRGGAGPARGTGSGSGPGPTRRNNPNRKSTRSAPYQSAKAPESTWGHDMFSDRSEDHRSGRSSAGIETGTKLYISNLDYGVMNEDIKELFAEVGELKRYTVHFDRSGRSKGTAEVVYSRRGDALAAVKKYNDVQLDGKPMKIEIVGTNLQTAAAPSGRPANGNSNGAPWRGGQGRGGQQRGGGRGGGGRGGGGRGRRPGKGPAEKISAEDLDADLDKYHSGDMETN

SEQ ID NO: 439 - protein, 233 aa, Arabidopsis thaliana
  peptide (1)..(233): Ceres Seq. ID no. 12562374
  misc_feature (79)..(149): Pfam Name: a.k.a. RRM, RBD, or RNP domain Pfam Description: RNA recognition motif.
  misc_feature (1)..(233): NCBI GI NO: 30697310 NR Description: RNA and export factor binding protein, putative
  misc_feature (1)..(233): NCBI GI NO: 30697313 NR Description: RNA and export factor binding protein, putative
  misc_feature (1)..(233): NCBI GI NO: 21555029 NR Description: transcriptional coactivator-like protein
  misc_feature (1)..(233): NCBI GI NO: 9757916 NR Description: RNA and export factor binding protein 2-I-like protein
  misc_feature (3)..(233): NCBI GI NO: 6755763 NR Description: RNA and export factor binding protein 1
  misc_feature (1)..(25): NCBI GI NO: 6755763 NR Description: RNA and export factor binding protein 1
  misc_feature (7)..(233): NCBI GI NO: 30411083 NR Description: Similar to THO complex 4 [Homo sapiens]
  misc_feature (1)..(25): NCBI GI NO: 30411083 NR Description: Similar to THO complex 4 [Homo sapiens]
  misc_feature (7)..(208): NCBI GI NO: 11358209 NR Description: hypothetical protein T22P11
  misc_feature (7)..(208): NCBI GI NO: 30679669 NR Description: RNA and export factor binding protein, putative
MIAKNRKSRGGAGPARGTGSGSGPGPTRRNNPNRKSTRSAPYQSAKAPESTWGHDMFSDRSEDHRSGRSSAGIETGTKLYISNLDYGVMNEDIKELFAEVGELKRYTVHFDRSGRSKGTAEVVYSRRGDALAAVKKYNDVQLDGKPMKIEIVGTNLQTAAAPSGRPANGNSNGAPWRGGQGRGGQQRGGGRGGGGRGGGGRGRRPGKGPAEKISAEDLDADLDKYHSGDMETN

SEQ ID NO: 440 - DNA, 1796 bp, Arabidopsis thaliana
  misc_feature (1)..(1796): Ceres Seq. ID no. 13487042
gacagtgaattagggttttactcaaaaaaccttctcgttgtcgttgtttactgctccgacgagaaaatggcgatgcgacatttgagccgatcgagagacgttacaaagagatcgacaaagaagtacatcgaagaacctctgtacaatcgcctcttcaaagatggtggtacagaggtcaaagttcgacagcagcttaatcagttcctcaaaggcactaaacacgtcttcaaatgggaggtcggcgatacgatcaagaaactccgaaatcgcggcctctattacccagctctcaagctatctgaagttatggaagagagaggtatgaacaagacagtgagtgatcaagcaatccatcttgatcttgttgctaaagctcgtgaaattactgctggggagaattattttgttgatcttccggaaacatctaagacggaactcacgtatgggtctcttttgaactgttactgcaaggagttgttgacagagaaagcggaaggtttgctgaataagatgaaagagctcaacattactcctagttccatgtcttataacagcctcatgactctttacaccaagacaggtgagactgagaaagttccggcgatgattcaagaattgaaggcggagaatgtgatgccggattcgtacacttataatgtctggatgagggctttggctgctactaatgatatttctggtgttgagagagtcattgaagagatgaatagagatggtagagttgctccggattggactacgtatagcaatatggcatcgatatatgttgatgctggactgtctcagaaagctgagaaggctcttcaggaactggagatgaaaaacacgcaacgggattttacggcatatcagtttcttattactttgtatggacgtctggggaagctgactgaagtttacagaatttggcgttcgttgaggctggctattccgaaaacctcaaatgtagcttatctaaacatgatacaagtgctggtcaagttgaatgatttacctggtgcagagacattgttcaaggaatggcaagctaactgttctacttatgacatcaggattgtgaatgtgttgattggagcttatgctcaagagggtctaatccagaaagcaaatgagctcaaggagaaagctcccagaagaggtggaaagctcaatgctaaaacatgggagatcttcatggattactatgtaaagagcggtgatatggctcgagcactcgaatgcatgtcaaaggcagtctccatcggcaaaggagatggtggcaagtggctaccgtcacctgaaacagtcagagctttgatgagctatttcgagcaaaagaaagatgttaatggagctgagaatttgttggagattttaaagaatggaacagacaacataggcgcagaaatatttgaaccattgataagaacatatgcagcagcgggaaagagtcaccctgctatgcgacggcgcctgaagatggaaaacgtggaggttaatgaagcgacaaagaagctactcgatgaagtatctcaggatgtgtgaggtctgttccatctctttctccttcattattcacttcagacaaagacatcattagtcgtgatagggtcacttgcattctcacagctctgtctcttattggtaataaaaaaataggctctgaatcggcaaaatcaattgtatgggtctgttttactttcaccgtagactgtttgttcatgtttttgtgaattgtttttggtttagcttggatttacagttgagacagctctcacaatgtaatcccttttttggag

SEQ ID NO: 441 - protein, 513 aa, Arabidopsis thaliana
  peptide (1)..(513): Ceres Seq. ID no. 13487043
  misc_feature (322)..(356): Pfam Name: Pfam Description:  PPR repeat
  misc_feature (23)..(513): NCBI GI NO: 15219808 NR Description: pentatricopeptide (PPR) repeat-containing protein
  misc_feature (29)..(349): NCBI GI NO: 32490390 NR Description: OSJNBa0041M06.2
  misc_feature (44)..(509): NCBI GI NO: 15217734 NR Description: pentatricopeptide (PPR) repeat-containing protein
  misc_feature (44)..(509): NCBI GI NO: 17529324 NR Description: unknown protein [Arabidopsis thaliana]
  misc_feature (35)..(509): NCBI GI NO: 18411800 NR Description: pentatricopeptide (PPR) repeat-containing protein
  misc_feature (35)..(509): NCBI GI NO: 25407143 NR Description: hypothetical protein AT4g01990
  misc_feature (73)..(459): NCBI GI NO: 34393591 NR Description: putative DNA-binding protein
  misc_feature (13)..(463): NCBI GI NO: 22329290 NR Description: pentatricopeptide (PPR) repeat-containing protein
  misc_feature (13)..(463): NCBI GI NO: 20453085 NR Description: At1g02150/T7I23.8 [Arabidopsis thaliana]
  misc_feature (39)..(506): NCBI GI NO: 22328859 NR Description: pentatricopeptide (PPR) repeat-containing protein
DSELGFYSKNLLVVVVYCSDEKMAMRHLSRSRDVTKRSTKKYIEEPLYNRLFKDGGTEVKVRQQLNQFLKGTKHVFKWEVGDTIKKLRNRGLYYPALKLSEVMEERGMNKTVSDQAIHLDLVAKAREITAGENYFVDLPETSKTELTYGSLLNCYCKELLTEKAEGLLNKMKELNITPSSMSYNSLMTLYTKTGETEKVPAMIQELKAENVMPDSYTYNVWMRALAATNDISGVERVIEEMNRDGRVAPDWTTYSNMASIYVDAGLSQKAEKALQELEMKNTQRDFTAYQFLITLYGRLGKLTEVYRIWRSLRLAIPKTSNVAYLNMIQVLVKLNDLPGAETLFKEWQANCSTYDIRIVNVLIGAYAQEGLIQKANELKEKAPRRGGKLNAKTWEIFMDYYVKSGDMARALECMSKAVSIGKGDGGKWLPSPETVRALMSYFEQKKDVNGAENLLEILKNGTDNIGAEIFEPLIRTYAAAGKSHPAMRRRLKMENVEVNEATKKLLDEVSQDV

SEQ ID NO: 442 - protein, 491 aa, Arabidopsis thaliana
  peptide (1)..(491): Ceres Seq. ID no. 13487044
  misc_feature (300)..(334): Pfam Name: Pfam Description:  PPR repeat
  misc_feature (1)..(491): NCBI GI NO: 15219808 NR Description: pentatricopeptide (PPR) repeat-containing protein
  misc_feature (7)..(327): NCBI GI NO: 32490390 NR Description: OSJNBa0041M06.2
  misc_feature (22)..(487): NCBI GI NO: 15217734 NR Description: pentatricopeptide (PPR) repeat-containing protein
  misc_feature (22)..(487): NCBI GI NO: 17529324 NR Description: unknown protein [Arabidopsis thaliana]
  misc_feature (13)..(487): NCBI GI NO: 18411800 NR Description: pentatricopeptide (PPR) repeat-containing protein
  misc_feature (13)..(487): NCBI GI NO: 25407143 NR Description: hypothetical protein AT4g01990
  misc_feature (51)..(437): NCBI GI NO: 34393591 NR Description: putative DNA-binding protein
  misc_feature (1)..(441): NCBI GI NO: 22329290 NR Description: pentatricopeptide (PPR) repeat-containing protein
  misc_feature (1)..(441): NCBI GI NO: 20453085 NR Description: At1g02150/T7I23.8 [Arabidopsis thaliana]
  misc_feature (17)..(484): NCBI GI NO: 22328859 NR Description: pentatricopeptide (PPR) repeat-containing protein
MAMRHLSRSRDVTKRSTKKYIEEPLYNRLFKDGGTEVKVRQQLNQFLKGTKHVFKWEVGDTIKKLRNRGLYYPALKLSEVMEERGMNKTVSDQAIHLDLVAKAREITAGENYFVDLPETSKTELTYGSLLNCYCKELLTEKAEGLLNKMKELNITPSSMSYNSLMTLYTKTGETEKVPAMIQELKAENVMPDSYTYNVWMRALAATNDISGVERVIEEMNRDGRVAPDWTTYSNMASIYVDAGLSQKAEKALQELEMKNTQRDFTAYQFLITLYGRLGKLTEVYRIWRSLRLAIPKTSNVAYLNMIQVLVKLNDLPGAETLFKEWQANCSTYDIRIVNVLIGAYAQEGLIQKANELKEKAPRRGGKLNAKTWEIFMDYYVKSGDMARALECMSKAVSIGKGDGGKWLPSPETVRALMSYFEQKKDVNGAENLLEILKNGTDNIGAEIFEPLIRTYAAAGKSHPAMRRRLKMENVEVNEATKKLLDEVSQDV

SEQ ID NO: 443 - protein, 489 aa, Arabidopsis thaliana
  peptide (1)..(489): Ceres Seq. ID no. 13487045
  misc_feature (298)..(332): Pfam Name: Pfam Description:  PPR repeat
  misc_feature (1)..(489): NCBI GI NO: 15219808 NR Description: pentatricopeptide (PPR) repeat-containing protein
  misc_feature (5)..(325): NCBI GI NO: 32490390 NR Description: OSJNBa0041M06.2
  misc_feature (20)..(485): NCBI GI NO: 15217734 NR Description: pentatricopeptide (PPR) repeat-containing protein
  misc_feature (20)..(485): NCBI GI NO: 17529324 NR Description: unknown protein [Arabidopsis thaliana]
  misc_feature (11)..(485): NCBI GI NO: 18411800 NR Description: pentatricopeptide (PPR) repeat-containing protein
  misc_feature (11)..(485): NCBI GI NO: 25407143 NR Description: hypothetical protein AT4g01990
  misc_feature (49)..(435): NCBI GI NO: 34393591 NR Description: putative DNA-binding protein
  misc_feature (1)..(439): NCBI GI NO: 22329290 NR Description: pentatricopeptide (PPR) repeat-containing protein
  misc_feature (1)..(439): NCBI GI NO: 20453085 NR Description: At1g02150/T7I23.8 [Arabidopsis thaliana]
  misc_feature (15)..(482): NCBI GI NO: 22328859 NR Description: pentatricopeptide (PPR) repeat-containing protein
MRHLSRSRDVTKRSTKKYIEEPLYNRLFKDGGTEVKVRQQLNQFLKGTKHVFKWEVGDTIKKLRNRGLYYPALKLSEVMEERGMNKTVSDQAIHLDLVAKAREITAGENYFVDLPETSKTELTYGSLLNCYCKELLTEKAEGLLNKMKELNITPSSMSYNSLMTLYTKTGETEKVPAMIQELKAENVMPDSYTYNVWMRALAATNDISGVERVIEEMNRDGRVAPDWTTYSNMASIYVDAGLSQKAEKALQELEMKNTQRDFTAYQFLITLYGRLGKLTEVYRIWRSLRLAIPKTSNVAYLNMIQVLVKLNDLPGAETLFKEWQANCSTYDIRIVNVLIGAYAQEGLIQKANELKEKAPRRGGKLNAKTWEIFMDYYVKSGDMARALECMSKAVSIGKGDGGKWLPSPETVRALMSYFEQKKDVNGAENLLEILKNGTDNIGAEIFEPLIRTYAAAGKSHPAMRRRLKMENVEVNEATKKLLDEVSQDV

SEQ ID NO: 444 - DNA, 1058 bp, Arabidopsis thaliana
  misc_feature (1)..(1058): Ceres Seq. ID no. 13592274
gaattatctatcacaccaccactctctctctaatctatctatccgagaatggccaagatgggcttgaaacccgacccggctactactaaccagacccacaataatgccaaggagattcgttacagaggcgttaggaagcgtccttggggccgttatgccgccgagatccgagatccgggcaagaaaacccgcgtctggcttggcactttcgatacggctgaagaggcggcgcgtgcttacgatacggcggcgcgtgattttcgtggtgctaaggctaagaccaatttcccaacttttctcgagctgagtgaccagaaggtccctaccggtttcgcgcgtagccctagccagagcagcacgctcgactgtgcttctcctccgacgttagttgtgccttcagcgacggctgggaatgttcccccgcagctcgagcttagtctcggcggaggaggcggcggctcgtgttatcagatcccgatgtcgcgtcctgtctactttttggacctgatggggatcggtaacgtaggtcgtggtcagcctcctcctgtgacatcggcgtttagatcgccggtggtgcatgttgcgacgaagatggcttgtggtgcccaaagcgactctgattcgtcatcggtcgttgatttcgaaggtgggatggagaagagatctcagctgttagatctagatcttaatttgcctcctccatcggaacaggcctgagcttttaacggtgtcgtttcaattcgaagcgcatgcgtttcttcttctttttgagctgtgaaaattcgttttctcatagtttttcctctctctctctctcagtctaaatttattaccagtttttagaaagaaaaaacagattaaatctgagagagaaaaatataattttagctgacatggatcgttatgtacatattattacataaccggagatctgaacttttgttgtgtgcttttaattttttgcgacttggtttcaccccatgttgtttctctattttttttactactttttttttttttgttcttccaaattttcaatcaataatttggtaatcttc

SEQ ID NO: 445 - protein, 222 aa, Arabidopsis thaliana
  peptide (1)..(222): Ceres Seq. ID no. 13592275
  misc_feature (22)..(86): Pfam Name: Pfam Description:  AP2 domain
  misc_feature (1)..(222): NCBI GI NO: 15232526 NR Description: ethylene responsive element binding factor 4
  misc_feature (1)..(207): NCBI GI NO: 2281635 NR Description: AP2 domain containing protein RAP2.5
  misc_feature (1)..(153): NCBI GI NO: 20340233 NR Description: ethylene responsive element binding factor 4-like
  misc_feature (179)..(220): NCBI GI NO: 20340233 NR Description: ethylene responsive element binding factor 4-like
  misc_feature (4)..(113): NCBI GI NO: 15219215 NR Description: ethylene responsive element binding factor 8
  misc_feature (151)..(220): NCBI GI NO: 15219215 NR Description: ethylene responsive element binding factor 8
  misc_feature (20)..(218): NCBI GI NO: 30526297 NR Description: ethylene response factor 2
  misc_feature (6)..(132): NCBI GI NO: 15218649 NR Description: ethylene responsive element binding factor 11
  misc_feature (6)..(132): NCBI GI NO: 25403338 NR Description: protein F3M18.20 [imported] - Arabidopsis thaliana
  misc_feature (167)..(220): NCBI GI NO: 15218649 NR Description: ethylene responsive element binding factor 11
MAKMGLKPDPATTNQTHNNAKEIRYRGVRKRPWGRYAAEIRDPGKKTRVWLGTFDTAEEAARAYDTAARDFRGAKAKTNFPTFLELSDQKVPTGFARSPSQSSTLDCASPPTLVVPSATAGNVPPQLELSLGGGGGGSCYQIPMSRPVYFLDLMGIGNVGRGQPPPVTSAFRSPVVHVATKMACGAQSDSDSSSVVDFEGGMEKRSQLLDLDLNLPPPSEQA

SEQ ID NO: 446 - protein, 219 aa, Arabidopsis thaliana
  peptide (1)..(219): Ceres Seq. ID no. 13592276
  misc_feature (19)..(83): Pfam Name: Pfam Description:  AP2 domain
  misc_feature (1)..(219): NCBI GI NO: 15232526 NR Description: ethylene responsive element binding factor 4
  misc_feature (1)..(204): NCBI GI NO: 2281635 NR Description: AP2 domain containing protein RAP2.5
  misc_feature (1)..(150): NCBI GI NO: 20340233 NR Description: ethylene responsive element binding factor 4-like
  misc_feature (176)..(217): NCBI GI NO: 20340233 NR Description: ethylene responsive element binding factor 4-like
  misc_feature (1)..(110): NCBI GI NO: 15219215 NR Description: ethylene responsive element binding factor 8
  misc_feature (148)..(217): NCBI GI NO: 15219215 NR Description: ethylene responsive element binding factor 8
  misc_feature (17)..(215): NCBI GI NO: 30526297 NR Description: ethylene response factor 2
  misc_feature (3)..(129): NCBI GI NO: 15218649 NR Description: ethylene responsive element binding factor 11
  misc_feature (3)..(129): NCBI GI NO: 25403338 NR Description: protein F3M18.20 [imported] - Arabidopsis thaliana
  misc_feature (164)..(217): NCBI GI NO: 15218649 NR Description: ethylene responsive element binding factor 11
MGLKPDPATTNQTHNNAKEIRYRGVRKRPWGRYAAEIRDPGKKTRVWLGTFDTAEEAARAYDTAARDFRGAKAKTNFPTFLELSDQKVPTGFARSPSQSSTLDCASPPTLVVPSATAGNVPPQLELSLGGGGGGSCYQIPMSRPVYFLDLMGIGNVGRGQPPPVTSAFRSPVVHVATKMACGAQSDSDSSSVVDFEGGMEKRSQLLDLDLNLPPPSEQA

SEQ ID NO: 447 - DNA, 950 bp, Arabidopsis thaliana
  misc_feature (1)..(950): Ceres Seq. ID no. 12396694
ttttcactttgttctctctctctctcgtaacacgcctgagagttctcgtcgtccttatctcgatcttggttgattcgctctccgatcggaaattagggcttttgttttctgaagatgacgactgcagcacgaccaacctgggctccagctaagggaggtaacgagcaaggtggtgctcggatctttggtccatctcagaagtattcgtcccgtgatgtcgccgctcacacaactttaaagccaaggagggaagggcaacacactcaagaggaactccagaagataaatcttcgtgatgagcttgaagagcgtgagaggagacatttctcatcaaaagacaaatcatacaatgatgatagagatcgcagaagaggaagtcagcttttactggaagactcgaaaagggatcctgaagagcggattattcctcgcagtgtagatgctgatgattctgatgttgatatcaaaagtgacgatgatagtgatgacgaaagtgacgatgatgatgaggacgacactgaagctcttatggcggaactcgaccagataaagaaagaaagagtggaagagaggctcaggaaggaaaaagagcagcagatggaagagctaaacgctaaggaagaggaacttctcaaaggaaacccattgcttaatactccagcgtcttttagcgtcaaaaggaggtgggatgatgatgttgtattcaaaaaccaggcacgtggtgaaatgaaagctcctaagcgcttcatcaatgatacaatcaggaatgacttccacagaaaattcctgcatagatacatgaagtgattgtttgtcaagagtgttattgctacttctttgtatgatgattatgactaaaagcttttattctgtctggaattacgatgtctctgtactcaaacaacaaatgtttttaagctttatatcaaaaacttatgcatttgattttg

SEQ ID NO: 448 - protein, 230 aa, Arabidopsis thaliana
  peptide (1)..(230): Ceres Seq. ID no. 12396695
  misc_feature (1)..(230): Pfam Name: Pfam Description:  Cwf15/Cwc15 cell cycle control protein
  misc_feature (1)..(230): NCBI GI NO: 15451186 NR Description: Unknown protein [Arabidopsis thaliana]
  misc_feature (1)..(230): NCBI GI NO: 18399903 NR Description: expressed protein; protein id: At3g13200
  misc_feature (1)..(230): NCBI GI NO: 21592359 NR Description: unknown [Arabidopsis thaliana]
  misc_feature (1)..(230): NCBI GI NO: 34897750 NR Description: ESTs AU032852
  misc_feature (1)..(230): NCBI GI NO: 12963537 NR Description: RIKEN cDNA 0610040D20 [Mus musculus]
  misc_feature (1)..(230): NCBI GI NO: 6523797 NR Description: adrenal gland protein AD-002 [Homo sapiens]
  misc_feature (1)..(230): NCBI GI NO: 27719369 NR Description: similar to RIKEN cDNA 0610040D20
  misc_feature (1)..(230): NCBI GI NO: 7705475 NR Description: hypothetical protein HSPC148 [Homo sapiens]
  misc_feature (1)..(230): NCBI GI NO: 27688663 NR Description: similar to RIKEN cDNA 0610040D20
  misc_feature (1)..(230): NCBI GI NO: 17564200 NR Description: Adrenal gland protein AD-002 like (26.1 kD)
MTTAARPTWAPAKGGNEQGGARIFGPSQKYSSRDVAAHTTLKPRREGQHTQEELQKINLRDELEERERRHFSSKDKSYNDDRDRRRGSQLLLEDSKRDPEERIIPRSVDADDSDVDIKSDDDSDDESDDDDEDDTEALMAELDQIKKERVEERLRKEKEQQMEELNAKEEELLKGNPLLNTPASFSVKRRWDDDVVFKNQARGEMKAPKRFINDTIRNDFHRKFLHRYMK

SEQ ID NO: 449 - DNA, 1817 bp, Arabidopsis thaliana
  misc_feature (1)..(1817): Ceres Seq. ID no. 13500174
accggaattttctcgcttttgtctactctcctccatctccgaggttctccaagctcagctcctcttcccatcattcatccgaccgccttatccggagaactacaaagaggaaaccaagattgttttgttttgttagactctaccccttttccgattcacatggtaaggacattgaggtagagaataatactaaaaagcaatgggagatgggagttccagtagatccaacagctcaaacagcactagtgagaaaccagagtggctgcaacagtacaatctcgttggtaagattggtgaaggcacttatggtcttgttttcttggctagaaccaagactccgcctaaaagacctattgctatcaagaagtttaagcagtccaaagatggagatggagtttccccgactgctatccgcgagatcatgttgcttagagagatttcccatgagaacgtcgtgaagcttgtgaatgtccacatcaattttgcagacatgtctctgtatcttgcctttgattatgccgagtacgatctctatgaaatcatcaggcaccacagagacaaagtcggccattcgttaaacacatacacagttaagtctttgctctggcagcttctcaacggattgaactatcttcacagtaattggattatacacagagatttgaaaccgtcgaatatcttggttatgggtgatgcagaagagcacggaatagtgaaaatagctgatttcgggctcgcaaggatatatcaagctccgttgaaaccactatcggataacggagttgtggtcacaatctggtaccgagcaccagagctgcttcttggttcgaagcactacacgagcgctgttgatatgtgggcagttgggtgtatattcgcggagttactaactcttaaaccgttgtttcaaggagcagaagcgaaatcgtctcaaaaccctttccagttagatcaacttgacaagatattcaagatcttaggccacccgacgatggataaatggccaacactagttaaccttccacactggcaaaatgatgttcaacacattcaagctcacaaatacgacagtgtgggtctccacaacgtggttcacctgaatcagaaaagtcctgcgtatgatctgttatccaaaatgctggaatatgatcctctaaagcggatcacggcttcacaagcactagaacacgagtatttccgaatggatcctctcccaggacggaacgcatttgtagccagccaaccgatggagaagaatgtgaattacccaactcgtccagtagatacaaacaccgatttcgaaggcacgacaagcatcaatccgcctcaagcagtagcagcaggaaacgtagcagggaacatggcaggagctcatggaatgggcagtagatcgatgccaagaccaatggttgcacataacatgcagaggatgcagcaatctcaaggcatgatggcttataatttcccggcacaggcagggcttaacccgagtgttccgctgcagcagcagcgcgggatggctcaaccgcaccagcagcaacagctaagaagggaagatcccggaatgggtatgtcaggttacgcacctcctaacaaatccagacgcctctaaaggtaaaatcgagatcatcagtctcgggttagaatctgtgtgtttgccgcagaagaaagcgttgcgatttgctttatagagtagagttagattgtaatgcagcatgtggaatgttgctattcatatggatggattggattctctgtagtttttgtataaacatcctctcaagtatttgttaattatattagatcatcatttctcc

SEQ ID NO: 450 - protein, 470 aa, Arabidopsis thaliana
  peptide (1)..(470): Ceres Seq. ID no. 13500175
  misc_feature (25)..(333): Pfam Name: Pfam Description:  Protein kinase domain
  misc_feature (1)..(470): NCBI GI NO: 28973682 NR Description: putative cyclin-dependent kinase E1
  misc_feature (1)..(470): NCBI GI NO: 15242829 NR Description: protein kinase, putative [Arabidopsis thaliana]
  misc_feature (16)..(469): NCBI GI NO: 37537198 NR Description: putative serine/threonine kinase
  misc_feature (56)..(470): NCBI GI NO: 7488749 NR Description: probable cdc2-like protein kinase cdc2MsE - alfalfa
  misc_feature (2)..(362): NCBI GI NO: 15778146 NR Description: cyclin-dependent kinase 8
  misc_feature (25)..(368): NCBI GI NO: 1718193 NR Description: Cdk8
  misc_feature (13)..(359): NCBI GI NO: 4502745 NR Description: cyclin-dependent kinase 8
  misc_feature (25)..(368): NCBI GI NO: 24661985 NR Description: Cyclin-dependent kinase 8 CG10572-PA
  misc_feature (17)..(377): NCBI GI NO: 28972574 NR Description: mKIAA1028 protein [Mus musculus]
  misc_feature (17)..(381): NCBI GI NO: 20521738 NR Description: KIAA1028 protein [Homo sapiens]
MGDGSSSRSNSSNSTSEKPEWLQQYNLVGKIGEGTYGLVFLARTKTPPKRPIAIKKFKQSKDGDGVSPTAIREIMLLREISHENVVKLVNVHINFADMSLYLAFDYAEYDLYEIIRHHRDKVGHSLNTYTVKSLLWQLLNGLNYLHSNWIIHRDLKPSNILVMGDAEEHGIVKIADFGLARIYQAPLKPLSDNGVVVTIWYRAPELLLGSKHYTSAVDMWAVGCIFAELLTLKPLFQGAEAKSSQNPFQLDQLDKIFKILGHPTMDKWPTLVNLPHWQNDVQHIQAHKYDSVGLHNVVHLNQKSPAYDLLSKMLEYDPLKRITASQALEHEYFRMDPLPGRNAFVASQPMEKNVNYPTRPVDTNTDFEGTTSINPPQAVAAGNVAGNMAGAHGMGSRSMPRPMVAHNMQRMQQSQGMMAYNFPAQAGLNPSVPLQQQRGMAQPHQQQQLRREDPGMGMSGYAPPNKSRRL

SEQ ID NO: 451 - protein, 396 aa, Arabidopsis thaliana
  peptide (1)..(396): Ceres Seq. ID no. 13500176
  misc_feature (1)..(259): Pfam Name: Pfam Description:  Protein kinase domain
  misc_feature (1)..(396): NCBI GI NO: 28973682 NR Description: putative cyclin-dependent kinase E1
  misc_feature (1)..(396): NCBI GI NO: 15242829 NR Description: protein kinase, putative [Arabidopsis thaliana]
  misc_feature (1)..(395): NCBI GI NO: 37537198 NR Description: putative serine/threonine kinase
  misc_feature (1)..(396): NCBI GI NO: 7488749 NR Description: probable cdc2-like protein kinase cdc2MsE - alfalfa
  misc_feature (1)..(288): NCBI GI NO: 15778146 NR Description: cyclin-dependent kinase 8
  misc_feature (1)..(294): NCBI GI NO: 1718193 NR Description: Cdk8
  misc_feature (1)..(285): NCBI GI NO: 4502745 NR Description: cyclin-dependent kinase 8
  misc_feature (1)..(294): NCBI GI NO: 24661985 NR Description: Cyclin-dependent kinase 8 CG10572-PA
  misc_feature (1)..(303): NCBI GI NO: 28972574 NR Description: mKIAA1028 protein [Mus musculus]
  misc_feature (1)..(307): NCBI GI NO: 20521738 NR Description: KIAA1028 protein [Homo sapiens]
MLLREISHENVVKLVNVHINFADMSLYLAFDYAEYDLYEIIRHHRDKVGHSLNTYTVKSLLWQLLNGLNYLHSNWIIHRDLKPSNILVMGDAEEHGIVKIADFGLARIYQAPLKPLSDNGVVVTIWYRAPELLLGSKHYTSAVDMWAVGCIFAELLTLKPLFQGAEAKSSQNPFQLDQLDKIFKILGHPTMDKWPTLVNLPHWQNDVQHIQAHKYDSVGLHNVVHLNQKSPAYDLLSKMLEYDPLKRITASQALEHEYFRMDPLPGRNAFVASQPMEKNVNYPTRPVDTNTDFEGTTSINPPQAVAAGNVAGNMAGAHGMGSRSMPRPMVAHNMQRMQQSQGMMAYNFPAQAGLNPSVPLQQQRGMAQPHQQQQLRREDPGMGMSGYAPPNKSRRL

SEQ ID NO: 452 - protein, 373 aa, Arabidopsis thaliana
  peptide (1)..(373): Ceres Seq. ID no. 13500177
  misc_feature (1)..(236): Pfam Name: Pfam Description:  Protein kinase domain
  misc_feature (1)..(373): NCBI GI NO: 28973682 NR Description: putative cyclin-dependent kinase E1
  misc_feature (1)..(373): NCBI GI NO: 15242829 NR Description: protein kinase, putative [Arabidopsis thaliana]
  misc_feature (1)..(372): NCBI GI NO: 37537198 NR Description: putative serine/threonine kinase
  misc_feature (1)..(373): NCBI GI NO: 7488749 NR Description: probable cdc2-like protein kinase cdc2MsE - alfalfa
  misc_feature (1)..(265): NCBI GI NO: 15778146 NR Description: cyclin-dependent kinase 8
  misc_feature (1)..(271): NCBI GI NO: 1718193 NR Description: Cdk8
  misc_feature (1)..(262): NCBI GI NO: 4502745 NR Description: cyclin-dependent kinase 8
  misc_feature (1)..(271): NCBI GI NO: 24661985 NR Description: Cyclin-dependent kinase 8 CG10572-PA
  misc_feature (1)..(280): NCBI GI NO: 28972574 NR Description: mKIAA1028 protein [Mus musculus]
  misc_feature (1)..(284): NCBI GI NO: 20521738 NR Description: KIAA1028 protein [Homo sapiens]
MSLYLAFDYAEYDLYEIIRHHRDKVGHSLNTYTVKSLLWQLLNGLNYLHSNWIIHRDLKPSNILVMGDAEEHGIVKIADFGLARIYQAPLKPLSDNGVVVTIWYRAPELLLGSKHYTSAVDMWAVGCIFAELLTLKPLFQGAEAKSSQNPFQLDQLDKIFKILGHPTMDKWPTLVNLPHWQNDVQHIQAHKYDSVGLHNVVHLNQKSPAYDLLSKMLEYDPLKRITASQALEHEYFRMDPLPGRNAFVASQPMEKNVNYPTRPVDTNTDFEGTTSINPPQAVAAGNVAGNMAGAHGMGSRSMPRPMVAHNMQRMQQSQGMMAYNFPAQAGLNPSVPLQQQRGMAQPHQQQQLRREDPGMGMSGYAPPNKSRRL

SEQ ID NO: 453 - DNA, 715 bp, Arabidopsis thaliana
  misc_feature (1)..(715): Ceres Seq. ID no. 12322680
tcctcatccccttaaaaaaccctaagagtagagactctctcaatcccggcggcgaagatgaagtacaacccaagagtgacctcttctcgcagaaagaacaggaaggctcatttcacagcttcctccagcgagaggcgtgtgataatgagctctcctctctccaccgatcttcgtcagaagtacaatgtcagatccatgccgatccgtaaagacgacgaggttcagatcgttcgtggtacttacaagggacgtgaaggcaaagttgttcaggtttaccgtcgcaaatgggtgattcacatcgagagaatcacgagggagaaggtgaatggaacaaccgtgaacgttgggattcagccgtcgaaagttgtgataacgaagcttcgtcttgataaagataggaaatcgcttttggagaggaaggctaagggacgtgctgctgctgataaggagaagggtactaagtttacgtctgaggatgttatgcagaacgttgattaagtaagaaggaagaagaaatcttcttgaaaggttttatcttttagagttatcttcaatcgctttttaattttcaagttttggatattttggaatgttgtcagtggatctttatggtgctagacatgagaacttatgttttgattttgagtatttgaagtttggttatggaagtttatctctttgtctcattctttataatgatgtgtttgtttggttg

SEQ ID NO: 454 - protein, 146 aa, Arabidopsis thaliana
  peptide (1)..(146): Ceres Seq. ID no. 12322681
  misc_feature (1)..(146): NCBI GI NO: 15229631 NR Description: 60S RIBOSOMAL PROTEIN - like
  misc_feature (1)..(145): NCBI GI NO: 3914740 NR Description: 60S ribosomal protein L26
  misc_feature (1)..(146): NCBI GI NO: 15240766 NR Description: 60S ribosomal protein L26; protein id: At5g67510
  misc_feature (1)..(141): NCBI GI NO: 34895672 NR Description: putative ribosomal protein L26
  misc_feature (1)..(119): NCBI GI NO: 3747050 NR Description: ribosomal protein L26 [Zea mays]
  misc_feature (1)..(141): NCBI GI NO: 132827 NR Description: 60S RIBOSOMAL PROTEIN L26
  misc_feature (1)..(141): NCBI GI NO: 4506621 NR Description: ribosomal protein L26; 60S ribosomal protein L26
  misc_feature (1)..(139): NCBI GI NO: 7705813 NR Description: ribosomal protein L26-like 1
  misc_feature (1)..(139): NCBI GI NO: 31207009 NR Description: ENSANGP00000022122 [Anopheles gambiae]
  misc_feature (1)..(141): NCBI GI NO: 27729769 NR Description: similar to ribosomal protein L26 - mouse
MKYNPRVTSSRRKNRKAHFTASSSERRVIMSSPLSTDLRQKYNVRSMPIRKDDEVQIVRGTYKGREGKVVQVYRRKWVIHIERITREKVNGTTVNVGIQPSKVVITKLRLDKDRKSLLERKAKGRAAADKEKGTKFTSEDVMQNVD

SEQ ID NO: 455 - protein, 117 aa, Arabidopsis thaliana
  peptide (1)..(117): Ceres Seq. ID no. 12322682
  misc_feature (1)..(117): NCBI GI NO: 15229631 NR Description: 60S RIBOSOMAL PROTEIN - like
  misc_feature (1)..(116): NCBI GI NO: 3914740 NR Description: 60S ribosomal protein L26
  misc_feature (1)..(117): NCBI GI NO: 15240766 NR Description: 60S ribosomal protein L26; protein id: At5g67510
  misc_feature (1)..(112): NCBI GI NO: 34895672 NR Description: putative ribosomal protein L26
  misc_feature (1)..(90): NCBI GI NO: 3747050 NR Description: ribosomal protein L26 [Zea mays]
  misc_feature (1)..(112): NCBI GI NO: 132827 NR Description: 60S RIBOSOMAL PROTEIN L26
  misc_feature (1)..(112): NCBI GI NO: 4506621 NR Description: ribosomal protein L26; 60S ribosomal protein L26
  misc_feature (1)..(110): NCBI GI NO: 7705813 NR Description: ribosomal protein L26-like 1
  misc_feature (1)..(110): NCBI GI NO: 31207009 NR Description: ENSANGP00000022122 [Anopheles gambiae]
  misc_feature (1)..(112): NCBI GI NO: 27729769 NR Description: similar to ribosomal protein L26 - mouse
MSSPLSTDLRQKYNVRSMPIRKDDEVQIVRGTYKGREGKVVQVYRRKWVIHIERITREKVNGTTVNVGIQPSKVVITKLRLDKDRKSLLERKAKGRAAADKEKGTKFTSEDVMQNVD

SEQ ID NO: 456 - protein, 100 aa, Arabidopsis thaliana
  peptide (1)..(100): Ceres Seq. ID no. 12322683
  misc_feature (1)..(100): NCBI GI NO: 15229631 NR Description: 60S RIBOSOMAL PROTEIN - like
  misc_feature (1)..(99): NCBI GI NO: 3914740 NR Description: 60S ribosomal protein L26
  misc_feature (1)..(100): NCBI GI NO: 15240766 NR Description: 60S ribosomal protein L26; protein id: At5g67510
  misc_feature (1)..(95): NCBI GI NO: 34895672 NR Description: putative ribosomal protein L26
  misc_feature (1)..(73): NCBI GI NO: 3747050 NR Description: ribosomal protein L26 [Zea mays]
  misc_feature (1)..(95): NCBI GI NO: 132827 NR Description: 60S RIBOSOMAL PROTEIN L26
  misc_feature (1)..(95): NCBI GI NO: 4506621 NR Description: ribosomal protein L26; 60S ribosomal protein L26
  misc_feature (1)..(93): NCBI GI NO: 7705813 NR Description: ribosomal protein L26-like 1
  misc_feature (1)..(93): NCBI GI NO: 31207009 NR Description: ENSANGP00000022122 [Anopheles gambiae]
  misc_feature (1)..(95): NCBI GI NO: 27729769 NR Description: similar to ribosomal protein L26 - mouse
MPIRKDDEVQIVRGTYKGREGKVVQVYRRKWVIHIERITREKVNGTTVNVGIQPSKVVITKLRLDKDRKSLLERKAKGRAAADKEKGTKFTSEDVMQNVD

SEQ ID NO: 457 - DNA, 757 bp, Arabidopsis thaliana
  misc_feature (1)..(757): Ceres Seq. ID no. 13496766
gttgaggatcatcgattatcagtttctggatttcgctactacagatttgtcccgtcttgagttacgaaatcatgatacattttgtgcttctagttagccggcaaggaaaggtaaggctcaccaaatggtattctccttatgcacagaaggaaagatctaaggttatacgtgaactcagtggagtgattctgaatcgaggtccaaagctctgcaattttgttgaatggagaggatacaaagttgtttacaaaagatatgcaagtctctacttctgcatgtgcattgatcaggaggataacgagttagaggtccttgagatcattcatcactatgttgagattctcgatcgctattttggaagtgtgtgtgaactcgatttgatttttaacttccacaaggcatattacatattggatgagctcttgattgctggggagcttcaagagtcaagcaagaaaacagtagccaggattatatccgctcaggatcaactggtggaggttgcaaaagaggaggccagttcgataagtaatataatcgctcaggctactaatcgataagtagtcttattcatcatctatgcattcttatgcagttaaagtatgttccctgtctctggctacagtaattgttttgagaaatctttatccatttgatttttcttgcggagggattttcgtcttaaagcgtaacttggagagaagaaatatgttatgatttggttcataaacaagtaaagattatatcgtttgtaatc

SEQ ID NO: 458 - protein, 162 aa, Arabidopsis thaliana
  peptide (1)..(162): Ceres Seq. ID no. 13496767
  misc_feature (1)..(142): Pfam Name: Pfam Description:  Clathrin adaptor complex small chain
  misc_feature (1)..(162): NCBI GI NO: 15237005 NR Description: clathrin assembly protein AP19 homolog
  misc_feature (1)..(160): NCBI GI NO: 18398407 NR Description: clathrin assembly protein AP19, small subunit
  misc_feature (1)..(160): NCBI GI NO: 2231698 NR Description: clathrin assembly protein AP19
  misc_feature (1)..(160): NCBI GI NO: 1762309 NR Description: AP-1 Golgi-related complex component
  misc_feature (1)..(160): NCBI GI NO: 34897116 NR Description: putative clathrin assembly protein [Oryza sativa]
  misc_feature (1)..(143): NCBI GI NO: 23508378 NR Description: clathrin assembly protein AP19, putative
  misc_feature (1)..(109): NCBI GI NO: 30690340 NR Description: clathrin assembly protein AP19 homolog
  misc_feature (1)..(156): NCBI GI NO: 23480730 NR Description: clathrin assembly protein AP19, small subunit
  misc_feature (2)..(147): NCBI GI NO: 21541960 NR Description: Adapter-related protein complex 1 sigma 1B subunit
  misc_feature (2)..(147): NCBI GI NO: 34880078 NR Description: similar to Adapter-related protein complex 1 sigma 1B subunit
MIHFVLLVSRQGKVRLTKWYSPYAQKERSKVIRELSGVILNRGPKLCNFVEWRGYKVVYKRYASLYFCMCIDQEDNELEVLEIIHHYVEILDRYFGSVCELDLIFNFHKAYYILDELLIAGELQESSKKTVARIISAQDQLVEVAKEEASSISNIIAQATNR

SEQ ID NO: 459 - protein, 94 aa, Arabidopsis thaliana
  peptide (1)..(94): Ceres Seq. ID no. 13496768
  misc_feature (1)..(74): Pfam Name: Pfam Description:  Clathrin adaptor complex small chain
  misc_feature (1)..(94): NCBI GI NO: 15237005 NR Description: clathrin assembly protein AP19 homolog
  misc_feature (1)..(92): NCBI GI NO: 18398407 NR Description: clathrin assembly protein AP19, small subunit
  misc_feature (1)..(92): NCBI GI NO: 2231698 NR Description: clathrin assembly protein AP19
  misc_feature (1)..(92): NCBI GI NO: 1762309 NR Description: AP-1 Golgi-related complex component
  misc_feature (1)..(92): NCBI GI NO: 34897116 NR Description: putative clathrin assembly protein [Oryza sativa]
  misc_feature (1)..(75): NCBI GI NO: 23508378 NR Description: clathrin assembly protein AP19, putative
  misc_feature (1)..(41): NCBI GI NO: 30690340 NR Description: clathrin assembly protein AP19 homolog
  misc_feature (1)..(88): NCBI GI NO: 23480730 NR Description: clathrin assembly protein AP19, small subunit
  misc_feature (1)..(79): NCBI GI NO: 21541960 NR Description: Adapter-related protein complex 1 sigma 1B subunit
  misc_feature (1)..(79): NCBI GI NO: 34880078 NR Description: similar to Adapter-related protein complex 1 sigma 1B subunit
MCIDQEDNELEVLEIIHHYVEILDRYFGSVCELDLIFNFHKAYYILDELLIAGELQESSKKTVARIISAQDQLVEVAKEEASSISNIIAQATNR

SEQ ID NO: 460 - DNA, 977 bp, Arabidopsis thaliana
  misc_feature (1)..(977): Ceres Seq. ID no. 12372086
accaacaatcacattcttctcccataagaaaaaaaaaataatcaaatcctcctcctctgcttcaccaccaaaaagcatattcttctctcgtcttctccggttaatcaaaatctctccgtgtgaatcgtttgtgaatggtggaaactaatccgatcggtggtaagtttacgctctccctttccatcaaaagggcgagcttttctcttcctctctcgacatcctctgttttcgctttcggatcttgcaaagaaggctggtactttcgctgccttggcctcgacccgtgaacgattcgcccctaaaattcacaacccggaaccctaatttcctaaaaagtggttctttttttattgattctgttacttgtgagatttgctctgttttttgttctctcgatttcgaagatgttgctctacaacaagcagaagaagaaccaaaacgctaaagggaataggattctcattagcgttacggttttgggtagtgccggtccgatccggtttgttgcttatgaggatgatcttgttgcctctgttatcgatactgctcttaaaggttacgctcgtgaaggtcgtcttcctcttcttggatctgatttcaatgattttcttctctattgtcctatggttggacctgaagctttaagcacatgggatgcaattggatctcttggagcgaggaactttatgctctgtaggaaaccagaggagaagaaggttgaggaaagtaatggaagatctgactctaccattaatggtgcaagaaaaggtggaagcttgaaggcttggatcaacaaatccttcaatctcaaagtctcaagccattaagattaattttcttctcttttttatgaaataataagaccaatctttgttttatcatcattatgttctttgtttttggttttgattccaaagtttgttattttcatctttcattcatgaataaaagtgtcaaattcttctggattttgcact

SEQ ID NO: 461 - protein, 140 aa, Arabidopsis thaliana
  peptide (1)..(140): Ceres Seq. ID no. 12372087
  misc_feature (1)..(126): NCBI GI NO: 16226338 NR Description: At1g70780/F5A18_4 [Arabidopsis thaliana]
  misc_feature (1)..(140): NCBI GI NO: 18409673 NR Description: expressed protein; protein id: At1g70780
  misc_feature (1)..(140): NCBI GI NO: 15220659 NR Description: unknown protein; protein id: At1g23150.1
  misc_feature (1)..(140): NCBI GI NO: 25372856 NR Description: T26J12.8 protein - Arabidopsis thaliana
  misc_feature (1)..(140): NCBI GI NO: 13359433 NR Description: putative senescence-associated protein
  misc_feature (9)..(114): NCBI GI NO: 15240321 NR Description: putative protein; protein id: At5g37730
  misc_feature (9)..(114): NCBI GI NO: 21553538 NR Description: unknown [Arabidopsis thaliana]
  misc_feature (9)..(103): NCBI GI NO: 9757983 NR Description: gb|AAC00605
  misc_feature (11)..(129): NCBI GI NO: 10279678 NR Description: hypothetical protein [Catharanthus roseus]
MLLYNKQKKNQNAKGNRILISVTVLGSAGPIRFVAYEDDLVASVIDTALKGYAREGRLPLLGSDFNDFLLYCPMVGPEALSTWDAIGSLGARNFMLCRKPEEKKVEESNGRSDSTINGARKGGSLKAWINKSFNLKVSSH

SEQ ID NO: 462 - DNA, 973 bp, Arabidopsis thaliana
  misc_feature (1)..(973): Ceres Seq. ID no. 12385644
aacaacgaacgccgagagctctcacttcacactttatccacttggagcttcgacaatggcgtctccttcgcttctgcagtcttccgcttcttcgtttcacggacgtttctcaccattagcggctccatcctccgcacgaatgctctctccgccgctcagaaacgtggtgaaagtctcggcgtctggaactgtactggtcgagaaatctgaagccgagaaaactcaacgcctcaaaaccgcttacctcgagaggattatccctgcgctcaaagaagagttcaagtacgttaatattcaccaggttccaaaggtacagaagattgtagtgaattgtggtattggagatgcggcgcagaacgacaagggtttggaggctgcgatgaaggatatcgcgcttatcacagggcagaaacctattaagacacgagctagagcttccattgctactttcaagatcagggaagatcaacctcttgggattgctgtcactctcagaggagatgtaatgtactccttcttggatcgtcttatcaacttagcccttccgagaactcgagatttccaaggtgtgagtcccagtagctttgatgggaacggaaactacagtattggtgtgaaagaccaaggtgtattccctgaaatcaggtttgatgccgttggaaaaacgagaggaatggatgtatgcatcagcacaacggctaaaagcgatcaagaaggacagaaactattggctctaatgggaatgcctttcagggaaggaggtggtggcagcacaggcgcgatagtgcggaagaagaaactaaagtctcatcactttgatgctaaaggaaaaggaaagagatgatgaacatagctgcctattgtatgtatcgtcttctgtaaccaaccatttcatgtttcagaaaaaccatctccttttgtaatgctttatgagtcaatttgaaaataatatcagggatcttgttgttatggt

SEQ ID NO: 463 - protein, 280 aa, Arabidopsis thaliana
  peptide (1)..(280): Ceres Seq. ID no. 12385645
  misc_feature (157)..(251): Pfam Name: Pfam Description:  ribosomal L5P family C-terminus
  misc_feature (19)..(280): NCBI GI NO: 15234136 NR Description: putative L5 ribosomal protein
  misc_feature (72)..(280): NCBI GI NO: 7582405 NR Description: plastid ribosomal protein PRPL5
  misc_feature (39)..(280): NCBI GI NO: 3777600 NR Description: 50S ribosomal protein L5 [Oryza sativa]
  misc_feature (74)..(251): NCBI GI NO: 3123273 NR Description: 50S RIBOSOMAL PROTEIN L5
  misc_feature (74)..(251): NCBI GI NO: 16329929 NR Description: 50S ribosomal protein L5
  misc_feature (75)..(252): NCBI GI NO: 11466362 NR Description: ribosomal protein L5 [Mesostigma viride]
  misc_feature (74)..(252): NCBI GI NO: 17231695 NR Description: 50S ribosomal protein L5 [Nostoc sp. PCC 7120]
  misc_feature (74)..(252): NCBI GI NO: 22297637 NR Description: 50S ribosomal protein L5
  misc_feature (74)..(252): NCBI GI NO: 23124116 NR Description: hypothetical protein [Nostoc punctiforme]
  misc_feature (77)..(251): NCBI GI NO: 23042780 NR Description: hypothetical protein
TTNAESSHFTLYPLGASTMASPSLLQSSASSFHGRFSPLAAPSSARMLSPPLRNVVKVSASGTVLVEKSEAEKTQRLKTAYLERIIPALKEEFKYVNIHQVPKVQKIVVNCGIGDAAQNDKGLEAAMKDIALITGQKPIKTRARASIATFKIREDQPLGIAVTLRGDVMYSFLDRLINLALPRTRDFQGVSPSSFDGNGNYSIGVKDQGVFPEIRFDAVGKTRGMDVCISTTAKSDQEGQKLLALMGMPFREGGGGSTGAIVRKKKLKSHHFDAKGKGKR

SEQ ID NO: 464 - protein, 262 aa, Arabidopsis thaliana
  peptide (1)..(262): Ceres Seq. ID no. 12385646
  misc_feature (139)..(233): Pfam Name: Pfam Description:  ribosomal L5P family C-terminus
  misc_feature (1)..(262): NCBI GI NO: 15234136 NR Description: putative L5 ribosomal protein
  misc_feature (54)..(262): NCBI GI NO: 7582405 NR Description: plastid ribosomal protein PRPL5
  misc_feature (21)..(262): NCBI GI NO: 3777600 NR Description: 50S ribosomal protein L5 [Oryza sativa]
  misc_feature (56)..(233): NCBI GI NO: 3123273 NR Description: 50S RIBOSOMAL PROTEIN L5
  misc_feature (56)..(233): NCBI GI NO: 16329929 NR Description: 50S ribosomal protein L5
  misc_feature (57)..(234): NCBI GI NO: 11466362 NR Description: ribosomal protein L5 [Mesostigma viride]
  misc_feature (56)..(234): NCBI GI NO: 17231695 NR Description: 50S ribosomal protein L5 [Nostoc sp. PCC 7120]
  misc_feature (56)..(234): NCBI GI NO: 22297637 NR Description: 50S ribosomal protein L5
  misc_feature (56)..(234): NCBI GI NO: 23124116 NR Description: hypothetical protein [Nostoc punctiforme]
  misc_feature (59)..(233): NCBI GI NO: 23042780 NR Description: hypothetical protein
MASPSLLQSSASSFHGRFSPLAAPSSARMLSPPLRNVVKVSASGTVLVEKSEAEKTQRLKTAYLERIIPALKEEFKYVNIHQVPKVQKIVVNCGIGDAAQNDKGLEAAMKDIALITGQKPIKTRARASIATFKIREDQPLGIAVTLRGDVMYSFLDRLINLALPRTRDFQGVSPSSFDGNGNYSIGVKDQGVFPEIRFDAVGKTRGMDVCISTTAKSDQEGQKLLALMGMPFREGGGGSTGAIVRKKKLKSHHFDAKGKGKR

SEQ ID NO: 465 - protein, 234 aa, Arabidopsis thaliana
  peptide (1)..(234): Ceres Seq. ID no. 12385647
  misc_feature (111)..(205): Pfam Name: Pfam Description:  ribosomal L5P family C-terminus
  misc_feature (1)..(234): NCBI GI NO: 15234136 NR Description: putative L5 ribosomal protein
  misc_feature (26)..(234): NCBI GI NO: 7582405 NR Description: plastid ribosomal protein PRPL5
  misc_feature (1)..(234): NCBI GI NO: 3777600 NR Description: 50S ribosomal protein L5 [Oryza sativa]
  misc_feature (28)..(205): NCBI GI NO: 3123273 NR Description: 50S RIBOSOMAL PROTEIN L5
  misc_feature (28)..(205): NCBI GI NO: 16329929 NR Description: 50S ribosomal protein L5
  misc_feature (29)..(206): NCBI GI NO: 11466362 NR Description: ribosomal protein L5 [Mesostigma viride]
  misc_feature (28)..(206): NCBI GI NO: 17231695 NR Description: 50S ribosomal protein L5 [Nostoc sp. PCC 7120]
  misc_feature (28)..(206): NCBI GI NO: 22297637 NR Description: 50S ribosomal protein L5
  misc_feature (28)..(206): NCBI GI NO: 23124116 NR Description: hypothetical protein [Nostoc punctiforme]
  misc_feature (31)..(205): NCBI GI NO: 23042780 NR Description: hypothetical protein
MLSPPLRNVVKVSASGTVLVEKSEAEKTQRLKTAYLERIIPALKEEFKYVNIHQVPKVQKIVVNCGIGDAAQNDKGLEAAMKDIALITGQKPIKTRARASIATFKIREDQPLGIAVTLRGDVMYSFLDRLINLALPRTRDFQGVSPSSFDGNGNYSIGVKDQGVFPEIRFDAVGKTRGMDVCISTTAKSDQEGQKLLALMGMPFREGGGGSTGAIVRKKKLKSHHFDAKGKGKR

SEQ ID NO: 466 - DNA, 1944 bp, Arabidopsis thaliana
  misc_feature (1)..(1944): Ceres Seq. ID no. 12336460
aatatcttcacgcagctgtctagggtttttcgcctctttctcaactctcttctcgaaaacctagcagtcgtctctttctcagttctccatgggaaagtctaaatccgccaccaaagttgcagagattaaggccactaagcctttgaagaaaggcaagagagagcctgaagatgatattgacaccaaagtgagtcttaagaagcagaagaaagacgtgattgctgctgtccagaaggaaaaagctgtgaagaaggttcctaagaaggttgagagctctgatgattcagattctgaatctgaggaagaggagaaggctaagaaagtcccagccaagaaggctgcttcaagcagtgatgagtcatctgatgactcttcttcagatgatgaacctgcacccaagaaggccgttgctgctactaacggaactgttgcaaagaagtctaaggatgactcatcatcatctgatgatgattcttcagacgaggaagttgctgtcaccaagaagcccgcagctgctgctaaaaatggctctgtaaaggccaagaaagagagttcgtctgaagatgattcatcttctgaagacgaacctgcgaagaaacctgctgctaagattgccaagccagctgctaaggattcttcatcctctgatgatgactcagatgaggattccgaggatgagaaacctgctaccaagaaggcagctcctgctgctgccaaggctgcaagcagctcagattcatcagatgaagattctgatgaggaaagtgaagatgagaaacctgcccagaaaaaggctgacactaaggcctctaaaaaatcgagtagtgatgagtcaagcgagtctgaggaagatgagagtgaagacgaggaggaaacccctaagaaaaagagctctgatgtagaaatggttgatgctgagaaatcaagtgctaaacagccaaagacaccatccactcctgctgctggaggatcaaagacactctttgctgccaatctctcttttaacattgaaagagcagatgttgagaatttcttcaaagaagctggtgaagttgttgatgttagattctctaccaacagagacgatggttctttcaggggatttggccatgttgagttcgcatcttctgaagaagcacagaaggcgcttgaattccatggtaggccattgctcggtcgtgagattcgtcttgatattgctcaggagagaggtgagagaggcgagagacccgcattcactccacaaagcggcaacttcagaagtggtggtgatggtggtgatgaaaagaaaattttcgttaagggatttgacgcttcactttctgaggatgatatcaagaacactttgagggaacatttcagttcatgtggagagatcaaaaatgtatctgttccaattgaccgtgacactggtaactccaaaggaattgcttaccttgagttttcagaaggcaaagagaaggcgttggaactaaatggaagtgatatgggaggaggattctatcttgtagtcgatgagcctagaccgagaggagatagcagtggtggtggtggatttggaaggggcaatggtcgtttcggtagtggtggtggcagaggaagagatggaggtcgtggtcgttttggtagtggtggtggcagaggaagagatggaggtcgtggtcgttttggtagtggtggtggcaggggaagtgatcgtggtcgtggaagacctagttttactccccaaggtaagaagactaccttcggtgacgagtagaagcgtctgtagaagaaaagtctcttcttatgttgttaacttatgatacttcgcatccttttattgtttcgtttcttttttgttctagttaagtttctgtcagaaccttaaatttttgtctgaatgttaagttaagctcaattttgagtgctttgggtgttcaatcattgttatcttcgtctatc

SEQ ID NO: 467 - protein, 556 aa, Arabidopsis thaliana
  peptide (1)..(556): Ceres Seq. ID no. 12336461
  misc_feature (402)..(475): Pfam Name: a.k.a. RRM, RBD, or RNP domain Pfam Description: RNA recognition motif.
  misc_feature (1)..(556): NCBI GI NO: 15222009 NR Description: nucleolin, putative; protein id: At1g48920.1
  misc_feature (4)..(556): NCBI GI NO: 9294322 NR Description: contains similarity to nucleolin
  misc_feature (4)..(556): NCBI GI NO: 15229678 NR Description: nucleolin, putative; protein id: At3g18610.1
  misc_feature (1)..(556): NCBI GI NO: 21700195 NR Description: tobacco nucleolin [Nicotiana tabacum]
  misc_feature (3)..(556): NCBI GI NO: 40253662 NR Description: putative nucleolin
  misc_feature (1)..(556): NCBI GI NO: 7440062 NR Description: nucleolin homolog - garden pea
  misc_feature (389)..(548): NCBI GI NO: 7770338 NR Description: F27J15.29 [Arabidopsis thaliana]
  misc_feature (1)..(556): NCBI GI NO: 38344339 NR Description: OSJNBa0058K23.21
  misc_feature (5)..(556): NCBI GI NO: 7440063 NR Description: nucleolin homolog nuM1 - alfalfa
  misc_feature (14)..(553): NCBI GI NO: 40741753 NR Description: hypothetical protein AN4865.2
MGKSKSATKVAEIKATKPLKKGKREPEDDIDTKVSLKKQKKDVIAAVQKEKAVKKVPKKVESSDDSDSESEEEEKAKKVPAKKAASSSDESSDDSSSDDEPAPKKAVAATNGTVAKKSKDDSSSSDDDSSDEEVAVTKKPAAAAKNGSVKAKKESSSEDDSSSEDEPAKKPAAKIAKPAAKDSSSSDDDSDEDSEDEKPATKKAAPAAAKAASSSDSSDEDSDEESEDEKPAQKKADTKASKKSSSDESSESEEDESEDEEETPKKKSSDVEMVDAEKSSAKQPKTPSTPAAGGSKTLFAANLSFNIERADVENFFKEAGEVVDVRFSTNRDDGSFRGFGHVEFASSEEAQKALEFHGRPLLGREIRLDIAQERGERGERPAFTPQSGNFRSGGDGGDEKKIFVKGFDASLSEDDIKNTLREHFSSCGEIKNVSVPIDRDTGNSKGIAYLEFSEGKEKALELNGSDMGGGFYLVVDEPRPRGDSSGGGGFGRGNGRFGSGGGRGRDGGRGRFGSGGGRGRDGGRGRFGSGGGRGSDRGRGRPSFTPQGKKTTFGDE

SEQ ID NO: 468 - protein, 284 aa, Arabidopsis thaliana
  peptide (1)..(284): Ceres Seq. ID no. 12336462
  misc_feature (130)..(203): Pfam Name: a.k.a. RRM, RBD, or RNP domain Pfam Description: RNA recognition motif.
  misc_feature (1)..(284): NCBI GI NO: 15222009 NR Description: nucleolin, putative; protein id: At1g48920.1
  misc_feature (1)..(284): NCBI GI NO: 9294322 NR Description: contains similarity to nucleolin
  misc_feature (1)..(284): NCBI GI NO: 15229678 NR Description: nucleolin, putative; protein id: At3g18610.1
  misc_feature (1)..(284): NCBI GI NO: 21700195 NR Description: tobacco nucleolin [Nicotiana tabacum]
  misc_feature (1)..(284): NCBI GI NO: 40253662 NR Description: putative nucleolin
  misc_feature (1)..(284): NCBI GI NO: 7440062 NR Description: nucleolin homolog - garden pea
  misc_feature (117)..(276): NCBI GI NO: 7770338 NR Description: F27J15.29 [Arabidopsis thaliana]
  misc_feature (1)..(284): NCBI GI NO: 38344339 NR Description: OSJNBa0058K23.21
  misc_feature (1)..(284): NCBI GI NO: 7440063 NR Description: nucleolin homolog nuM1 - alfalfa
  misc_feature (1)..(281): NCBI GI NO: 40741753 NR Description: hypothetical protein AN4865.2
MVDAEKSSAKQPKTPSTPAAGGSKTLFAANLSFNIERADVENFFKEAGEVVDVRFSTNRDDGSFRGFGHVEFASSEEAQKALEFHGRPLLGREIRLDIAQERGERGERPAFTPQSGNFRSGGDGGDEKKIFVKGFDASLSEDDIKNTLREHFSSCGEIKNVSVPIDRDTGNSKGIAYLEFSEGKEKALELNGSDMGGGFYLVVDEPRPRGDSSGGGGFGRGNGRFGSGGGRGRDGGRGRFGSGGGRGRDGGRGRFGSGGGRGSDRGRGRPSFTPQGKKTTFGDE

SEQ ID NO: 469 - DNA, 2127 bp, Arabidopsis thaliana
  misc_feature (1)..(2127): Ceres Seq. ID no. 13576329
attattaagacctttaaaaaaaaatgatgggaagcatattattgttactattattcttttctctggtccaatcacgttcagacacgtcatattcaaaaattcaacttcccggcgattctctgaccctctccgttaccgatttcggtgctaccggcgatggtatcaactacgatacttctgcgattcagtcaaccattgacgcctgcaatcgtcactacacatctttttcttccatctgccgcgtcgttttcccttccggcaactatttgaccgctaagctccatctccgatctggcgtcattctcgatgtgacggagaacgccgtgcttctcggtggaccgagaatcgaggattattatccggcggagacttcgtcggattggtacgtggtggtggcgaataacgctacggatgttggaatcactggcggaggagcgattgatggccaaggatcgaagttcgtggtcagattcgacgagaagaagaacgtgatggtgagctggaaccaaaccggagcttgcttgggtgatgagtgtagacccaggcttgttggattcgttgattctataaacgttgagatctggaacatcacactacgagagcctgcgtattggtgtttgcacattgtgagatgtgagaacacatcagtccatgatgtatcgatccttggggacttcaatactccaaataacgatggaatcgacattgaagattccaacaacactgttataactcggtgtcatatcgatactggagatgatgcaatctgtcccaagacttacactggtccactttacaacttaaccgctacagactgttggatccggaccaaatcctcagccattaaactcggtagtgcgagctggtttgatttcaaaggtcttgtctttgataacatcactatttttgaatctcacagaggacttggcatgcaaatacgcgatggaggaaatgtgagtgacgttacattttcaaacataaacattagtacaagatactacgatccttcttggtggggaagagcagaaccaatctatataacaacttgccctcgtgactcatctgcaaaggaaggctcaatctcgaatctcctattcgtaaacataacaatcgattccgaaaacggagtctttttatcaggttcaccaaacggactactctcagatataaagttcaagaacatgaaccttactttcagaagatggagtaattacagtgcagggcttgtggactatagacctggatgtcaaggtctagtgaaccatagagccacgtctggaatcattatggagcatgtgaacgggtttcgcgttgagaatgttgacctgaaatggtcagatgatgatgatgtgaatgctgcttggaatgttcctctcgaatttagaccttccactgtgaataatgtctcgtttgttggtttcacttctggtctttacacgaaattgtttgagtctgattacgttatgagtttatttacgtctaatcatcaatatatcactgagagtgaaatcggaatcacaaaaatggcgtcgacgaagccattgattgtcgcagcgaagacgctccgaaaccggatccacttccgatctggatccacatctactggtccaagccggtgggcgacaccgggtcacgaagaacgacccaaaggatatttcatgaaccggactccgccgcctccaggacagtcgcgcaagtgggaagattgggagcttccatgttacatcacaagcttcctcacgattgtaatcctcggagtgggtctcaatgccaaacctgatctttcaatcgagacctgggctcaccagaaagctcttgagcgcctcgagatggagaagcttgcatctgccggagattcatctggttaatcccaaaacttgggagatatgattcaatggttgatctggtatgtatgtgttttgtttgtttttccggggatttgaggagattttcccatttatgatgatgatcacgaatactagtgacctagggtttcgttttgttcctcctctcctcttcgttagtgtcgataaatatgttcatgaaataagcgatctttaactcttgacgatggttttatgtaactcaccttaatttttgatcatgtttcaaagctctcttgcctcc

SEQ ID NO: 470 - protein, 614 aa, Arabidopsis thaliana
  peptide (1)..(614): Ceres Seq. ID no. 13576330
  misc_feature (69)..(417): Pfam Name: Pfam Description:  Glycosyl hydrolases family 28
  misc_feature (1)..(481): NCBI GI NO: 18410809 NR Description: polygalacturonase, putative [Arabidopsis thaliana]
  misc_feature (1)..(309): NCBI GI NO: 17473561 NR Description: putative protein [Arabidopsis thaliana]
  misc_feature (2)..(193): NCBI GI NO: 24417492 NR Description: unknown [Arabidopsis thaliana]
  misc_feature (501)..(614): NCBI GI NO: 18410807 NR Description: expressed protein [Arabidopsis thaliana]
  misc_feature (501)..(613): NCBI GI NO: 15227917 NR Description: expressed protein [Arabidopsis thaliana]
  misc_feature (39)..(406): NCBI GI NO: 15890426 NR Description: AGR_L_619p [Agrobacterium tumefaciens]
  misc_feature (39)..(406): NCBI GI NO: 17938249 NR Description: polygalacturonase
  misc_feature (501)..(604): NCBI GI NO: 9858777 NR Description: BAC19.9 [Lycopersicon esculentum]
  misc_feature (45)..(389): NCBI GI NO: 36958630 NR Description: possible polygalacturonase [Rhizobium sp. NGR234]
  misc_feature (35)..(319): NCBI GI NO: 15238207 NR Description: polygalacturonase, putative [Arabidopsis thaliana]
MMGSILLLLLFFSLVQSRSDTSYSKIQLPGDSLTLSVTDFGATGDGINYDTSAIQSTIDACNRHYTSFSSICRVVFPSGNYLTAKLHLRSGVILDVTENAVLLGGPRIEDYYPAETSSDWYVVVANNATDVGITGGGAIDGQGSKFVVRFDEKKNVMVSWNQTGACLGDECRPRLVGFVDSINVEIWNITLREPAYWCLHIVRCENTSVHDVSILGDFNTPNNDGIDIEDSNNTVITRCHIDTGDDAICPKTYTGPLYNLTATDCWIRTKSSAIKLGSASWFDFKGLVFDNITIFESHRGLGMQIRDGGNVSDVTFSNINISTRYYDPSWWGRAEPIYITTCPRDSSAKEGSISNLLFVNITIDSENGVFLSGSPNGLLSDIKFKNMNLTFRRWSNYSAGLVDYRPGCQGLVNHRATSGIIMEHVNGFRVENVDLKWSDDDDVNAAWNVPLEFRPSTVNNVSFVGFTSGLYTKLFESDYVMSLFTSNHQYITESEIGITKMASTKPLIVAAKTLRNRIHFRSGSTSTGPSRWATPGHEERPKGYFMNRTPPPPGQSRKWEDWELPCYITSFLTIVILGVGLNAKPDLSIETWAHQKALERLEMEKLASAGDSSG

SEQ ID NO: 471 - protein, 613 aa, Arabidopsis thaliana
  peptide (1)..(613): Ceres Seq. ID no. 13576331
  misc_feature (68)..(416): Pfam Name: Pfam Description:  Glycosyl hydrolases family 28
  misc_feature (1)..(480): NCBI GI NO: 18410809 NR Description: polygalacturonase, putative [Arabidopsis thaliana]
  misc_feature (1)..(308): NCBI GI NO: 17473561 NR Description: putative protein [Arabidopsis thaliana]
  misc_feature (1)..(192): NCBI GI NO: 24417492 NR Description: unknown [Arabidopsis thaliana]
  misc_feature (500)..(613): NCBI GI NO: 18410807 NR Description: expressed protein [Arabidopsis thaliana]
  misc_feature (500)..(612): NCBI GI NO: 15227917 NR Description: expressed protein [Arabidopsis thaliana]
  misc_feature (38)..(405): NCBI GI NO: 15890426 NR Description: AGR_L_619p [Agrobacterium tumefaciens]
  misc_feature (38)..(405): NCBI GI NO: 17938249 NR Description: polygalacturonase
  misc_feature (500)..(603): NCBI GI NO: 9858777 NR Description: BAC19.9 [Lycopersicon esculentum]
  misc_feature (44)..(388): NCBI GI NO: 36958630 NR Description: possible polygalacturonase [Rhizobium sp. NGR234]
  misc_feature (34)..(318): NCBI GI NO: 15238207 NR Description: polygalacturonase, putative [Arabidopsis thaliana]
MGSILLLLLFFSLVQSRSDTSYSKIQLPGDSLTLSVTDFGATGDGINYDTSAIQSTIDACNRHYTSFSSICRVVFPSGNYLTAKLHLRSGVILDVTENAVLLGGPRIEDYYPAETSSDWYVVVANNATDVGITGGGAIDGQGSKFVVRFDEKKNVMVSWNQTGACLGDECRPRLVGFVDSINVEIWNITLREPAYWCLHIVRCENTSVHDVSILGDFNTPNNDGIDIEDSNNTVITRCHIDTGDDAICPKTYTGPLYNLTATDCWIRTKSSAIKLGSASWFDFKGLVFDNITIFESHRGLGMQIRDGGNVSDVTFSNINISTRYYDPSWWGRAEPIYITTCPRDSSAKEGSISNLLFVNITIDSENGVFLSGSPNGLLSDIKFKNMNLTFRRWSNYSAGLVDYRPGCQGLVNHRATSGIIMEHVNGFRVENVDLKWSDDDDVNAAWNVPLEFRPSTVNNVSFVGFTSGLYTKLFESDYVMSLFTSNHQYITESEIGITKMASTKPLIVAAKTLRNRIHFRSGSTSTGPSRWATPGHEERPKGYFMNRTPPPPGQSRKWEDWELPCYITSFLTIVILGVGLNAKPDLSIETWAHQKALERLEMEKLASAGDSSG

SEQ ID NO: 472 - protein, 458 aa, Arabidopsis thaliana
  peptide (1)..(458): Ceres Seq. ID no. 13576332
  misc_feature (1)..(261): Pfam Name: Pfam Description:  Glycosyl hydrolases family 28
  misc_feature (1)..(325): NCBI GI NO: 18410809 NR Description: polygalacturonase, putative [Arabidopsis thaliana]
  misc_feature (1)..(153): NCBI GI NO: 17473561 NR Description: putative protein [Arabidopsis thaliana]
  misc_feature (1)..(37): NCBI GI NO: 24417492 NR Description: unknown [Arabidopsis thaliana]
  misc_feature (345)..(458): NCBI GI NO: 18410807 NR Description: expressed protein [Arabidopsis thaliana]
  misc_feature (345)..(457): NCBI GI NO: 15227917 NR Description: expressed protein [Arabidopsis thaliana]
  misc_feature (1)..(250): NCBI GI NO: 15890426 NR Description: AGR_L_619p [Agrobacterium tumefaciens]
  misc_feature (1)..(250): NCBI GI NO: 17938249 NR Description: polygalacturonase
  misc_feature (345)..(448): NCBI GI NO: 9858777 NR Description: BAC19.9 [Lycopersicon esculentum]
  misc_feature (1)..(233): NCBI GI NO: 36958630 NR Description: possible polygalacturonase [Rhizobium sp. NGR234]
  misc_feature (1)..(163): NCBI GI NO: 15238207 NR Description: polygalacturonase, putative [Arabidopsis thaliana]
MVSWNQTGACLGDECRPRLVGFVDSINVEIWNITLREPAYWCLHIVRCENTSVHDVSILGDFNTPNNDGIDIEDSNNTVITRCHIDTGDDAICPKTYTGPLYNLTATDCWIRTKSSAIKLGSASWFDFKGLVFDNITIFESHRGLGMQIRDGGNVSDVTFSNINISTRYYDPSWWGRAEPIYITTCPRDSSAKEGSISNLLFVNITIDSENGVFLSGSPNGLLSDIKFKNMNLTFRRWSNYSAGLVDYRPGCQGLVNHRATSGIIMEHVNGFRVENVDLKWSDDDDVNAAWNVPLEFRPSTVNNVSFVGFTSGLYTKLFESDYVMSLFTSNHQYITESEIGITKMASTKPLIVAAKTLRNRIHFRSGSTSTGPSRWATPGHEERPKGYFMNRTPPPPGQSRKWEDWELPCYITSFLTIVILGVGLNAKPDLSIETWAHQKALERLEMEKLASAGDSSG

SEQ ID NO: 473 - DNA, 1752 bp, Arabidopsis thaliana
  misc_feature (1)..(1752): Ceres Seq. ID no. 12322647
caacacatataatttgaccaaagtcactcgcatctcacggtgagatgagttcttcgtagctccaatggtggtggcttcacaatgtcgacttcttcttctttccctcgaaccatcgtctcctacactgtgacaacttcgctcttcatcgttatcttcctatgcagcgtcttcttcttgactagacgcactctcgaaccttctctctctccttaccacaccgccgacatccctctctccgccgtcgatctaccacctcctacgcctctcctccctcaaatcgaacctcacgatggtgacgtcaccgtggaaacgaatcaaaaggaggtagaagattcgcgccgcggaggcgatgacgtcgcggtagagactgagctgaaactgaaagatgtggaagattcgcacacggagaaaaccgaggaggaggaagaaggtagaggagaatcgcccggtgaagtttccgtagaatctgtggaacatgcggtgattgagaagatgagaggctgtgatttgtacaggggatcgtgggttaaggacgatgatgagtatccattgtatcagcctggatcgtgtccttatgtggacgatgcttttgattgccagaggaatgggaggcgtgattctgactatcttaattggagatggaagcctgacggttgtgatcttccacggtttaatgctacagacttcttggtgaagctacgaggtaaaagtttgatgttggttggagattcaatgaatcgtaaccagtttgaatcaatgctttgcgttctacgagaaggtttatcggataagagtagaatgtatgaggttcatggccataatataacaaaagggagaggctactttgtattcaagtttgaagattataattgcacagtagagtttgtgaggtctcattttcttgtgagggaaggagttagagcaaatgctcaaggaaatactaatccgaccctttccattgatcgcattgacaagtcacatgctaaatggaagcgagctgacattcttgtctttaacactggacattggtgggttcatggaaagaccgccagagggaaaaactactacaaagaaggtgactacatctacccgaaatttgatgctactgaagcatacagaaggtcgttgaagacttgggcaaaatggatcgatcagaatgtaaatcccaaaaagcagcttgtattttatcgcggatactcctctgcccattttcggggaggtgagtgggactcgggagggtcatgcaacggggaggtagaacctgtgaagaagggttcaatcatcgattcctatcctttgaaaatgaagatagtccaggaagccataaaggagatgcaagttcctgtgattcttctaaacgtgacaaagctgactaatttccgcaaagacggacatccatcaatctacggtaagaccaacacggatggtaagaaagtgtcgacaaggcgacaggattgcagccactggtgcctgccgggagttcccgatgtttggaaccatcttatctacgcatctttgctccttcaaccacattcttaaagttgagctcatacatcaacaaaattagatagaaagagaagagcagaaacaaatgaccagtccagtcttcactgttgtagtagtgatgtcaaattttgtgtaatttattgcccttggagctgataagtagttttttgttactttcatgtagaggtgtgaacaaacggaatcaggatgaaattttcagggttttttaatggcatacaatttttc

SEQ ID NO: 474 - protein, 485 aa, Arabidopsis thaliana
  peptide (1)..(485): Ceres Seq. ID no. 12322648
  misc_feature (317)..(479): Pfam Name: Pfam Description:  Arabidopsis proteins of unknown function
  misc_feature (1)..(485): NCBI GI NO: 21592371 NR Description: unknown [Arabidopsis thaliana]
  misc_feature (1)..(485): NCBI GI NO: 15242021 NR Description: putative protein; protein id: At5g20590
  misc_feature (117)..(480): NCBI GI NO: 22330347 NR Description: hypothetical protein; protein id: At1g60790
  misc_feature (1)..(480): NCBI GI NO: 15228743 NR Description: putative protein; protein id: At3g62390
  misc_feature (134)..(482): NCBI GI NO: 15229945 NR Description: hypothetical protein; protein id: At3g12060.1
  misc_feature (94)..(482): NCBI GI NO: 9759298 NR Description: emb|CAB82953
  misc_feature (121)..(481): NCBI GI NO: 15239856 NR Description: putative protein; protein id: At5g49340.1
  misc_feature (167)..(482): NCBI GI NO: 21618305 NR Description: unknown [Arabidopsis thaliana]
  misc_feature (136)..(482): NCBI GI NO: 6862912 NR Description: unknown protein [Arabidopsis thaliana]
  misc_feature (136)..(480): NCBI GI NO: 15239660 NR Description: putative protein; protein id: At5g19160.1
MSTSSSFPRTIVSYTVTTSLFIVIFLCSVFFLTRRTLEPSLSPYHTADIPLSAVDLPPPTPLLPQIEPHDGDVTVETNQKEVEDSRRGGDDVAVETELKLKDVEDSHTEKTEEEEEGRGESPGEVSVESVEHAVIEKMRGCDLYRGSWVKDDDEYPLYQPGSCPYVDDAFDCQRNGRRDSDYLNWRWKPDGCDLPRFNATDFLVKLRGKSLMLVGDSMNRNQFESMLCVLREGLSDKSRMYEVHGHNITKGRGYFVFKFEDYNCTVEFVRSHFLVREGVRANAQGNTNPTLSIDRIDKSHAKWKRADILVFNTGHWWVHGKTARGKNYYKEGDYIYPKFDATEAYRRSLKTWAKWIDQNVNPKKQLVFYRGYSSAHFRGGEWDSGGSCNGEVEPVKKGSIIDSYPLKMKIVQEAIKEMQVPVILLNVTKLTNFRKDGHPSIYGKTNTDGKKVSTRRQDCSHWCLPGVPDVWNHLIYASLLLQPHS

SEQ ID NO: 475 - protein, 348 aa, Arabidopsis thaliana
  peptide (1)..(348): Ceres Seq. ID no. 12322649
  misc_feature (180)..(342): Pfam Name: Pfam Description:  Arabidopsis proteins of unknown function
  misc_feature (1)..(348): NCBI GI NO: 21592371 NR Description: unknown [Arabidopsis thaliana]
  misc_feature (1)..(348): NCBI GI NO: 15242021 NR Description: putative protein; protein id: At5g20590
  misc_feature (1)..(343): NCBI GI NO: 22330347 NR Description: hypothetical protein; protein id: At1g60790
  misc_feature (1)..(343): NCBI GI NO: 15228743 NR Description: putative protein; protein id: At3g62390
  misc_feature (1)..(345): NCBI GI NO: 15229945 NR Description: hypothetical protein; protein id: At3g12060.1
  misc_feature (1)..(345): NCBI GI NO: 9759298 NR Description: emb|CAB82953
  misc_feature (1)..(344): NCBI GI NO: 15239856 NR Description: putative protein; protein id: At5g49340.1
  misc_feature (30)..(345): NCBI GI NO: 21618305 NR Description: unknown [Arabidopsis thaliana]
  misc_feature (1)..(345): NCBI GI NO: 6862912 NR Description: unknown protein [Arabidopsis thaliana]
  misc_feature (1)..(343): NCBI GI NO: 15239660 NR Description: putative protein; protein id: At5g19160.1
MRGCDLYRGSWVKDDDEYPLYQPGSCPYVDDAFDCQRNGRRDSDYLNWRWKPDGCDLPRFNATDFLVKLRGKSLMLVGDSMNRNQFESMLCVLREGLSDKSRMYEVHGHNITKGRGYFVFKFEDYNCTVEFVRSHFLVREGVRANAQGNTNPTLSIDRIDKSHAKWKRADILVFNTGHWWVHGKTARGKNYYKEGDYIYPKFDATEAYRRSLKTWAKWIDQNVNPKKQLVFYRGYSSAHFRGGEWDSGGSCNGEVEPVKKGSIIDSYPLKMKIVQEAIKEMQVPVILLNVTKLTNFRKDGHPSIYGKTNTDGKKVSTRRQDCSHWCLPGVPDVWNHLIYASLLLQPHS

SEQ ID NO: 476 - protein, 274 aa, Arabidopsis thaliana
  peptide (1)..(274): Ceres Seq. ID no. 12322650
  misc_feature (106)..(268): Pfam Name: Pfam Description:  Arabidopsis proteins of unknown function
  misc_feature (1)..(274): NCBI GI NO: 21592371 NR Description: unknown [Arabidopsis thaliana]
  misc_feature (1)..(274): NCBI GI NO: 15242021 NR Description: putative protein; protein id: At5g20590
  misc_feature (1)..(269): NCBI GI NO: 22330347 NR Description: hypothetical protein; protein id: At1g60790
  misc_feature (1)..(269): NCBI GI NO: 15228743 NR Description: putative protein; protein id: At3g62390
  misc_feature (1)..(271): NCBI GI NO: 15229945 NR Description: hypothetical protein; protein id: At3g12060.1
  misc_feature (1)..(271): NCBI GI NO: 9759298 NR Description: emb|CAB82953
  misc_feature (1)..(270): NCBI GI NO: 15239856 NR Description: putative protein; protein id: At5g49340.1
  misc_feature (1)..(271): NCBI GI NO: 21618305 NR Description: unknown [Arabidopsis thaliana]
  misc_feature (1)..(271): NCBI GI NO: 6862912 NR Description: unknown protein [Arabidopsis thaliana]
  misc_feature (1)..(269): NCBI GI NO: 15239660 NR Description: putative protein; protein id: At5g19160.1
MLVGDSMNRNQFESMLCVLREGLSDKSRMYEVHGHNITKGRGYFVFKFEDYNCTVEFVRSHFLVREGVRANAQGNTNPTLSIDRIDKSHAKWKRADILVFNTGHWWVHGKTARGKNYYKEGDYIYPKFDATEAYRRSLKTWAKWIDQNVNPKKQLVFYRGYSSAHFRGGEWDSGGSCNGEVEPVKKGSIIDSYPLKMKIVQEAIKEMQVPVILLNVTKLTNFRKDGHPSIYGKTNTDGKKVSTRRQDCSHWCLPGVPDVWNHLIYASLLLQPHS

SEQ ID NO: 477 - DNA, 1446 bp, Arabidopsis thaliana
  misc_feature (1)..(1446): Ceres Seq. ID no. 12324353
actttttttctttctttctgagtgaaaaacactttagtctcccactctttatattttgtagcttcacagcaaaaattctctttaacttatcagacagataagatcatatagcaaatatgttgcaagatagagtttcttgttctttgtctagttcgaaaatatctcgatgtgttttgtttctctcactcttttgtttcttcctcttgacgatgcatgcttcagcaaaccgcttacagcgagttccaaatccagggccttccccggcaccagagcctaagccatgtccgagtccagggccaaaccccgcaccagcgacaactaagaggacacataacactacgtttccggcgatcttcgcctttggggattcgatcttagacacaggaaataacgattatattttgaccttgatcaaagctaattttcttccatatggcatgaattttccagataaagttcccaccggcagattttgcaacggcaaaatcccttcggactttatcgcggattatataggagtaaaaccagttgtaccggcatatttgagaccgggactgacccaggaagatttgctcactggtgtatcctttgcttcgggtggttctggctatgatcctttgacaccaatcgtagtaagtgcgataccgatgtcaaaacaattgacatactttcaagaatacatagagaaagtgaaaggctttgtgggaaaagagaaagccgagcacataatatccaaaggcctagccattgtggtagcgggcagcgacgatctggccaatacctactatggtgaacacttagaggaattcttgtatgacatagatacatatacctcttttatggctagctctgctgcaagttttgctatgcaactatatgaatcaggagcaaaaaaaataggatttattggtgtttctccgatcgggtgtataccgatacagagaaccacaagaggaggacttaaaagaaaatgtgctgatgaactcaactttgcagctcagctttttaattccagactctccacaagtttgaacgaattggctaaaaccatgaaaaataccacattggtgtatattgacatctactcttctttcaatgatatgattcaaaaccccaaaaaatatggatttgatgagattgatagaggatgttgcgggacggggctactcgaattaggtccgctttgcaacaaatatacatcactgctttgcaagaatgtgtcttcttttatgttttgggactcttaccatccaacggaaagagcttataaaatcttaagccaaaagtttgtagagaatgacatgggccctttctatgacaattcaatgtaaaatttaagatgacacatttgagatgaaatttggctaaataaaagctgtatctcatttggattagtgtcttcaaaaacatgtttattgtattatacatataaattgacatggagcg

SEQ ID NO: 478 - protein, 404 aa, Arabidopsis thaliana
  peptide (1)..(404): Ceres Seq. ID no. 12324354
  misc_feature (79)..(260): Pfam Name: Pfam Description:  GDSL-like Lipase/Acylhydrolase
  misc_feature (1)..(404): NCBI GI NO: 21592372 NR Description: anter-specific proline-rich protein APG precursor
  misc_feature (1)..(402): NCBI GI NO: 18394825 NR Description: anter-specific proline-rich protein APG precursor
  misc_feature (36)..(260): NCBI GI NO: 25513734 NR Description: T20H2.10 protein - Arabidopsis thaliana
  misc_feature (276)..(402): NCBI GI NO: 25513734 NR Description: T20H2.10 protein - Arabidopsis thaliana
  misc_feature (42)..(393): NCBI GI NO: 99694 NR Description: proline-rich protein APG - Arabidopsis thaliana
  misc_feature (42)..(393): NCBI GI NO: 21431729 NR Description: Anter-specific proline-rich protein APG precursor
  misc_feature (43)..(65): NCBI GI NO: 99694 NR Description: proline-rich protein APG - Arabidopsis thaliana
  misc_feature (43)..(65): NCBI GI NO: 21431729 NR Description: Anter-specific proline-rich protein APG precursor
  misc_feature (43)..(65): NCBI GI NO: 99694 NR Description: proline-rich protein APG - Arabidopsis thaliana
  misc_feature (43)..(65): NCBI GI NO: 21431729 NR Description: Anter-specific proline-rich protein APG precursor
MLQDRVSCSLSSSKISRCVLFLSLFCFFLLTMHASANRLQRVPNPGPSPAPEPKPCPSPGPNPAPATTKRTHNTTFPAIFAFGDSILDTGNNDYILTLIKANFLPYGMNFPDKVPTGRFCNGKIPSDFIADYIGVKPVVPAYLRPGLTQEDLLTGVSFASGGSGYDPLTPIVVSAIPMSKQLTYFQEYIEKVKGFVGKEKAEHIISKGLAIVVAGSDDLANTYYGEHLEEFLYDIDTYTSFMASSAASFAMQLYESGAKKIGFIGVSPIGCIPIQRTTRGGLKRKCADELNFAAQLFNSRLSTSLNELAKTMKNTTLVYIDIYSSFNDMIQNPKKYGFDEIDRGCCGTGLLELGPLCNKYTSLLCKNVSSFMFWDSYHPTERAYKILSQKFVENDMGPFYDNSM

SEQ ID NO: 479 - protein, 373 aa, Arabidopsis thaliana
  peptide (1)..(373): Ceres Seq. ID no. 12324355
  misc_feature (48)..(229): Pfam Name: Pfam Description:  GDSL-like Lipase/Acylhydrolase
  misc_feature (1)..(373): NCBI GI NO: 21592372 NR Description: anter-specific proline-rich protein APG precursor
  misc_feature (1)..(371): NCBI GI NO: 18394825 NR Description: anter-specific proline-rich protein APG precursor
  misc_feature (5)..(229): NCBI GI NO: 25513734 NR Description: T20H2.10 protein - Arabidopsis thaliana
  misc_feature (245)..(371): NCBI GI NO: 25513734 NR Description: T20H2.10 protein - Arabidopsis thaliana
  misc_feature (11)..(362): NCBI GI NO: 99694 NR Description: proline-rich protein APG - Arabidopsis thaliana
  misc_feature (11)..(362): NCBI GI NO: 21431729 NR Description: Anter-specific proline-rich protein APG precursor
  misc_feature (12)..(34): NCBI GI NO: 99694 NR Description: proline-rich protein APG - Arabidopsis thaliana
  misc_feature (12)..(34): NCBI GI NO: 21431729 NR Description: Anter-specific proline-rich protein APG precursor
  misc_feature (12)..(34): NCBI GI NO: 99694 NR Description: proline-rich protein APG - Arabidopsis thaliana
  misc_feature (12)..(34): NCBI GI NO: 21431729 NR Description: Anter-specific proline-rich protein APG precursor
MHASANRLQRVPNPGPSPAPEPKPCPSPGPNPAPATTKRTHNTTFPAIFAFGDSILDTGNNDYILTLIKANFLPYGMNFPDKVPTGRFCNGKIPSDFIADYIGVKPVVPAYLRPGLTQEDLLTGVSFASGGSGYDPLTPIVVSAIPMSKQLTYFQEYIEKVKGFVGKEKAEHIISKGLAIVVAGSDDLANTYYGEHLEEFLYDIDTYTSFMASSAASFAMQLYESGAKKIGFIGVSPIGCIPIQRTTRGGLKRKCADELNFAAQLFNSRLSTSLNELAKTMKNTTLVYIDIYSSFNDMIQNPKKYGFDEIDRGCCGTGLLELGPLCNKYTSLLCKNVSSFMFWDSYHPTERAYKILSQKFVENDMGPFYDNSM

SEQ ID NO: 480 - protein, 297 aa, Arabidopsis thaliana
  peptide (1)..(297): Ceres Seq. ID no. 12324356
  misc_feature (1)..(153): Pfam Name: Pfam Description:  GDSL-like Lipase/Acylhydrolase
  misc_feature (1)..(297): NCBI GI NO: 21592372 NR Description: anter-specific proline-rich protein APG precursor
  misc_feature (1)..(295): NCBI GI NO: 18394825 NR Description: anter-specific proline-rich protein APG precursor
  misc_feature (1)..(153): NCBI GI NO: 25513734 NR Description: T20H2.10 protein - Arabidopsis thaliana
  misc_feature (169)..(295): NCBI GI NO: 25513734 NR Description: T20H2.10 protein - Arabidopsis thaliana
  misc_feature (1)..(286): NCBI GI NO: 99694 NR Description: proline-rich protein APG - Arabidopsis thaliana
  misc_feature (1)..(286): NCBI GI NO: 21431729 NR Description: Anter-specific proline-rich protein APG precursor
  misc_feature (1)..(286): NCBI GI NO: 18266041 NR Description: anther-specific proline-rich protein
  misc_feature (1)..(268): NCBI GI NO: 15223790 NR Description: anter-specific proline-rich protein APG precursor
  misc_feature (1)..(268): NCBI GI NO: 25511649 NR Description: T20H2.9 protein - Arabidopsis thaliana
  misc_feature (1)..(286): NCBI GI NO: 728868 NR Description: ANTER-SPECIFIC PROLINE-RICH PROTEIN APG
MNFPDKVPTGRFCNGKIPSDFIADYIGVKPVVPAYLRPGLTQEDLLTGVSFASGGSGYDPLTPIVVSAIPMSKQLTYFQEYIEKVKGFVGKEKAEHIISKGLAIVVAGSDDLANTYYGEHLEEFLYDIDTYTSFMASSAASFAMQLYESGAKKIGFIGVSPIGCIPIQRTTRGGLKRKCADELNFAAQLFNSRLSTSLNELAKTMKNTTLVYIDIYSSFNDMIQNPKKYGFDEIDRGCCGTGLLELGPLCNKYTSLLCKNVSSFMFWDSYHPTERAYKILSQKFVENDMGPFYDNSM

SEQ ID NO: 481 - DNA, 1191 bp, Arabidopsis thaliana
  misc_feature (1)..(1191): Ceres Seq. ID no. 13487174
aacatgcctcctcatcattcatcatcacgatcaaaaatgccatagtacataaagtatccattaaaacgtagatctagtctcttcacaacacttcaactaataacgcaaaaatcagtttctctttgagtaagtgtttattacaattaaactaactcaggcaagtctatgatcatggcttcttctgctgctgcatcgatctctatgataactctaaggaacctctctcgcaatcatcaatctcaccaaagcacttttctcggtttctctagatccttccataaccaaaggatctcatctaacagtccaggtctctccacacgagcaagatccaccacttcctccactggaggtttcttcagaaccatttgcagcagcagtagcaatgactactccagaccaactaagatccaagagcttaacgtctacgagttcaacgaaggtgatcgaaacagtccagcggttttaaaactagggaaaaaaccagatcagctttgtctcggagatcttgtccccttcacaaacaaactctacacaggagatctcacaaaacgcataggaatcaccgcaggtctctgcgttttgatccaacatgttccagagaagaaaggtgatcgctttgaagcttcttacagtttctacttcggagattatggtcacatatcagttcaaggaccttatctcacttacgaggacacgtttcttgctatcaccggtggctccggtgtgtttgaaggagcttatggacaggtcaagcttcgtcagcttgtgtatcctacgaagctgttttacactttctacttgaaaggtgttgctgctgatttacctgtggagcttaccggaaaacatgttgagccgtcgaaggaagtgaaaccggcggctgaagctcaggcgactcagcccggcgctacgatcgctaactttactaattgaaatctaaatctttgtgggtgtctttgtcatggatcttattgggctgttgttcattgtgtttacattttaataatgggcctaaataatgagcctttgtattgggccgttctcgtaagcgtaatgtgtcccgtccctataagctggatttaagcgcgtgaactccaccttccgatatttttttttgatagattatatcaaatccatggatactttctatatttggaaagtttggcttagtaggctcgtggccatgtttgagct

SEQ ID NO: 482 - protein, 254 aa, Arabidopsis thaliana
  peptide (1)..(254): Ceres Seq. ID no. 13487175
  misc_feature (74)..(254): Pfam Name: Pfam Description:  Allene oxide cyclase
  misc_feature (1)..(254): NCBI GI NO: 15222241 NR Description: allene oxide cyclase family [Arabidopsis thaliana]
  misc_feature (3)..(254): NCBI GI NO: 18404658 NR Description: allene oxide cyclase family [Arabidopsis thaliana]
  misc_feature (78)..(254): NCBI GI NO: 25518012 NR Description: T6J4.4 protein - Arabidopsis thaliana
  misc_feature (3)..(254): NCBI GI NO: 18404656 NR Description: allene oxide cyclase family [Arabidopsis thaliana]
  misc_feature (3)..(254): NCBI GI NO: 15230874 NR Description: allene oxide cyclase family [Arabidopsis thaliana]
  misc_feature (10)..(254): NCBI GI NO: 15320414 NR Description: ERD12 protein [Arabidopsis thaliana]
  misc_feature (6)..(254): NCBI GI NO: 40644132 NR Description: allene oxide cyclase [Medicago truncatula]
  misc_feature (1)..(254): NCBI GI NO: 16416376 NR Description: mangrin [Bruguiera sexangula]
  misc_feature (3)..(254): NCBI GI NO: 40644130 NR Description: allene oxide cyclase [Nicotiana tabacum]
  misc_feature (43)..(254): NCBI GI NO: 21727906 NR Description: allene oxide cyclase
MIMASSAAASISMITLRNLSRNHQSHQSTFLGFSRSFHNQRISSNSPGLSTRARSTTSSTGGFFRTICSSSSNDYSRPTKIQELNVYEFNEGDRNSPAVLKLGKKPDQLCLGDLVPFTNKLYTGDLTKRIGITAGLCVLIQHVPEKKGDRFEASYSFYFGDYGHISVQGPYLTYEDTFLAITGGSGVFEGAYGQVKLRQLVYPTKLFYTFYLKGVAADLPVELTGKHVEPSKEVKPAAEAQATQPGATIANFTN

SEQ ID NO: 483 - protein, 252 aa, Arabidopsis thaliana
  peptide (1)..(252): Ceres Seq. ID no. 13487176
  misc_feature (72)..(252): Pfam Name: Pfam Description:  Allene oxide cyclase
  misc_feature (1)..(252): NCBI GI NO: 15222241 NR Description: allene oxide cyclase family [Arabidopsis thaliana]
  misc_feature (1)..(252): NCBI GI NO: 18404658 NR Description: allene oxide cyclase family [Arabidopsis thaliana]
  misc_feature (76)..(252): NCBI GI NO: 25518012 NR Description: T6J4.4 protein - Arabidopsis thaliana
  misc_feature (1)..(252): NCBI GI NO: 18404656 NR Description: allene oxide cyclase family [Arabidopsis thaliana]
  misc_feature (1)..(252): NCBI GI NO: 15230874 NR Description: allene oxide cyclase family [Arabidopsis thaliana]
  misc_feature (8)..(252): NCBI GI NO: 15320414 NR Description: ERD12 protein [Arabidopsis thaliana]
  misc_feature (4)..(252): NCBI GI NO: 40644132 NR Description: allene oxide cyclase [Medicago truncatula]
  misc_feature (1)..(252): NCBI GI NO: 16416376 NR Description: mangrin [Bruguiera sexangula]
  misc_feature (1)..(252): NCBI GI NO: 40644130 NR Description: allene oxide cyclase [Nicotiana tabacum]
  misc_feature (41)..(252): NCBI GI NO: 21727906 NR Description: allene oxide cyclase
MASSAAASISMITLRNLSRNHQSHQSTFLGFSRSFHNQRISSNSPGLSTRARSTTSSTGGFFRTICSSSSNDYSRPTKIQELNVYEFNEGDRNSPAVLKLGKKPDQLCLGDLVPFTNKLYTGDLTKRIGITAGLCVLIQHVPEKKGDRFEASYSFYFGDYGHISVQGPYLTYEDTFLAITGGSGVFEGAYGQVKLRQLVYPTKLFYTFYLKGVAADLPVELTGKHVEPSKEVKPAAEAQATQPGATIANFTN

SEQ ID NO: 484 - protein, 242 aa, Arabidopsis thaliana
  peptide (1)..(242): Ceres Seq. ID no. 13487177
  misc_feature (62)..(242): Pfam Name: Pfam Description:  Allene oxide cyclase
  misc_feature (1)..(242): NCBI GI NO: 15222241 NR Description: allene oxide cyclase family [Arabidopsis thaliana]
  misc_feature (1)..(242): NCBI GI NO: 18404658 NR Description: allene oxide cyclase family [Arabidopsis thaliana]
  misc_feature (66)..(242): NCBI GI NO: 25518012 NR Description: T6J4.4 protein - Arabidopsis thaliana
  misc_feature (1)..(242): NCBI GI NO: 18404656 NR Description: allene oxide cyclase family [Arabidopsis thaliana]
  misc_feature (1)..(242): NCBI GI NO: 15230874 NR Description: allene oxide cyclase family [Arabidopsis thaliana]
  misc_feature (1)..(242): NCBI GI NO: 15320414 NR Description: ERD12 protein [Arabidopsis thaliana]
  misc_feature (1)..(242): NCBI GI NO: 40644132 NR Description: allene oxide cyclase [Medicago truncatula]
  misc_feature (1)..(242): NCBI GI NO: 16416376 NR Description: mangrin [Bruguiera sexangula]
  misc_feature (1)..(242): NCBI GI NO: 40644130 NR Description: allene oxide cyclase [Nicotiana tabacum]
  misc_feature (31)..(242): NCBI GI NO: 21727906 NR Description: allene oxide cyclase
MITLRNLSRNHQSHQSTFLGFSRSFHNQRISSNSPGLSTRARSTTSSTGGFFRTICSSSSNDYSRPTKIQELNVYEFNEGDRNSPAVLKLGKKPDQLCLGDLVPFTNKLYTGDLTKRIGITAGLCVLIQHVPEKKGDRFEASYSFYFGDYGHISVQGPYLTYEDTFLAITGGSGVFEGAYGQVKLRQLVYPTKLFYTFYLKGVAADLPVELTGKHVEPSKEVKPAAEAQATQPGATIANFTN

SEQ ID NO: 485 - DNA, 1082 bp, Arabidopsis thaliana
  misc_feature (1)..(1082): Ceres Seq. ID no. 12396690
aagtttcaattcatcttcattccgggagaaaaagtctctagtcgcgatacttgagctactcagctttagggtttaacatgttaaggtctctgatttggaaacgatcacaggcatattcttcagtcgtcacgatgtcttcaatcagtcagagaggaaatgaaaggcttttgtctgaagtcgctggttcacattcaagagataataagatattggttttgggaggaaatggttatgtaggttcacacatatgtaaggaggcactgagacaaggtttctctgtatctagtcttagcaggtctggaagatcttctcttcacgattcgtgggtcgatgatgtaacctggcatcaaggtgatttgctttcacccgattctctgaagcctgcactagaaggaattacatctgtgatttcatgtgttggtggttttggttccaactcacaaatggtcagaattaacggtactgcaaacatcaatgctgttaaagctgcagcagaacaaggtgtgaagagatttgtgtatatatcagctgcggattttggtgtcataaataacttgattcgaggatatttcgaagggaagagagcaaccgaagctgagattttggataaatttggaaacagaggttcggttttaaggccaggattcatacatgggactcgtcaggtcggtagcataaagctgccacttagtctcattggagctcctctcgaaatggttttgaagctgttgccaaaagaggtgacgaaaattcctgtgatcgggccacttttaatacctccggtcaatgtcaaatccgttgcagcaacagcggtaaaagctgcagttgatcccgagtttgcttctggagtcatcgatgtgtaccggattcttcaacatggtcactgaaaacaacacctgtcttaacaaagttctcctcaatacggttttaaatgtcaaattcaaatgtaaccaataaccatcgtctctggtcttctgctaccaaataaactatgactttcgcatattacacaataggagaacaaataatgaaatctttttgaaactggaaccaataaccatcgtcattagagattcaacttc

SEQ ID NO: 486 - protein, 269 aa, Arabidopsis thaliana
  peptide (1)..(269): Ceres Seq. ID no. 12396691
  misc_feature (43)..(204): Pfam Name: Pfam Description:  Isoflavone reductase
  misc_feature (1)..(269): NCBI GI NO: 18417824 NR Description: putative protein; protein id: At5g15910
  misc_feature (19)..(269): NCBI GI NO: 21592373 NR Description: unknown [Arabidopsis thaliana]
  misc_feature (43)..(269): NCBI GI NO: 18416362 NR Description: putative protein; protein id: At5g10730
  misc_feature (43)..(269): NCBI GI NO: 10129651 NR Description: putative protein [Arabidopsis thaliana]
  misc_feature (123)..(269): NCBI GI NO: 11346175 NR Description: hypothetical protein F1N13_50 - Arabidopsis thaliana
  misc_feature (40)..(264): NCBI GI NO: 38346147 NR Description: OSJNBb0118P14.7
  misc_feature (40)..(264): NCBI GI NO: 18398333 NR Description: expressed protein; protein id: At1g32220
  misc_feature (108)..(264): NCBI GI NO: 8744993 NR Description: hypothetical protein P1295.07 [Leishmania major]
  misc_feature (43)..(232): NCBI GI NO: 23037289 NR Description: hypothetical protein [Oenococcus oeni MCW]
  misc_feature (43)..(239): NCBI GI NO: 22536918 NR Description: conserved domain protein
MLRSLIWKRSQAYSSVVTMSSISQRGNERLLSEVAGSHSRDNKILVLGGNGYVGSHICKEALRQGFSVSSLSRSGRSSLHDSWVDDVTWHQGDLLSPDSLKPALEGITSVISCVGGFGSNSQMVRINGTANINAVKAAAEQGVKRFVYISAADFGVINNLIRGYFEGKRATEAEILDKFGNRGSVLRPGFIHGTRQVGSIKLPLSLIGAPLEMVLKLLPKEVTKIPVIGPLLIPPVNVKSVAATAVKAAVDPEFASGVIDVYRILQHGH

SEQ ID NO: 487 - protein, 251 aa, Arabidopsis thaliana
  peptide (1)..(251): Ceres Seq. ID no. 12396692
  misc_feature (25)..(186): Pfam Name: Pfam Description:  Isoflavone reductase
  misc_feature (1)..(251): NCBI GI NO: 18417824 NR Description: putative protein; protein id: At5g15910
  misc_feature (1)..(251): NCBI GI NO: 21592373 NR Description: unknown [Arabidopsis thaliana]
  misc_feature (25)..(251): NCBI GI NO: 18416362 NR Description: putative protein; protein id: At5g10730
  misc_feature (25)..(251): NCBI GI NO: 10129651 NR Description: putative protein [Arabidopsis thaliana]
  misc_feature (105)..(251): NCBI GI NO: 11346175 NR Description: hypothetical protein F1N13_50 - Arabidopsis thaliana
  misc_feature (22)..(246): NCBI GI NO: 38346147 NR Description: OSJNBb0118P14.7
  misc_feature (22)..(246): NCBI GI NO: 18398333 NR Description: expressed protein; protein id: At1g32220
  misc_feature (90)..(246): NCBI GI NO: 8744993 NR Description: hypothetical protein P1295.07 [Leishmania major]
  misc_feature (25)..(214): NCBI GI NO: 23037289 NR Description: hypothetical protein [Oenococcus oeni MCW]
  misc_feature (25)..(221): NCBI GI NO: 22536918 NR Description: conserved domain protein
MSSISQRGNERLLSEVAGSHSRDNKILVLGGNGYVGSHICKEALRQGFSVSSLSRSGRSSLHDSWVDDVTWHQGDLLSPDSLKPALEGITSVISCVGGFGSNSQMVRINGTANINAVKAAAEQGVKRFVYISAADFGVINNLIRGYFEGKRATEAEILDKFGNRGSVLRPGFIHGTRQVGSIKLPLSLIGAPLEMVLKLLPKEVTKIPVIGPLLIPPVNVKSVAATAVKAAVDPEFASGVIDVYRILQHGH

SEQ ID NO: 488 - protein, 147 aa, Arabidopsis thaliana
  peptide (1)..(147): Ceres Seq. ID no. 12396693
  misc_feature (1)..(82): Pfam Name: Pfam Description:  Isoflavone reductase
  misc_feature (1)..(147): NCBI GI NO: 18417824 NR Description: putative protein; protein id: At5g15910
  misc_feature (1)..(147): NCBI GI NO: 21592373 NR Description: unknown [Arabidopsis thaliana]
  misc_feature (1)..(147): NCBI GI NO: 18416362 NR Description: putative protein; protein id: At5g10730
  misc_feature (1)..(147): NCBI GI NO: 10129651 NR Description: putative protein [Arabidopsis thaliana]
  misc_feature (1)..(147): NCBI GI NO: 11346175 NR Description: hypothetical protein F1N13_50 - Arabidopsis thaliana
  misc_feature (1)..(142): NCBI GI NO: 38346147 NR Description: OSJNBb0118P14.7
  misc_feature (1)..(142): NCBI GI NO: 18398333 NR Description: expressed protein; protein id: At1g32220
  misc_feature (1)..(142): NCBI GI NO: 8744993 NR Description: hypothetical protein P1295.07 [Leishmania major]
  misc_feature (1)..(110): NCBI GI NO: 23037289 NR Description: hypothetical protein [Oenococcus oeni MCW]
  misc_feature (1)..(117): NCBI GI NO: 22536918 NR Description: conserved domain protein
MVRINGTANINAVKAAAEQGVKRFVYISAADFGVINNLIRGYFEGKRATEAEILDKFGNRGSVLRPGFIHGTRQVGSIKLPLSLIGAPLEMVLKLLPKEVTKIPVIGPLLIPPVNVKSVAATAVKAAVDPEFASGVIDVYRILQHGH

SEQ ID NO: 489 - DNA, 1199 bp, Arabidopsis thaliana
  misc_feature (1)..(1199): Ceres Seq. ID no. 12371573
aaaggaaaaagaaaaatacataattgatctcaaccgtccgatcatccatcttgccatcaccgttcaccaatcttcttcgtctcctctctctttctctctttttgctgtttctagctcctctctctctggatctcgccggcgaaccgtttctcttgggtgtaaacagtagcaatcaagctatagaatctcagatatcgctgaattagctgttggattttatccgccttttcttcgttatccggggctcgggtataaggtttcatcgtcttatttcatctgtaaatgggctgcttccactcaaaggcagcaaaagaatttcgaggacacgaagaccctgttaagcttgcctctgagacagcttctagtgtgagtgaggttgaagcattatttgagctattcaagagcataagcagttcggttgttgattatggtctgattaacaaggaggagtttcaacttgctttgttcaaaagccggaagagggagaatatatttgctaatagggtaaaatcttaattcttcaggcttttacaagattcgtcttctggaagagtgatctaaaccaagataatatgtccattatcctaaacaatattgcttttccgcagatatttgatatgtttgatgttaaacgaaaaggagtcatcgatttcggggactttgtaagatcactcaatgttttccaccccaatgcttctctagaagacaaaatagattttacgtttaggctttacgacatggactgcacgggttacattgaacgacaagaggtcaagcaaatgttgatcgcgcttctctgcgaatctgaaatgaaactggctgatgaaaccatagagataatactcgataagacatttgaagatgcagacgtgaatcaagatggaaaaattgataaattagagtggagtgatttcgtaaacaaaaatccatcattgcttaagatcatgactcttccatatctcagggatattacgacaacgtttccgagttttgtcttccattcggaggtcgatgagattgccacatgaagaaacaaactggtttaagaccgagtagattgccacgagttggaagaacaagtctgagctaatcggtgtaatcaacatctgtttgtaaacagtagtagagcatattctcttgaaattgtttgggttacttttttcttctcacaacagtttaaaattttgggtttttagctt

SEQ ID NO: 490 - protein, 151 aa, Arabidopsis thaliana
  peptide (1)..(151): Ceres Seq. ID no. 12371574
  misc_feature (90)..(118): Pfam Name: Pfam Description:  EF hand
  misc_feature (7)..(151): NCBI GI NO: 18414931 NR Description: calcineurin B-like protein 1
  misc_feature (7)..(151): NCBI GI NO: 15238015 NR Description: calcineurin B 1; protein id: At5g47100
  misc_feature (12)..(148): NCBI GI NO: 30687272 NR Description: calcineurin B-like protein 3 (CBL3)
  misc_feature (12)..(148): NCBI GI NO: 16924116 NR Description: putative calcineurin B-like protein [Oryza sativa]
  misc_feature (12)..(148): NCBI GI NO: 22137326 NR Description: calcineurin B [Pisum sativum]
  misc_feature (12)..(148): NCBI GI NO: 15236778 NR Description: calcineurin B-like protein 3
  misc_feature (12)..(148): NCBI GI NO: 15241101 NR Description: calcineurin B-like protein 2 (gb|AAC26009
  misc_feature (12)..(148): NCBI GI NO: 21593228 NR Description: calcineurin B-like protein 2
  misc_feature (7)..(151): NCBI GI NO: 37536918 NR Description: putative calcineurin
  misc_feature (7)..(149): NCBI GI NO: 15237928 NR Description: calcium sensor homolog (gb|AAC26110
MSIILNNIAFPQIFDMFDVKRKGVIDFGDFVRSLNVFHPNASLEDKIDFTFRLYDMDCTGYIERQEVKQMLIALLCESEMKLADETIEIILDKTFEDADVNQDGKIDKLEWSDFVNKNPSLLKIMTLPYLRDITTTFPSFVFHSEVDEIAT

SEQ ID NO: 491 - protein, 136 aa, Arabidopsis thaliana
  peptide (1)..(136): Ceres Seq. ID no. 12371575
  misc_feature (75)..(103): Pfam Name: Pfam Description:  EF hand
  misc_feature (1)..(136): NCBI GI NO: 18414931 NR Description: calcineurin B-like protein 1
  misc_feature (1)..(136): NCBI GI NO: 15238015 NR Description: calcineurin B 1; protein id: At5g47100
  misc_feature (1)..(133): NCBI GI NO: 30687272 NR Description: calcineurin B-like protein 3 (CBL3)
  misc_feature (1)..(133): NCBI GI NO: 16924116 NR Description: putative calcineurin B-like protein [Oryza sativa]
  misc_feature (1)..(133): NCBI GI NO: 22137326 NR Description: calcineurin B [Pisum sativum]
  misc_feature (1)..(133): NCBI GI NO: 15236778 NR Description: calcineurin B-like protein 3
  misc_feature (1)..(133): NCBI GI NO: 15241101 NR Description: calcineurin B-like protein 2 (gb|AAC26009
  misc_feature (1)..(133): NCBI GI NO: 21593228 NR Description: calcineurin B-like protein 2
  misc_feature (1)..(136): NCBI GI NO: 37536918 NR Description: putative calcineurin
  misc_feature (1)..(134): NCBI GI NO: 15237928 NR Description: calcium sensor homolog (gb|AAC26110
MFDVKRKGVIDFGDFVRSLNVFHPNASLEDKIDFTFRLYDMDCTGYIERQEVKQMLIALLCESEMKLADETIEIILDKTFEDADVNQDGKIDKLEWSDFVNKNPSLLKIMTLPYLRDITTTFPSFVFHSEVDEIAT

SEQ ID NO: 492 - protein, 96 aa, Arabidopsis thaliana
  peptide (1)..(96): Ceres Seq. ID no. 12371576
  misc_feature (35)..(63): Pfam Name: Pfam Description:  EF hand
  misc_feature (1)..(96): NCBI GI NO: 18414931 NR Description: calcineurin B-like protein 1
  misc_feature (1)..(96): NCBI GI NO: 15238015 NR Description: calcineurin B 1; protein id: At5g47100
  misc_feature (1)..(93): NCBI GI NO: 30687272 NR Description: calcineurin B-like protein 3 (CBL3)
  misc_feature (1)..(93): NCBI GI NO: 16924116 NR Description: putative calcineurin B-like protein [Oryza sativa]
  misc_feature (1)..(93): NCBI GI NO: 22137326 NR Description: calcineurin B [Pisum sativum]
  misc_feature (1)..(93): NCBI GI NO: 15236778 NR Description: calcineurin B-like protein 3
  misc_feature (1)..(93): NCBI GI NO: 15241101 NR Description: calcineurin B-like protein 2 (gb|AAC26009
  misc_feature (1)..(93): NCBI GI NO: 21593228 NR Description: calcineurin B-like protein 2
  misc_feature (1)..(96): NCBI GI NO: 37536918 NR Description: putative calcineurin
  misc_feature (1)..(94): NCBI GI NO: 15237928 NR Description: calcium sensor homolog (gb|AAC26110
MDCTGYIERQEVKQMLIALLCESEMKLADETIEIILDKTFEDADVNQDGKIDKLEWSDFVNKNPSLLKIMTLPYLRDITTTFPSFVFHSEVDEIAT

SEQ ID NO: 493 - DNA, 946 bp, Arabidopsis thaliana
  misc_feature (1)..(946): Ceres Seq. ID no. 13592449
aaaaagtgagtgcggtgtttaatgggtttgtcaccaactttccattttcttaccaacgaagaagaagcagaaaaaaagtaaacaaagactaaaaaaaaaaagccagcatcttcggagttggtgggagagagacagagatggagaggagaaagattgtgatgtgtggtgttttatttcttcttggtttattatcagctgttactgccttcgtcgctgaagctactcgaatcaagagatctcaggtcacggttaccgtttcggattcaatcacaaaatgcacttatccaagaagtccagctttcaatctcggcttcacttcagctctctttctgatgatggctcagataatagtcagtgtctcaagcggttgtttctgttgtagaaaaggtcctgctccttcaaggtctaattggattatctccttaatctgctttgttgtttcctggttcacttttgtaatagctttcctcgtgctgctttctggagctgcactcaacgatgaacacaccgaggaatcaatgaatgctggtacctacttttgctacatagtgaaaccaggcgttttctctaccggtgctgtgctttcgcttgttactattgcccttgggattgtctactatttatgtttgacttcaaataagcaaattgttgctgccacaacgacccaaggaacaggaatagcaatggggcagcctcagattccagagagagtagaagatcctgtttttgttcatgaggatacttacatgagaagacagttcacttaaaaacagacaaagcttgcttgtaaagcacgttaggtttagtagaagatttagacaaaatgattaacggatatgtgtttgattaagagtattgaaactttgtaatgattgttattcttgattgaagtagaaatctttgagaaccccaaaaacgtcacttagttttgtagtttttttctctg

SEQ ID NO: 494 - protein, 209 aa, Arabidopsis thaliana
  peptide (1)..(209): Ceres Seq. ID no. 13592450
  misc_feature (1)..(209): NCBI GI NO: 18418215 NR Description: expressed protein [Arabidopsis thaliana]
  misc_feature (31)..(209): NCBI GI NO: 10177066 NR Description: dbj|BAA92731
  misc_feature (1)..(208): NCBI GI NO: 34897938 NR Description: ESTs AU082454
  misc_feature (79)..(208): NCBI GI NO: 24413945 NR Description: contains ESTs AU082454
  misc_feature (1)..(32): NCBI GI NO: 24413945 NR Description: contains ESTs AU082454
  misc_feature (6)..(183): NCBI GI NO: 38344206 NR Description: OSJNBa0064G10.22
  misc_feature (8)..(184): NCBI GI NO: 34394069 NR Description: unknown protein
  misc_feature (5)..(184): NCBI GI NO: 38016521 NR Description: fiber protein Fb34 [Gossypium barbadense]
  misc_feature (11)..(167): NCBI GI NO: 18391509 NR Description: expressed protein [Arabidopsis thaliana]
  misc_feature (11)..(168): NCBI GI NO: 21554630 NR Description: unknown [Arabidopsis thaliana]
MERRKIVMCGVLFLLGLLSAVTAFVAEATRIKRSQVTVTVSDSITKCTYPRSPAFNLGFTSALFLMMAQIIVSVSSGCFCCRKGPAPSRSNWIISLICFVVSWFTFVIAFLVLLSGAALNDEHTEESMNAGTYFCYIVKPGVFSTGAVLSLVTIALGIVYYLCLTSNKQIVAATTTQGTGIAMGQPQIPERVEDPVFVHEDTYMRRQFT

SEQ ID NO: 495 - protein, 202 aa, Arabidopsis thaliana
  peptide (1)..(202): Ceres Seq. ID no. 13592451
  misc_feature (1)..(202): NCBI GI NO: 18418215 NR Description: expressed protein [Arabidopsis thaliana]
  misc_feature (24)..(202): NCBI GI NO: 10177066 NR Description: dbj|BAA92731
  misc_feature (1)..(201): NCBI GI NO: 34897938 NR Description: ESTs AU082454
  misc_feature (72)..(201): NCBI GI NO: 24413945 NR Description: contains ESTs AU082454
  misc_feature (1)..(25): NCBI GI NO: 24413945 NR Description: contains ESTs AU082454
  misc_feature (1)..(176): NCBI GI NO: 38344206 NR Description: OSJNBa0064G10.22
  misc_feature (1)..(177): NCBI GI NO: 34394069 NR Description: unknown protein
  misc_feature (1)..(177): NCBI GI NO: 38016521 NR Description: fiber protein Fb34 [Gossypium barbadense]
  misc_feature (4)..(160): NCBI GI NO: 18391509 NR Description: expressed protein [Arabidopsis thaliana]
  misc_feature (4)..(161): NCBI GI NO: 21554630 NR Description: unknown [Arabidopsis thaliana]
MCGVLFLLGLLSAVTAFVAEATRIKRSQVTVTVSDSITKCTYPRSPAFNLGFTSALFLMMAQIIVSVSSGCFCCRKGPAPSRSNWIISLICFVVSWFTFVIAFLVLLSGAALNDEHTEESMNAGTYFCYIVKPGVFSTGAVLSLVTIALGIVYYLCLTSNKQIVAATTTQGTGIAMGQPQIPERVEDPVFVHEDTYMRRQFT

SEQ ID NO: 496 - protein, 144 aa, Arabidopsis thaliana
  peptide (1)..(144): Ceres Seq. ID no. 13592452
  misc_feature (1)..(144): NCBI GI NO: 18418215 NR Description: expressed protein [Arabidopsis thaliana]
  misc_feature (1)..(144): NCBI GI NO: 10177066 NR Description: dbj|BAA92731
  misc_feature (1)..(143): NCBI GI NO: 34897938 NR Description: ESTs AU082454
  misc_feature (14)..(143): NCBI GI NO: 24413945 NR Description: contains ESTs AU082454
  misc_feature (1)..(118): NCBI GI NO: 38344206 NR Description: OSJNBa0064G10.22
  misc_feature (1)..(119): NCBI GI NO: 34394069 NR Description: unknown protein
  misc_feature (1)..(119): NCBI GI NO: 38016521 NR Description: fiber protein Fb34 [Gossypium barbadense]
  misc_feature (1)..(102): NCBI GI NO: 18391509 NR Description: expressed protein [Arabidopsis thaliana]
  misc_feature (1)..(103): NCBI GI NO: 21554630 NR Description: unknown [Arabidopsis thaliana]
  misc_feature (1)..(103): NCBI GI NO: 18407003 NR Description: expressed protein [Arabidopsis thaliana]
MMAQIIVSVSSGCFCCRKGPAPSRSNWIISLICFVVSWFTFVIAFLVLLSGAALNDEHTEESMNAGTYFCYIVKPGVFSTGAVLSLVTIALGIVYYLCLTSNKQIVAATTTQGTGIAMGQPQIPERVEDPVFVHEDTYMRRQFT

SEQ ID NO: 497 - DNA, 1018 bp, Arabidopsis thaliana
  misc_feature (1)..(1018): Ceres Seq. ID no. 13488235
aggagactcttgctttttcacaaaaaaaaaagaaagagatagagcagcaaccccagcagcatcgaagatcatcgatcggtttctctctttcattaatcagatctaattgatacccaaccttcttcatcggaggccgtatctcacgaggaaacatgggcggtagatttggagtcctcctagtcctcttcctcttgagctggtcttgtcatgctacaaacccgattcttctcgaaccattcgaatcagctcatgatgacaaccaagtctgtgaactatgtgacaagtatgtcacgctagtcattgattaccttcaagactacgacaaccagaatgaactcgttgaggcccttcatatcagctgctctcagattcctcctctcaaaaaacagtgtctttcaatggtagatcattacacccaacttttcttcacacaagtctctactatcaaatcagaccaaatctgcaaacggcttaacctctgtcaagctgtgacaccggcctttgcccctcaagtccatcaaggaaactgcgaggcttgccgcgagactgtctctgaggtcgtcaccaaactcaaggatcctgagactaagctgaagataattcggttacttctcaaggaatgcaagtcgcttaacaattaccaggacaagtgcaagaagatggtattcgagtacgggcctctgatgcttacggatttgcagaagtttctggagaagaaagacgtgtgcactatcctccacgtctgtccaggtccagccacccaccgtgactacgttcctgcggtggagtcattggcagattcgtaaattcggccaccttggtttcgtcgtcattcacactaataccatgccatgatcgtgatgctaatttaatttggtaacccggtggtcatgtaaatactgattgatatattaaaaacataactacacgattgatgattcttgtgtgatttgaaaagaacgctgtctaaaggcccattgtccatcgatgggcctttttgctaatttctacattgctc

SEQ ID NO: 498 - protein, 217 aa, Arabidopsis thaliana
  peptide (1)..(217): Ceres Seq. ID no. 13488236
  misc_feature (36)..(74): Pfam Name: Pfam Description:  Saposin-like type B, region 1
  misc_feature (1)..(217): NCBI GI NO: 15241065 NR Description: expressed protein [Arabidopsis thaliana]
  misc_feature (1)..(199): NCBI GI NO: 15231028 NR Description: expressed protein [Arabidopsis thaliana]
  misc_feature (35)..(198): NCBI GI NO: 34896130 NR Description: P0701D05.19
  misc_feature (41)..(201): NCBI GI NO: 6942199 NR Description: putative protein [Vitis riparia]
  misc_feature (64)..(160): NCBI GI NO: 18399278 NR Description: cyclin, putative [Arabidopsis thaliana]
  misc_feature (39)..(203): NCBI GI NO: 26364659 NR Description: unnamed protein product [Mus musculus]
  misc_feature (39)..(203): NCBI GI NO: 26324414 NR Description: unnamed protein product [Mus musculus]
MGGRFGVLLVLFLLSWSCHATNPILLEPFESAHDDNQVCELCDKYVTLVIDYLQDYDNQNELVEALHISCSQIPPLKKQCLSMVDHYTQLFFTQVSTIKSDQICKRLNLCQAVTPAFAPQVHQGNCEACRETVSEVVTKLKDPETKLKIIRLLLKECKSLNNYQDKCKKMVFEYGPLMLTDLQKFLEKKDVCTILHVCPGPATHRDYVPAVESLADS

SEQ ID NO: 499 - protein, 135 aa, Arabidopsis thaliana
  peptide (1)..(135): Ceres Seq. ID no. 13488237
  misc_feature (82)..(116): Pfam Name: Pfam Description:  Saposin-like type B, region 2
  misc_feature (1)..(135): NCBI GI NO: 15241065 NR Description: expressed protein [Arabidopsis thaliana]
  misc_feature (1)..(117): NCBI GI NO: 15231028 NR Description: expressed protein [Arabidopsis thaliana]
  misc_feature (1)..(116): NCBI GI NO: 34896130 NR Description: P0701D05.19
  misc_feature (1)..(119): NCBI GI NO: 6942199 NR Description: putative protein [Vitis riparia]
  misc_feature (1)..(78): NCBI GI NO: 18399278 NR Description: cyclin, putative [Arabidopsis thaliana]
  misc_feature (1)..(121): NCBI GI NO: 26364659 NR Description: unnamed protein product [Mus musculus]
  misc_feature (1)..(121): NCBI GI NO: 26324414 NR Description: unnamed protein product [Mus musculus]
MVDHYTQLFFTQVSTIKSDQICKRLNLCQAVTPAFAPQVHQGNCEACRETVSEVVTKLKDPETKLKIIRLLLKECKSLNNYQDKCKKMVFEYGPLMLTDLQKFLEKKDVCTILHVCPGPATHRDYVPAVESLADS

SEQ ID NO: 500 - DNA, 617 bp, Arabidopsis thaliana
  misc_feature (1)..(617): Ceres Seq. ID no. 12562672
aatatataactttaaaacattgaagctaacttctcacaagtcaccaccatttctctctagaaaaaatctgaaaaacaaaaccatctcaaagtttcttgagaagaaaaaaagggtcaagaaagatgcctaaagacaggaatatcggaatcgccatggatttctcagagagcagcaagaacgctctgaaatgggcgatcgagaacttagcagacaaaggagacacgatttacatcatccacactctaccactctctggcgatgaatctcgtaactccctctggttcaaatccggttctcctctcataccgttggcagagtttagggaaccggagattatggagaaatacggtgtcaaaaccgacatcgcatgtcttgatatgctcgacactggttcgaggcagaaagaggtgcatgtagtgaccaagttatactggggagatgcaagagagaagcttgttgatgctgttaaagatcttaaactcgattctattgtcatgggaagcagaggactcagtgctcttcaaaggataataatgggaagcgtgagcagctttgtgatccaacacgcgccttgccctgtcaccgttgtcaaggataacgaataaacgattctcact

SEQ ID NO: 501 - protein, 160 aa, Arabidopsis thaliana
  peptide (1)..(160): Ceres Seq. ID no. 12562673
  misc_feature (4)..(157): Pfam Name: Pfam Description:  Universal stress protein family
  misc_feature (1)..(160): NCBI GI NO: 30693971 NR Description: expressed protein [Arabidopsis thaliana]
  misc_feature (3)..(158): NCBI GI NO: 11602751 NR Description: ENOD18 protein [Vicia faba]
  misc_feature (1)..(158): NCBI GI NO: 11602747 NR Description: early nodulin ENOD18 [Vicia faba]
  misc_feature (1)..(158): NCBI GI NO: 11602749 NR Description: early nodulin ENOD18 [Vicia faba]
  misc_feature (1)..(98): NCBI GI NO: 21555070 NR Description: unknown [Arabidopsis thaliana]
  misc_feature (1)..(159): NCBI GI NO: 30678807 NR Description: expressed protein [Arabidopsis thaliana]
  misc_feature (4)..(157): NCBI GI NO: 20160561 NR Description: P0414E03.3
  misc_feature (1)..(135): NCBI GI NO: 18396497 NR Description: expressed protein; protein id: At3g03270
  misc_feature (5)..(157): NCBI GI NO: 18401345 NR Description: expressed protein; protein id: At3g17020
  misc_feature (5)..(159): NCBI GI NO: 15528707 NR Description: P0583G08.8
MPKDRNIGIAMDFSESSKNALKWAIENLADKGDTIYIIHTLPLSGDESRNSLWFKSGSPLIPLAEFREPEIMEKYGVKTDIACLDMLDTGSRQKEVHVVTKLYWGDAREKLVDAVKDLKLDSIVMGSRGLSALQRIIMGSVSSFVIQHAPCPVTVVKDNE

SEQ ID NO: 502 - protein, 150 aa, Arabidopsis thaliana
  peptide (1)..(150): Ceres Seq. ID no. 12562674
  misc_feature (1)..(147): Pfam Name: Pfam Description:  Universal stress protein family
  misc_feature (1)..(150): NCBI GI NO: 30693971 NR Description: expressed protein [Arabidopsis thaliana]
  misc_feature (1)..(148): NCBI GI NO: 11602751 NR Description: ENOD18 protein [Vicia faba]
  misc_feature (1)..(148): NCBI GI NO: 11602747 NR Description: early nodulin ENOD18 [Vicia faba]
  misc_feature (1)..(148): NCBI GI NO: 11602749 NR Description: early nodulin ENOD18 [Vicia faba]
  misc_feature (1)..(88): NCBI GI NO: 21555070 NR Description: unknown [Arabidopsis thaliana]
  misc_feature (1)..(149): NCBI GI NO: 30678807 NR Description: expressed protein [Arabidopsis thaliana]
  misc_feature (1)..(147): NCBI GI NO: 20160561 NR Description: P0414E03.3
  misc_feature (1)..(125): NCBI GI NO: 18396497 NR Description: expressed protein; protein id: At3g03270
  misc_feature (1)..(147): NCBI GI NO: 18401345 NR Description: expressed protein; protein id: At3g17020
  misc_feature (1)..(149): NCBI GI NO: 15528707 NR Description: P0583G08.8
MDFSESSKNALKWAIENLADKGDTIYIIHTLPLSGDESRNSLWFKSGSPLIPLAEFREPEIMEKYGVKTDIACLDMLDTGSRQKEVHVVTKLYWGDAREKLVDAVKDLKLDSIVMGSRGLSALQRIIMGSVSSFVIQHAPCPVTVVKDNE

SEQ ID NO: 503 - protein, 89 aa, Arabidopsis thaliana
  peptide (1)..(89): Ceres Seq. ID no. 12562675
  misc_feature (1)..(86): Pfam Name: Pfam Description:  Universal stress protein family
  misc_feature (1)..(89): NCBI GI NO: 30693971 NR Description: expressed protein [Arabidopsis thaliana]
  misc_feature (1)..(87): NCBI GI NO: 11602751 NR Description: ENOD18 protein [Vicia faba]
  misc_feature (1)..(87): NCBI GI NO: 11602747 NR Description: early nodulin ENOD18 [Vicia faba]
  misc_feature (1)..(87): NCBI GI NO: 11602749 NR Description: early nodulin ENOD18 [Vicia faba]
  misc_feature (1)..(27): NCBI GI NO: 21555070 NR Description: unknown [Arabidopsis thaliana]
  misc_feature (1)..(88): NCBI GI NO: 30678807 NR Description: expressed protein [Arabidopsis thaliana]
  misc_feature (1)..(86): NCBI GI NO: 20160561 NR Description: P0414E03.3
  misc_feature (1)..(64): NCBI GI NO: 18396497 NR Description: expressed protein; protein id: At3g03270
  misc_feature (1)..(86): NCBI GI NO: 18401345 NR Description: expressed protein; protein id: At3g17020
  misc_feature (1)..(88): NCBI GI NO: 15528707 NR Description: P0583G08.8
MEKYGVKTDIACLDMLDTGSRQKEVHVVTKLYWGDAREKLVDAVKDLKLDSIVMGSRGLSALQRIIMGSVSSFVIQHAPCPVTVVKDNE

SEQ ID NO: 504 - DNA, 572 bp, Arabidopsis thaliana
  misc_feature (1)..(572): Ceres Seq. ID no. 13490216
aaaaaccctagatctgatactaaaatggcgacggcgttgaagaagaacagaaagaagagaggtcacgtcagcgccggacatggacgtatcggtaagcaccgtaagcatcccggaggtcgtggaaacgcaggaggtatgcatcaccacaggatcctcttcgacaagtaccatccaggttacttcgggaaagttggtatgaggtatttccacaagcttcgtaacaagttcttttgcccaatcgtgaacctggacaagctatggtcacttgttcctgaagacgtgaaggcgaaatcgagcaaggataatgttccgttgatcgatgtgacgcagcatggtttcttcaaggttttggggaaaggtcatttgcctgagaacaaacctttcgttgtgaaggctaagcttatctctaagactgctgagaagaagattaaggaagctggtggtgctgttgttctcactgcttagtttttttttttcaattcagtctctttttaatttatttcatgttattgaactcagctttgttggattttggaatcagagatcttttaatctatggtattggattatac

SEQ ID NO: 505 - protein, 154 aa, Arabidopsis thaliana
  peptide (1)..(154): Ceres Seq. ID no. 13490217
  misc_feature (115)..(148): Pfam Name: Pfam Description:  Ribosomal protein L15
  misc_feature (9)..(154): NCBI GI NO: 15220698 NR Description: 60S ribosomal protein L27A (RPL27aB)
  misc_feature (9)..(154): NCBI GI NO: 15223190 NR Description: 60S ribosomal protein L27A (RPL27aC)
  misc_feature (9)..(154): NCBI GI NO: 21553702 NR Description: 60S ribosomal protein L27A [Arabidopsis thaliana]
  misc_feature (9)..(154): NCBI GI NO: 7959355 NR Description: 60S ribosomal protein L27a [Panax ginseng]
  misc_feature (9)..(154): NCBI GI NO: 3608481 NR Description: ribosomal protein L27a [Petunia x hybrida]
  misc_feature (9)..(154): NCBI GI NO: 23237917 NR Description: putative 60S ribosomal protein L27a
  misc_feature (9)..(154): NCBI GI NO: 30017566 NR Description: putative ribosomal protein L27a
  misc_feature (11)..(154): NCBI GI NO: 22758850 NR Description: ribosomal protein L22 [Argopecten irradians]
  misc_feature (9)..(154): NCBI GI NO: 23612262 NR Description: 60S ribosomal protein L27a, putative
  misc_feature (9)..(154): NCBI GI NO: 132846 NR Description: 60S RIBOSOMAL PROTEIN L27A
KNPRSDTKMATALKKNRKKRGHVSAGHGRIGKHRKHPGGRGNAGGMHHHRILFDKYHPGYFGKVGMRYFHKLRNKFFCPIVNLDKLWSLVPEDVKAKSSKDNVPLIDVTQHGFFKVLGKGHLPENKPFVVKAKLISKTAEKKIKEAGGAVVLTA

SEQ ID NO: 506 - protein, 146 aa, Arabidopsis thaliana
  peptide (1)..(146): Ceres Seq. ID no. 13490218
  misc_feature (107)..(140): Pfam Name: Pfam Description:  Ribosomal protein L15
  misc_feature (1)..(146): NCBI GI NO: 15220698 NR Description: 60S ribosomal protein L27A (RPL27aB)
  misc_feature (1)..(146): NCBI GI NO: 15223190 NR Description: 60S ribosomal protein L27A (RPL27aC)
  misc_feature (1)..(146): NCBI GI NO: 21553702 NR Description: 60S ribosomal protein L27A [Arabidopsis thaliana]
  misc_feature (1)..(146): NCBI GI NO: 7959355 NR Description: 60S ribosomal protein L27a [Panax ginseng]
  misc_feature (1)..(146): NCBI GI NO: 3608481 NR Description: ribosomal protein L27a [Petunia x hybrida]
  misc_feature (1)..(146): NCBI GI NO: 23237917 NR Description: putative 60S ribosomal protein L27a
  misc_feature (1)..(146): NCBI GI NO: 30017566 NR Description: putative ribosomal protein L27a
  misc_feature (3)..(146): NCBI GI NO: 22758850 NR Description: ribosomal protein L22 [Argopecten irradians]
  misc_feature (1)..(146): NCBI GI NO: 23612262 NR Description: 60S ribosomal protein L27a, putative
  misc_feature (1)..(146): NCBI GI NO: 132846 NR Description: 60S RIBOSOMAL PROTEIN L27A
MATALKKNRKKRGHVSAGHGRIGKHRKHPGGRGNAGGMHHHRILFDKYHPGYFGKVGMRYFHKLRNKFFCPIVNLDKLWSLVPEDVKAKSSKDNVPLIDVTQHGFFKVLGKGHLPENKPFVVKAKLISKTAEKKIKEAGGAVVLTA

SEQ ID NO: 507 - protein, 109 aa, Arabidopsis thaliana
  peptide (1)..(109): Ceres Seq. ID no. 13490219
  misc_feature (70)..(103): Pfam Name: Pfam Description:  Ribosomal protein L15
  misc_feature (1)..(109): NCBI GI NO: 15220698 NR Description: 60S ribosomal protein L27A (RPL27aB)
  misc_feature (1)..(109): NCBI GI NO: 15223190 NR Description: 60S ribosomal protein L27A (RPL27aC)
  misc_feature (1)..(109): NCBI GI NO: 21553702 NR Description: 60S ribosomal protein L27A [Arabidopsis thaliana]
  misc_feature (1)..(109): NCBI GI NO: 7959355 NR Description: 60S ribosomal protein L27a [Panax ginseng]
  misc_feature (1)..(109): NCBI GI NO: 3608481 NR Description: ribosomal protein L27a [Petunia x hybrida]
  misc_feature (1)..(109): NCBI GI NO: 23237917 NR Description: putative 60S ribosomal protein L27a
  misc_feature (1)..(109): NCBI GI NO: 30017566 NR Description: putative ribosomal protein L27a
  misc_feature (1)..(109): NCBI GI NO: 22758850 NR Description: ribosomal protein L22 [Argopecten irradians]
  misc_feature (1)..(109): NCBI GI NO: 23612262 NR Description: 60S ribosomal protein L27a, putative
  misc_feature (1)..(109): NCBI GI NO: 132846 NR Description: 60S RIBOSOMAL PROTEIN L27A
MHHHRILFDKYHPGYFGKVGMRYFHKLRNKFFCPIVNLDKLWSLVPEDVKAKSSKDNVPLIDVTQHGFFKVLGKGHLPENKPFVVKAKLISKTAEKKIKEAGGAVVLTA

SEQ ID NO: 508 - DNA, 742 bp, Arabidopsis thaliana
  misc_feature (1)..(742): Ceres Seq. ID no. 12370138
aattaagatctctctttactgttttcccacttttcctttgagaaaactcaaaacaaagtaaacaaacaaaccagaaaaaggaatggcactgagaatgtgggcttcctctacagcaaatgctctcaagctctcttcttctgcctccaaatctcatctcttgccagctttctccatctccagatgcttctcctcagtgttggaaggacttaagtatgcaaattcacatgagtgggtgaaacatgaaggctcagttgctacaattggtatcactgaccatgcgcaggaccatttaggagaagttgtgtttgtggagctgcctgaagcaaacagttcagtgagcaaagaaaaaagctttggagctgttgagagtgttaaggccacaagtgagattctatctccaatctctggtgaagtcattgaggttaacacaaagctcaccgagtcacctggtttgatcaactcaagcccttatgaagatggttggatgataaaggtgaaaccgagcagccccgcggagttggaagctctgatgggtccaaaggaatacaccaagttctgcgaagaagaagacgctgctcactagggtttcttcgccttttatctttcccaaatgttcgaaaaacagagcaaaacaagagaatccatgctttagtttcaatctttcatttctcaatgtttcttaccactctcaacttgtatcagtgtgatactaatttgattaaaagatcatccaatgagacac

SEQ ID NO: 509 - protein, 166 aa, Arabidopsis thaliana
  peptide (1)..(166): Ceres Seq. ID no. 12370139
  misc_feature (42)..(162): Pfam Name: Pfam Description:  Glycine cleavage H-protein
  misc_feature (1)..(166): NCBI GI NO: 15223217 NR Description: glycine cleavage system H protein precursor
  misc_feature (1)..(166): NCBI GI NO: 15226973 NR Description: glycine decarboxylase complex H-protein
  misc_feature (1)..(166): NCBI GI NO: 121080 NR Description: Glycine cleavage system H protein
  misc_feature (1)..(166): NCBI GI NO: 2499417 NR Description: Glycine cleavage system H protein
  misc_feature (1)..(166): NCBI GI NO: 2147453 NR Description: glycine cleavage system protein H precursor
  misc_feature (1)..(166): NCBI GI NO: 2887286 NR Description: H protein [Flaveria anomala]
  misc_feature (1)..(166): NCBI GI NO: 1346118 NR Description: Glycine cleavage system H protein
  misc_feature (1)..(166): NCBI GI NO: 3688309 NR Description: H-Protein precursor [Flaveria pringlei]
  misc_feature (2)..(166): NCBI GI NO: 2119600 NR Description: glycine cleavage system protein H precursor
  misc_feature (1)..(165): NCBI GI NO: 1362140 NR Description: H-protein precursor - Flaveria trinervia
MALRMWASSTANALKLSSSASKSHLLPAFSISRCFSSVLEGLKYANSHEWVKHEGSVATIGITDHAQDHLGEVVFVELPEANSSVSKEKSFGAVESVKATSEILSPISGEVIEVNTKLTESPGLINSSPYEDGWMIKVKPSSPAELEALMGPKEYTKFCEEEDAAH

SEQ ID NO: 510 - protein, 162 aa, Arabidopsis thaliana
  peptide (1)..(162): Ceres Seq. ID no. 12370140
  misc_feature (38)..(158): Pfam Name: Pfam Description:  Glycine cleavage H-protein
  misc_feature (1)..(162): NCBI GI NO: 15223217 NR Description: glycine cleavage system H protein precursor
  misc_feature (1)..(162): NCBI GI NO: 15226973 NR Description: glycine decarboxylase complex H-protein
  misc_feature (1)..(162): NCBI GI NO: 121080 NR Description: Glycine cleavage system H protein
  misc_feature (1)..(162): NCBI GI NO: 2499417 NR Description: Glycine cleavage system H protein
  misc_feature (1)..(162): NCBI GI NO: 2147453 NR Description: glycine cleavage system protein H precursor
  misc_feature (1)..(162): NCBI GI NO: 2887286 NR Description: H protein [Flaveria anomala]
  misc_feature (1)..(162): NCBI GI NO: 1346118 NR Description: Glycine cleavage system H protein
  misc_feature (1)..(162): NCBI GI NO: 3688309 NR Description: H-Protein precursor [Flaveria pringlei]
  misc_feature (1)..(162): NCBI GI NO: 2119600 NR Description: glycine cleavage system protein H precursor
  misc_feature (1)..(161): NCBI GI NO: 1362140 NR Description: H-protein precursor - Flaveria trinervia
MWASSTANALKLSSSASKSHLLPAFSISRCFSSVLEGLKYANSHEWVKHEGSVATIGITDHAQDHLGEVVFVELPEANSSVSKEKSFGAVESVKATSEILSPISGEVIEVNTKLTESPGLINSSPYEDGWMIKVKPSSPAELEALMGPKEYTKFCEEEDAAH

SEQ ID NO: 511 - DNA, 826 bp, Arabidopsis thaliana
  misc_feature (1)..(826): Ceres Seq. ID no. 12332018
aattgtcttatctttcgacttttcttcttcttcttcttcttaagagatttttctccaagaaagttcgctccttttctctgttcttaacaaaaaagtctcggtttttttctctttgttttgggtactagcgtgatgtcttctgagaatgatttcgttgagttttcttctatgttcgagagaattatacaaggaagaggtgatggtctctctcgatttttgccggtgattgtagctttagccgccagaaagacgatgatgaccaaggatctaccgatcaaacaacgagacggggagatccgttgagtccaaggttcgtgatgatcggatcgcgatcgggactcgacgatttctttagcgacggtggaaaacaagggaggtcgccggcgttgaagtcagcggtggagaatatgccacgtgtcgtgatcggagaggataaggagaaaaatggtggttcttgcgcgatttgtttggatgagtggtctaaaggtgacgtggcggcggagatgccgtgtaaacataagtttcactcaaagtgtgtggaggagtggttagggaggcacgccacgtgtcctatgtgtaggtttgagatgcctgttgaagaagtggaagaagagaagaagatcgggatttggattggcttctccattaacgccggcgacagaagaaactaagaagacggaggaagaagaagttaaaagtgactcgaaccctcacgatgcaacatgggctaggtttaggtttaggcttaggtttgctagaagaatgttttgtatagcttcgttttcgtttactgaaatcaatttctaattcaataaaattggttgcc

SEQ ID NO: 512 - protein, 117 aa, Arabidopsis thaliana
  peptide (1)..(117): Ceres Seq. ID no. 12332019
  misc_feature (47)..(87): Pfam Name: RING finger Pfam Description: Zinc finger, C3HC4 type
  misc_feature (1)..(117): NCBI GI NO: 15223679 NR Description: unknown protein; protein id: At1g14200.1
  misc_feature (1)..(117): NCBI GI NO: 18396059 NR Description: expressed protein; protein id: At1g26800
  misc_feature (1)..(117): NCBI GI NO: 21554312 NR Description: unknown [Arabidopsis thaliana]
  misc_feature (14)..(116): NCBI GI NO: 34903272 NR Description: unnamed protein product
  misc_feature (1)..(116): NCBI GI NO: 34913258 NR Description: P0519E12.4
  misc_feature (13)..(117): NCBI GI NO: 7486783 NR Description: hypothetical protein M3E9
  misc_feature (13)..(117): NCBI GI NO: 22328949 NR Description: putative protein; protein id: At4g26400
  misc_feature (13)..(100): NCBI GI NO: 15241188 NR Description: putative protein; protein id: At5g56340
  misc_feature (16)..(115): NCBI GI NO: 15232595 NR Description: putative protein; protein id: At3g46620
  misc_feature (13)..(101): NCBI GI NO: 15231003 NR Description: unknown protein; protein id: At3g19950
MIGSRSGLDDFFSDGGKQGRSPALKSAVENMPRVVIGEDKEKNGGSCAICLDEWSKGDVAAEMPCKHKFHSKCVEEWLGRHATCPMCRFEMPVEEVEEEKKIGIWIGFSINAGDRRN

SEQ ID NO: 513 - protein, 87 aa, Arabidopsis thaliana
  peptide (1)..(87): Ceres Seq. ID no. 12332020
  misc_feature (17)..(57): Pfam Name: RING finger Pfam Description: Zinc finger, C3HC4 type
  misc_feature (1)..(87): NCBI GI NO: 15223679 NR Description: unknown protein; protein id: At1g14200.1
  misc_feature (1)..(87): NCBI GI NO: 18396059 NR Description: expressed protein; protein id: At1g26800
  misc_feature (1)..(87): NCBI GI NO: 21554312 NR Description: unknown [Arabidopsis thaliana]
  misc_feature (1)..(86): NCBI GI NO: 34903272 NR Description: unnamed protein product
  misc_feature (1)..(86): NCBI GI NO: 34913258 NR Description: P0519E12.4
  misc_feature (1)..(87): NCBI GI NO: 7486783 NR Description: hypothetical protein M3E9
  misc_feature (1)..(87): NCBI GI NO: 22328949 NR Description: putative protein; protein id: At4g26400
  misc_feature (1)..(70): NCBI GI NO: 15241188 NR Description: putative protein; protein id: At5g56340
  misc_feature (1)..(85): NCBI GI NO: 15232595 NR Description: putative protein; protein id: At3g46620
  misc_feature (1)..(71): NCBI GI NO: 15231003 NR Description: unknown protein; protein id: At3g19950
MPRVVIGEDKEKNGGSCAICLDEWSKGDVAAEMPCKHKFHSKCVEEWLGRHATCPMCRFEMPVEEVEEEKKIGIWIGFSINAGDRRN

SEQ ID NO: 514 - DNA, 1456 bp, Arabidopsis thaliana
  misc_feature (1)..(1456): Ceres Seq. ID no. 13495658
tggaatcactttagttatcaatcgatagaaacgcctttcaattaccaaacatcgaaaccaccatgagggttatctcaaaactgttcgattccgacagaagacgaatacccaaatcgccgaagcatttggattccggcgaaagcgccacgtcatcttcctcactcagcgacgtaaccaccggctcaagcagccttcatagcagtctctctctccaaacgcttccttcagttccctctcttcagaaaatcccatccaccaccgtcaccgtctctcactccgttacctcctcgtttaaactccgtgaacggagtcttcctgtaacttgtctcgccgtcaatggtggttacctcttcgccgtgtctggacacgaagtaagtatctacgatcgcgacatgtgtgctcatctcgacacattcaacggccaagatcctttctcaggaaccgtgaagtccgtcggcttctccggtgagaaaatcttcacggcgcatcaagacggtaaaatcggagtttggaaacttacggcgaaaagcggttataaacagttaacgacgcttcctactttaaacgaccgtttacgacgtttcgctcttcctaaaaactacgttcaagtacgccgtcataagaaacgtctctggatcgaacatgctgacgccgttactgctctcgccgttagtgacggattcatttactctgtttcttgggataagactttgaagatatggagagcctccgatcttcgttgcaaagaatcaatcaaagctcacgatgacgccgttaatgccattgccgtttctactaacggcaccgtttacactggatccgcggatagacgtatccgggtttgggccaaaccgaccggtgagaaacgtcacacgttagttgcgactttagagaagcacaaatcggcggttaacgcattagcattaaacgacgacggatcggttttgttctccggttcgtgtgaccggtctattttggtttgggagagagaggatacttccaattacatggcggtgagaggtgcgttgaggggacatgataaagcaatacttagcttgttcaacgtctctgatttgctactcagtggatcagctgatcggacggtcaggatttggcgacgtggacccgattctagttatagttgtttggaggttctttccggtcataccaagccggttaagtcgttggcggcggttagagaaaaggagttagacgatgtcgtttcgatcattagtggaagtcttgacggagaggttaaatgttggaaggtgtccgtcaccaaaccggataattcattttacacgaatctcgttcaataaattagtggcattaatttgttcttttgtcggtgtgttttatttatttgttagtactttagtattgttcggcgaacaaacaatttggcgtttttcagaagtcatttacacaaaatgagtaagaaataattgagcattat

SEQ ID NO: 515 - protein, 418 aa, Arabidopsis thaliana
  peptide (1)..(418): Ceres Seq. ID no. 13495659
  misc_feature (1)..(418): NCBI GI NO: 18395507 NR Description: transducin / WD-40 repeat protein family
  misc_feature (26)..(406): NCBI GI NO: 15221675 NR Description: transducin / WD-40 repeat protein family
  misc_feature (116)..(405): NCBI GI NO: 15240616 NR Description: transducin / WD-40 repeat protein family
  misc_feature (26)..(404): NCBI GI NO: 15225317 NR Description: transducin / WD-40 repeat protein family
  misc_feature (125)..(409): NCBI GI NO: 31126785 NR Description: putative WD repeat-protein
  misc_feature (86)..(404): NCBI GI NO: 15230244 NR Description: transducin / WD-40 repeat protein family
  misc_feature (86)..(404): NCBI GI NO: 15222143 NR Description: transducin / WD-40 repeat protein family
  misc_feature (86)..(404): NCBI GI NO: 17979259 NR Description: At1g49450/F13F21_11 [Arabidopsis thaliana]
  misc_feature (26)..(418): NCBI GI NO: 15231088 NR Description: transducin / WD-40 repeat protein family
  misc_feature (40)..(408): NCBI GI NO: 15229740 NR Description: transducin / WD-40 repeat protein family
MRVISKLFDSDRRRIPKSPKHLDSGESATSSSSLSDVTTGSSSLHSSLSLQTLPSVPSLQKIPSTTVTVSHSVTSSFKLRERSLPVTCLAVNGGYLFAVSGHEVSIYDRDMCAHLDTFNGQDPFSGTVKSVGFSGEKIFTAHQDGKIGVWKLTAKSGYKQLTTLPTLNDRLRRFALPKNYVQVRRHKKRLWIEHADAVTALAVSDGFIYSVSWDKTLKIWRASDLRCKESIKAHDDAVNAIAVSTNGTVYTGSADRRIRVWAKPTGEKRHTLVATLEKHKSAVNALALNDDGSVLFSGSCDRSILVWEREDTSNYMAVRGALRGHDKAILSLFNVSDLLLSGSADRTVRIWRRGPDSSYSCLEVLSGHTKPVKSLAAVREKELDDVVSIISGSLDGEVKCWKVSVTKPDNSFYTNLVQ

SEQ ID NO: 516 - protein, 308 aa, Arabidopsis thaliana
  peptide (1)..(308): Ceres Seq. ID no. 13495660
  misc_feature (1)..(308): NCBI GI NO: 18395507 NR Description: transducin / WD-40 repeat protein family
  misc_feature (1)..(296): NCBI GI NO: 15221675 NR Description: transducin / WD-40 repeat protein family
  misc_feature (6)..(295): NCBI GI NO: 15240616 NR Description: transducin / WD-40 repeat protein family
  misc_feature (1)..(294): NCBI GI NO: 15225317 NR Description: transducin / WD-40 repeat protein family
  misc_feature (15)..(299): NCBI GI NO: 31126785 NR Description: putative WD repeat-protein
  misc_feature (1)..(294): NCBI GI NO: 15230244 NR Description: transducin / WD-40 repeat protein family
  misc_feature (1)..(294): NCBI GI NO: 15222143 NR Description: transducin / WD-40 repeat protein family
  misc_feature (1)..(294): NCBI GI NO: 17979259 NR Description: At1g49450/F13F21_11 [Arabidopsis thaliana]
  misc_feature (1)..(308): NCBI GI NO: 15231088 NR Description: transducin / WD-40 repeat protein family
  misc_feature (1)..(298): NCBI GI NO: 15229740 NR Description: transducin / WD-40 repeat protein family
MCAHLDTFNGQDPFSGTVKSVGFSGEKIFTAHQDGKIGVWKLTAKSGYKQLTTLPTLNDRLRRFALPKNYVQVRRHKKRLWIEHADAVTALAVSDGFIYSVSWDKTLKIWRASDLRCKESIKAHDDAVNAIAVSTNGTVYTGSADRRIRVWAKPTGEKRHTLVATLEKHKSAVNALALNDDGSVLFSGSCDRSILVWEREDTSNYMAVRGALRGHDKAILSLFNVSDLLLSGSADRTVRIWRRGPDSSYSCLEVLSGHTKPVKSLAAVREKELDDVVSIISGSLDGEVKCWKVSVTKPDNSFYTNLVQ

SEQ ID NO: 517 - DNA, 1027 bp, Arabidopsis thaliana
  misc_feature (1)..(1027): Ceres Seq. ID no. 12421011
attcgtcttctccaattttctcgcgaagaaaactttcctactttgtttcaatccaaacgagtcaaaatgcttatcaagactgtttcttcatcttcttcttcagctctctcgctggtgaatttccatggcgtgaagaaggatgtgtctcctttgttaccttccatttcatcgaatcttcgagtttcttctggaaaatctggaaaattaactttctctgttcgcgcatctaaaagctcaaccaccgacgcgctaagcggcgttgtcttcgagccgtttaaggaagtaaaaaaggagctcgatctcgtccctaccagctctcatctctcactcgctcgacaaaagtactcagacgagtgcgaagccgccattaacgagcagatcaatgtggaatacaatgtctcgtatgtgtatcacgctatgtatgcttactttgatcgggataacatcgcgctcaaaggtcttgccaagttctttaaggaatcaagtctggaagaaagagagcatgctgagaagttaatggagtatcagaacaaacgtggtgggagggttaagttacagtccattgtaatgcctctttcagagtttgaacatgttgacaaaggagatgctctttatggcatggagcttgctctgtcactggagaaactagttaatgagaagctcttaaaccttcacagtgttgcttcgaggaacaatgatgtccacttggcagattttattgagagcgagtttctgacagagcaggtggaagcaatcaagttgatctcagaatatgtggctcaactgcgacgagttggcaaaggacacggaacatggcatttcaatcagatgcttctggaagggtaagcagcttcgagggactcttgtgtctactgtgtttctatatgaagctctcttagtgatatgtatggaactactttatgtttagttctttagcttttacgattttgtgaggtagtagacttctttttctgtaagagacaaaagacatgatcacataactttatattctggtataaggttcacc

SEQ ID NO: 518 - protein, 281 aa, Arabidopsis thaliana
  peptide (1)..(281): Ceres Seq. ID no. 12421012
  misc_feature (120)..(265): Pfam Name: Pfam Description:  Ferritin-like domain
  misc_feature (23)..(281): NCBI GI NO: 15225679 NR Description: putative ferritin; protein id: At2g40300
  misc_feature (32)..(281): NCBI GI NO: 15228818 NR Description: putative protein; protein id: At3g56090
  misc_feature (23)..(281): NCBI GI NO: 29839387 NR Description: Ferritin 3, chloroplast precursor (SFerH-3)
  misc_feature (35)..(280): NCBI GI NO: 29839345 NR Description: Ferritin 2, chloroplast precursor (NtFer2)
  misc_feature (23)..(281): NCBI GI NO: 29839287 NR Description: Ferritin 2, chloroplast precursor
  misc_feature (32)..(281): NCBI GI NO: 29839371 NR Description: Ferritin 1, chloroplast precursor (NtFer1)
  misc_feature (73)..(281): NCBI GI NO: 29839386 NR Description: Ferritin 4, chloroplast precursor (SFerH-4)
  misc_feature (32)..(279): NCBI GI NO: 21593905 NR Description: ferritin subunit, putative [Arabidopsis thaliana]
  misc_feature (32)..(279): NCBI GI NO: 15228431 NR Description: ferritin subunit, putative; protein id: At3g11050
  misc_feature (23)..(279): NCBI GI NO: 29839389 NR Description: Ferritin 1, chloroplast precursor
IRLLQFSREENFPTLFQSKRVKMLIKTVSSSSSSALSLVNFHGVKKDVSPLLPSISSNLRVSSGKSGKLTFSVRASKSSTTDALSGVVFEPFKEVKKELDLVPTSSHLSLARQKYSDECEAAINEQINVEYNVSYVYHAMYAYFDRDNIALKGLAKFFKESSLEEREHAEKLMEYQNKRGGRVKLQSIVMPLSEFEHVDKGDALYGMELALSLEKLVNEKLLNLHSVASRNNDVHLADFIESEFLTEQVEAIKLISEYVAQLRRVGKGHGTWHFNQMLLEG

SEQ ID NO: 519 - protein, 259 aa, Arabidopsis thaliana
  peptide (1)..(259): Ceres Seq. ID no. 12421013
  misc_feature (98)..(243): Pfam Name: Pfam Description:  Ferritin-like domain
  misc_feature (1)..(259): NCBI GI NO: 15225679 NR Description: putative ferritin; protein id: At2g40300
  misc_feature (10)..(259): NCBI GI NO: 15228818 NR Description: putative protein; protein id: At3g56090
  misc_feature (1)..(259): NCBI GI NO: 29839387 NR Description: Ferritin 3, chloroplast precursor (SFerH-3)
  misc_feature (13)..(258): NCBI GI NO: 29839345 NR Description: Ferritin 2, chloroplast precursor (NtFer2)
  misc_feature (1)..(259): NCBI GI NO: 29839287 NR Description: Ferritin 2, chloroplast precursor
  misc_feature (10)..(259): NCBI GI NO: 29839371 NR Description: Ferritin 1, chloroplast precursor (NtFer1)
  misc_feature (51)..(259): NCBI GI NO: 29839386 NR Description: Ferritin 4, chloroplast precursor (SFerH-4)
  misc_feature (10)..(257): NCBI GI NO: 21593905 NR Description: ferritin subunit, putative [Arabidopsis thaliana]
  misc_feature (10)..(257): NCBI GI NO: 15228431 NR Description: ferritin subunit, putative; protein id: At3g11050
  misc_feature (1)..(257): NCBI GI NO: 29839389 NR Description: Ferritin 1, chloroplast precursor
MLIKTVSSSSSSALSLVNFHGVKKDVSPLLPSISSNLRVSSGKSGKLTFSVRASKSSTTDALSGVVFEPFKEVKKELDLVPTSSHLSLARQKYSDECEAAINEQINVEYNVSYVYHAMYAYFDRDNIALKGLAKFFKESSLEEREHAEKLMEYQNKRGGRVKLQSIVMPLSEFEHVDKGDALYGMELALSLEKLVNEKLLNLHSVASRNNDVHLADFIESEFLTEQVEAIKLISEYVAQLRRVGKGHGTWHFNQMLLEG

SEQ ID NO: 520 - protein, 142 aa, Arabidopsis thaliana
  peptide (1)..(142): Ceres Seq. ID no. 12421014
  misc_feature (1)..(126): Pfam Name: Pfam Description:  Ferritin-like domain
  misc_feature (1)..(142): NCBI GI NO: 15225679 NR Description: putative ferritin; protein id: At2g40300
  misc_feature (1)..(142): NCBI GI NO: 15228818 NR Description: putative protein; protein id: At3g56090
  misc_feature (1)..(142): NCBI GI NO: 29839387 NR Description: Ferritin 3, chloroplast precursor (SFerH-3)
  misc_feature (1)..(141): NCBI GI NO: 29839345 NR Description: Ferritin 2, chloroplast precursor (NtFer2)
  misc_feature (1)..(142): NCBI GI NO: 29839287 NR Description: Ferritin 2, chloroplast precursor
  misc_feature (1)..(142): NCBI GI NO: 29839371 NR Description: Ferritin 1, chloroplast precursor (NtFer1)
  misc_feature (1)..(142): NCBI GI NO: 29839386 NR Description: Ferritin 4, chloroplast precursor (SFerH-4)
  misc_feature (1)..(140): NCBI GI NO: 21593905 NR Description: ferritin subunit, putative [Arabidopsis thaliana]
  misc_feature (1)..(140): NCBI GI NO: 15228431 NR Description: ferritin subunit, putative; protein id: At3g11050
  misc_feature (1)..(140): NCBI GI NO: 29839389 NR Description: Ferritin 1, chloroplast precursor
MYAYFDRDNIALKGLAKFFKESSLEEREHAEKLMEYQNKRGGRVKLQSIVMPLSEFEHVDKGDALYGMELALSLEKLVNEKLLNLHSVASRNNDVHLADFIESEFLTEQVEAIKLISEYVAQLRRVGKGHGTWHFNQMLLEG

SEQ ID NO: 521 - DNA, 1524 bp, Arabidopsis thaliana
  misc_feature (1)..(1524): Ceres Seq. ID no. 15174461
cattgggattaaactaacttctcattctcattccaccttcttcttctttgttcttgtgtgctactaaaaatcaagaaagcacaaggagacaaataaacctatccatttcattaccaaacaagccgtacattctctagttatggcttcttcttcttcttcttcttcttcttcaactacttcaaccatcacatccaaatttattgggcttatgcttcttctctctcttcaactagacttattactcggatcagctattcatcttaaaaaccaaacttcattcagacccaacagggagattcagaagcttagaagagtggaagcatatctcagcaaaatcaacaaaccttccatcaaaacaatccacagcccagacggagatgtaatagaatgtgtaccgtctcatttacaacccgcatttgatcatcctcagctacaaggccagaaaccacttgactcaccttacaggccaagtaaaggaaatgaaacaacatatgaggaaagttttaatcagttatggagtatgtccggtgaaagttgtccaattgggtcaataccaattagaaaaacaacaaagaatgatgttttaagggcaaattcaccggacatactccataactgattaaaactttcctcaaatattgattcgaaaggagcacaggatttggcgcgagccatcaaggattatcctaaccgtcgtggagacgttggatggttggattttgattacaacttaccaggagattgtctttcattcttgtattacaggcagagcagagagaataagaatccatcggatcagagaacctcgatgcttctacaagcattgggggttgcagaatcagaaaaggctaagaacaggttgaacacagagctatacggggacaaggaagcagagaaggagaaggagaagaagaagaaggaagaggaagtcaaagctattcggattccagtggtgaggcttaagtttggagaagtagcagaagcgacctcggtggtagttttaccggtttgtaaagcagaggaaggggaaaagaagattcttgaagctccaatggagatcatagccggaggggattttaaggtggttgaggcggagaaaggatggaagagatgggtagtgcttccgtcgtggaacccagtggcagccattgggaaaggcggtgtggcggtttctttcagggatgatagaaaagtgctgccttgggatggaaaggaggagcctttactggtagtggccgatagggtgaggaatgttgtggaggctgatgacgggtattatctcgtggtggctgagaacggacttaagctagagaaaggatcagatttgaaggcgagagaggtgaaggagagtttagggatggttgttttggtggtgaggccgccaagagaagatgatgatgattggcagacaagtcatcagaactgggactgaattaatagaatcaatactcatatgctgtaactgattacggagtcatcatggtcatgtaaaatttttggataaaggtggtaactttttgttct

SEQ ID NO: 522 - protein, 207 aa, Arabidopsis thaliana
  peptide (1)..(207): Ceres Seq. ID no. 15174462
  misc_feature (1)..(207): NCBI GI NO: 18396920 NR Description: expressed protein [Arabidopsis thaliana]
  misc_feature (1)..(207): NCBI GI NO: 15241839 NR Description: expressed protein [Arabidopsis thaliana]
  misc_feature (1)..(207): NCBI GI NO: 37534826 NR Description: unknown protein
  misc_feature (1)..(25): NCBI GI NO: 15239542 NR Description: hypothetical protein [Arabidopsis thaliana]
MLLQALGVAESEKAKNRLNTELYGDKEAEKEKEKKKKEEEVKAIRIPVVRLKFGEVAEATSVVVLPVCKAEEGEKKILEAPMEIIAGGDFKVVEAEKGWKRWVVLPSWNPVAAIGKGGVAVSFRDDRKVLPWDGKEEPLLVVADRVRNVVEADDGYYLVVAENGLKLEKGSDLKAREVKESLGMVVLVVRPPREDDDDWQTSHQNWD

SEQ ID NO: 523 - protein, 159 aa, Arabidopsis thaliana
  peptide (1)..(159): Ceres Seq. ID no. 15174463
  misc_feature (4)..(159): NCBI GI NO: 15240622 NR Description: expressed protein [Arabidopsis thaliana]
  misc_feature (1)..(153): NCBI GI NO: 21389708 NR Description: putative carboxyl-terminal proteinase
  misc_feature (15)..(153): NCBI GI NO: 15220207 NR Description: expressed protein [Arabidopsis thaliana]
  misc_feature (13)..(153): NCBI GI NO: 25345695 NR Description: protein F26F24.22
  misc_feature (13)..(153): NCBI GI NO: 30688348 NR Description: expressed protein [Arabidopsis thaliana]
  misc_feature (4)..(153): NCBI GI NO: 30698726 NR Description: expressed protein [Arabidopsis thaliana]
  misc_feature (17)..(153): NCBI GI NO: 25345697 NR Description: unknown protein F5A18.27
  misc_feature (17)..(153): NCBI GI NO: 28416687 NR Description: At1g70550 [Arabidopsis thaliana]
  misc_feature (9)..(153): NCBI GI NO: 34913794 NR Description: OSJNBa0026J14.25
  misc_feature (15)..(104): NCBI GI NO: 6573746 NR Description: F20B24.18 [Arabidopsis thaliana]
MASSSSSSSSSTTSTITSKFIGLMLLLSLQLDLLLGSAIHLKNQTSFRPNREIQKLRRVEAYLSKINKPSIKTIHSPDGDVIECVPSHLQPAFDHPQLQGQKPLDSPYRPSKGNETTYEESFNQLWSMSGESCPIGSIPIRKTTKNDVLRANSPDILHN

SEQ ID NO: 524 - protein, 136 aa, Arabidopsis thaliana
  peptide (1)..(136): Ceres Seq. ID no. 15174464
  misc_feature (1)..(136): NCBI GI NO: 15240622 NR Description: expressed protein [Arabidopsis thaliana]
  misc_feature (1)..(130): NCBI GI NO: 21389708 NR Description: putative carboxyl-terminal proteinase
  misc_feature (1)..(130): NCBI GI NO: 15220207 NR Description: expressed protein [Arabidopsis thaliana]
  misc_feature (1)..(130): NCBI GI NO: 25345695 NR Description: protein F26F24.22
  misc_feature (1)..(130): NCBI GI NO: 30688348 NR Description: expressed protein [Arabidopsis thaliana]
  misc_feature (1)..(130): NCBI GI NO: 30698726 NR Description: expressed protein [Arabidopsis thaliana]
  misc_feature (1)..(130): NCBI GI NO: 25345697 NR Description: unknown protein F5A18.27
  misc_feature (1)..(130): NCBI GI NO: 28416687 NR Description: At1g70550 [Arabidopsis thaliana]
  misc_feature (1)..(130): NCBI GI NO: 34913794 NR Description: OSJNBa0026J14.25
  misc_feature (1)..(81): NCBI GI NO: 6573746 NR Description: F20B24.18 [Arabidopsis thaliana]
MLLLSLQLDLLLGSAIHLKNQTSFRPNREIQKLRRVEAYLSKINKPSIKTIHSPDGDVIECVPSHLQPAFDHPQLQGQKPLDSPYRPSKGNETTYEESFNQLWSMSGESCPIGSIPIRKTTKNDVLRANSPDILHN

SEQ ID NO: 525 - DNA, 732 bp, Arabidopsis thaliana
  misc_feature (1)..(732): Ceres Seq. ID no. 13497746
aaaaggtaaactcggtaacgaaatcagaattcgtcgaagaagaaaaagaagatcaatgacgttgaagaagcttgacgcgaatccatcgaccttagaatcgattttacaggaactgaaatcagacgagacaaatcgtagcaagatcaatttcatactcttcctcgccgacaatgatcccaccaccggtcaaagctggtgtccagactgtgttagagctgaacctgtgatttacaagactctagaggaatttccagaggaggtgaatctaattcgtgcttacgccggagaccgaccgacgtggcggactccggcgcatccttggagagttgattctcggtttaagctaaccggagtaccaactcttgttcgttgggatggtgactctgttaaaggacgtcttgaagatcatcaagctcaccttcctcacttgattcttccccttcttgcaccatccacttgatttgatcgatatcgatttctcgggactatcgtgggattgaggatcaaatatcttatatatatttctagttgtgaattgttttccaataaatcctttacaatggtaaaggaaagtttgtttcttcgatgatctttacgatttcgtgctcaatgtagtgttatttctctaataaattacggtgatattagccgaattctagactctggactcgagatttcgacttatatttggttttgaagttatagttgtgataaaactacgagatttgattg

SEQ ID NO: 526 - protein, 152 aa, Arabidopsis thaliana
  peptide (1)..(152): Ceres Seq. ID no. 15223017
  misc_feature (19)..(150): Pfam Name: DUF953 Pfam Description: Eukaryotic protein of unknown function
  misc_feature (19)..(152): NCBI GI NO: 21592399 NR Description: unknown [Arabidopsis thaliana]
  misc_feature (19)..(152): NCBI GI NO: 18422261 NR Description: expressed protein [Arabidopsis thaliana]
  misc_feature (32)..(144): NCBI GI NO: 17556458 NR Description: Putative cytoplasmic protein of eukaryotic origin
  misc_feature (39)..(144): NCBI GI NO: 27673864 NR Description: similar to hypothetical protein D11Ertd672e
  misc_feature (39)..(124): NCBI GI NO: 12835324 NR Description: unnamed protein product [Mus musculus]
  misc_feature (39)..(124): NCBI GI NO: 15216179 NR Description: putative 42-9-9 protein [Mus musculus]
  misc_feature (39)..(124): NCBI GI NO: 13386060 NR Description: hypothetical protein D11Ertd672e
  misc_feature (20)..(122): NCBI GI NO: 39585269 NR Description: Hypothetical protein CBG00487
  misc_feature (42)..(144): NCBI GI NO: 14249348 NR Description: hypothetical protein MGC14353 [Homo sapiens]
  misc_feature (27)..(124): NCBI GI NO: 38048627 NR Description: similar to Drosophila melanogaster CG11024
KGKLGNEIRIRRRRKRRSMTLKKLDANPSTLESILQELKSDETNRSKINFILFLADNDPTTGQSWCPDCVRAEPVIYKTLEEFPEEVNLIRAYAGDRPTWRTPAHPWRVDSRFKLTGVPTLVRWDGDSVKGRLEDHQAHLPHLILPLLAPST

SEQ ID NO: 527 - protein, 134 aa, Arabidopsis thaliana
  peptide (1)..(134): Ceres Seq. ID no. 15223018
  misc_feature (1)..(132): Pfam Name: DUF953 Pfam Description: Eukaryotic protein of unknown function
  misc_feature (1)..(134): NCBI GI NO: 21592399 NR Description: unknown [Arabidopsis thaliana]
  misc_feature (1)..(134): NCBI GI NO: 18422261 NR Description: expressed protein [Arabidopsis thaliana]
  misc_feature (14)..(126): NCBI GI NO: 17556458 NR Description: Putative cytoplasmic protein of eukaryotic origin
  misc_feature (21)..(126): NCBI GI NO: 27673864 NR Description: similar to hypothetical protein D11Ertd672e
  misc_feature (21)..(106): NCBI GI NO: 12835324 NR Description: unnamed protein product [Mus musculus]
  misc_feature (21)..(106): NCBI GI NO: 15216179 NR Description: putative 42-9-9 protein [Mus musculus]
  misc_feature (21)..(106): NCBI GI NO: 13386060 NR Description: hypothetical protein D11Ertd672e
  misc_feature (2)..(104): NCBI GI NO: 39585269 NR Description: Hypothetical protein CBG00487
  misc_feature (24)..(126): NCBI GI NO: 14249348 NR Description: hypothetical protein MGC14353 [Homo sapiens]
  misc_feature (9)..(106): NCBI GI NO: 38048627 NR Description: similar to Drosophila melanogaster CG11024
MTLKKLDANPSTLESILQELKSDETNRSKINFILFLADNDPTTGQSWCPDCVRAEPVIYKTLEEFPEEVNLIRAYAGDRPTWRTPAHPWRVDSRFKLTGVPTLVRWDGDSVKGRLEDHQAHLPHLILPLLAPST

SEQ ID NO: 528 - DNA, 1331 bp, Arabidopsis thaliana
  misc_feature (1)..(1331): Ceres Seq. ID no. 13487073
attacaacaaactctttgagacctaaagagagagagagcgatagtgagatttagatcaacagatttgaatcgatttctgaaaacatgcagtacaagaatctggggaaatcgggtttaaaagtgagcacgctctcgttcggagcgtgggttacgttcgggaaccagctcgatgtgaaagaagcgaaatcgattcttcagtgttgtcgtgatcatggagtcaatttcttcgataacgctgaggtttacgctaatggtcgcgctgaggagattatgggtcaagcgattcgtgaactgggttggcgtcgatccgatatcgtcatctctaccaagatcttctggggtggtcctggtcctaacgataagggtttatctaggaaacatatcgttgaaggcactaaagcttctctcaaacgacttgatatggattacgttgatgtgctctattgccacaggccggatgcttcaactcctatcgaagagactgtgagggcgatgaactacgtgattgataagggttgggccttctattggggaaccagtgaatggtcagctcaacaaattacggaggcatggggagctgctgaccggttggatttggttggtccaattgtcgaacagccagaatacaacatgttcgctaggcacaaagttgagacagagtttcttcctctgtacaccaaccatggtataggtctcactacctggagcccacttgcatctggtgtgctcactggtaaatacaacaagggagctattccctcagacagccgatttgcattggagaactacaaaaaccttgccaatagatcacttgtggatgacgtgctgaggaaagttagcggtctcaaacccattgcagatgagctaggtgtaaccttggctcagcttgcaatcgcatggtgtgcttcaaatcctaatgtgtcatctgttatcactggtgccacaagggagtcacagattcaagaaaatatgaaagctgttgatgtgatcccattgttgacccctattgttctggacaagattgagcaagtgatacagagcaaaccaaaacgtcctgaatcatataggtaaaaccaacatccaagatctctcttccctattcaatcgtttacaaaagagtgttgcaggaaaaagaaaacattagaagaagctctgtgatgtatgttgttggatgttgtctcgttttcgctttgtttgttctctttagcagcttatgcatttttaagactcagacagagagaaagagagactaatgtttttttttagtttttcttgtttcatcatttaaaaaacggtcttatttgttacttgttagtgcaacttaaagtttg

SEQ ID NO: 529 - protein, 328 aa, Arabidopsis thaliana
  peptide (1)..(328): Ceres Seq. ID no. 13487074
  misc_feature (1)..(328): NCBI GI NO: 15219795 NR Description: potassium channel protein, putative
  misc_feature (1)..(328): NCBI GI NO: 1063415 NR Description: K+ channel protein
  misc_feature (1)..(328): NCBI GI NO: 7447934 NR Description: probable potassium channel beta chain KB1 - potato
  misc_feature (1)..(328): NCBI GI NO: 2832783 NR Description: potassium channel beta subunit [Egeria densa]
  misc_feature (1)..(328): NCBI GI NO: 7447935 NR Description: probable potassium channel beta chain - rice
  misc_feature (1)..(322): NCBI GI NO: 23394348 NR Description: K+ channel protein [Phytophthora infestans]
  misc_feature (1)..(317): NCBI GI NO: 22987410 NR Description: hypothetical protein [Burkholderia fungorum]
  misc_feature (1)..(317): NCBI GI NO: 15643082 NR Description: K+ channel, beta subunit [Thermotoga maritima]
  misc_feature (1)..(328): NCBI GI NO: 7914982 NR Description: potassium channel Kv beta 2.1 subunit
  misc_feature (1)..(328): NCBI GI NO: 7914984 NR Description: potassium channel Kv beta 2.2 subunit
MQYKNLGKSGLKVSTLSFGAWVTFGNQLDVKEAKSILQCCRDHGVNFFDNAEVYANGRAEEIMGQAIRELGWRRSDIVISTKIFWGGPGPNDKGLSRKHIVEGTKASLKRLDMDYVDVLYCHRPDASTPIEETVRAMNYVIDKGWAFYWGTSEWSAQQITEAWGAADRLDLVGPIVEQPEYNMFARHKVETEFLPLYTNHGIGLTTWSPLASGVLTGKYNKGAIPSDSRFALENYKNLANRSLVDDVLRKVSGLKPIADELGVTLAQLAIAWCASNPNVSSVITGATRESQIQENMKAVDVIPLLTPIVLDKIEQVIQSKPKRPESYR

SEQ ID NO: 530 - protein, 266 aa, Arabidopsis thaliana
  peptide (1)..(266): Ceres Seq. ID no. 13487075
  misc_feature (1)..(266): NCBI GI NO: 15219795 NR Description: potassium channel protein, putative
  misc_feature (1)..(266): NCBI GI NO: 1063415 NR Description: K+ channel protein
  misc_feature (1)..(266): NCBI GI NO: 7447934 NR Description: probable potassium channel beta chain KB1 - potato
  misc_feature (1)..(266): NCBI GI NO: 2832783 NR Description: potassium channel beta subunit [Egeria densa]
  misc_feature (1)..(266): NCBI GI NO: 7447935 NR Description: probable potassium channel beta chain - rice
  misc_feature (1)..(260): NCBI GI NO: 23394348 NR Description: K+ channel protein [Phytophthora infestans]
  misc_feature (1)..(255): NCBI GI NO: 22987410 NR Description: hypothetical protein [Burkholderia fungorum]
  misc_feature (1)..(255): NCBI GI NO: 15643082 NR Description: K+ channel, beta subunit [Thermotoga maritima]
  misc_feature (1)..(266): NCBI GI NO: 7914982 NR Description: potassium channel Kv beta 2.1 subunit
  misc_feature (1)..(266): NCBI GI NO: 7914984 NR Description: potassium channel Kv beta 2.2 subunit
MGQAIRELGWRRSDIVISTKIFWGGPGPNDKGLSRKHIVEGTKASLKRLDMDYVDVLYCHRPDASTPIEETVRAMNYVIDKGWAFYWGTSEWSAQQITEAWGAADRLDLVGPIVEQPEYNMFARHKVETEFLPLYTNHGIGLTTWSPLASGVLTGKYNKGAIPSDSRFALENYKNLANRSLVDDVLRKVSGLKPIADELGVTLAQLAIAWCASNPNVSSVITGATRESQIQENMKAVDVIPLLTPIVLDKIEQVIQSKPKRPESYR

SEQ ID NO: 531 - protein, 216 aa, Arabidopsis thaliana
  peptide (1)..(216): Ceres Seq. ID no. 13487076
  misc_feature (1)..(216): NCBI GI NO: 15219795 NR Description: potassium channel protein, putative
  misc_feature (1)..(216): NCBI GI NO: 1063415 NR Description: K+ channel protein
  misc_feature (1)..(216): NCBI GI NO: 7447934 NR Description: probable potassium channel beta chain KB1 - potato
  misc_feature (1)..(216): NCBI GI NO: 2832783 NR Description: potassium channel beta subunit [Egeria densa]
  misc_feature (1)..(216): NCBI GI NO: 7447935 NR Description: probable potassium channel beta chain - rice
  misc_feature (1)..(210): NCBI GI NO: 23394348 NR Description: K+ channel protein [Phytophthora infestans]
  misc_feature (1)..(205): NCBI GI NO: 22987410 NR Description: hypothetical protein [Burkholderia fungorum]
  misc_feature (1)..(205): NCBI GI NO: 15643082 NR Description: K+ channel, beta subunit [Thermotoga maritima]
  misc_feature (1)..(216): NCBI GI NO: 7914982 NR Description: potassium channel Kv beta 2.1 subunit
  misc_feature (1)..(216): NCBI GI NO: 7914984 NR Description: potassium channel Kv beta 2.2 subunit
MDYVDVLYCHRPDASTPIEETVRAMNYVIDKGWAFYWGTSEWSAQQITEAWGAADRLDLVGPIVEQPEYNMFARHKVETEFLPLYTNHGIGLTTWSPLASGVLTGKYNKGAIPSDSRFALENYKNLANRSLVDDVLRKVSGLKPIADELGVTLAQLAIAWCASNPNVSSVITGATRESQIQENMKAVDVIPLLTPIVLDKIEQVIQSKPKRPESYR

SEQ ID NO: 532 - DNA, 692 bp, Arabidopsis thaliana
  misc_feature (1)..(692): Ceres Seq. ID no. 12322747
gatcacaaattcagaagaaaagaacagagaaaacagaggaagaggtgagatggaggaacttgtagggcttctgagaatccgagtgaagagagggatcaatcttgctcagcgagacactctaagcagcgacccttttgttgtcataaccatgggatcacagaagctgaagactcgtgttgtggaaaataactgcaaccctgagtggaacgaggaattaacccttgcgttaagacatcccgatgaacctgtgaatctgatagtgtatgataaagatacattcacatcgcacgacaagatgggagatgcaaagatagatattaaaccatttctggaggttcacaaaatgggtttgcaagaacttccagatggaacagagatcaagagagttgtgcccaacagagaaaactgtttggctgaagcgagcagtatcgtctccaataatggcaaaatcgttcagaacatgattcttctgttgaggaatgtcgaatgcggtgaggtcgagattcagcttgaatggattgatattccaggttctagagggctttgaacatatctctttctgtgtgtaataaaaaaaaaactcagttcgttttgggtttttagacaaaagtcacaataagtagaacagagtactactctgttttgtaattgaaatatttggttttagcacctaacctaaatcgttttggttt

SEQ ID NO: 533 - protein, 181 aa, Arabidopsis thaliana
  peptide (1)..(181): Ceres Seq. ID no. 12322748
  misc_feature (24)..(103): Pfam Name: Pfam Description:  C2 domain
  misc_feature (17)..(181): NCBI GI NO: 18409682 NR Description: expressed protein; protein id: At1g70810
  misc_feature (17)..(181): NCBI GI NO: 13430460 NR Description: unknown protein [Arabidopsis thaliana]
  misc_feature (16)..(181): NCBI GI NO: 15223248 NR Description: unknown protein; protein id: At1g70800.1
  misc_feature (17)..(178): NCBI GI NO: 15220022 NR Description: unknown protein; protein id: At1g23140.1
  misc_feature (17)..(181): NCBI GI NO: 18409675 NR Description: zinc finger and C2 domain protein, putative
  misc_feature (6)..(181): NCBI GI NO: 15221907 NR Description: unknown protein; protein id: At1g48590.1
  misc_feature (6)..(181): NCBI GI NO: 25405940 NR Description: protein T1N15.21 [imported] - Arabidopsis thaliana
  misc_feature (17)..(181): NCBI GI NO: 15240322 NR Description: putative protein; protein id: At5g37740
  misc_feature (17)..(181): NCBI GI NO: 30684739 NR Description: C2 domain-containing protein
  misc_feature (17)..(176): NCBI GI NO: 34899392 NR Description: putative chitinase III
ITNSEEKNRENRGRGEMEELVGLLRIRVKRGINLAQRDTLSSDPFVVITMGSQKLKTRVVENNCNPEWNEELTLALRHPDEPVNLIVYDKDTFTSHDKMGDAKIDIKPFLEVHKMGLQELPDGTEIKRVVPNRENCLAEASSIVSNNGKIVQNMILLLRNVECGEVEIQLEWIDIPGSRGL

SEQ ID NO: 534 - protein, 165 aa, Arabidopsis thaliana
  peptide (1)..(165): Ceres Seq. ID no. 12322749
  misc_feature (8)..(87): Pfam Name: Pfam Description:  C2 domain
  misc_feature (1)..(165): NCBI GI NO: 18409682 NR Description: expressed protein; protein id: At1g70810
  misc_feature (1)..(165): NCBI GI NO: 13430460 NR Description: unknown protein [Arabidopsis thaliana]
  misc_feature (1)..(165): NCBI GI NO: 15223248 NR Description: unknown protein; protein id: At1g70800.1
  misc_feature (1)..(162): NCBI GI NO: 15220022 NR Description: unknown protein; protein id: At1g23140.1
  misc_feature (1)..(165): NCBI GI NO: 18409675 NR Description: zinc finger and C2 domain protein, putative
  misc_feature (1)..(165): NCBI GI NO: 15221907 NR Description: unknown protein; protein id: At1g48590.1
  misc_feature (1)..(165): NCBI GI NO: 25405940 NR Description: protein T1N15.21 [imported] - Arabidopsis thaliana
  misc_feature (1)..(165): NCBI GI NO: 15240322 NR Description: putative protein; protein id: At5g37740
  misc_feature (1)..(165): NCBI GI NO: 30684739 NR Description: C2 domain-containing protein
  misc_feature (1)..(160): NCBI GI NO: 34899392 NR Description: putative chitinase III
MEELVGLLRIRVKRGINLAQRDTLSSDPFVVITMGSQKLKTRVVENNCNPEWNEELTLALRHPDEPVNLIVYDKDTFTSHDKMGDAKIDIKPFLEVHKMGLQELPDGTEIKRVVPNRENCLAEASSIVSNNGKIVQNMILLLRNVECGEVEIQLEWIDIPGSRGL

SEQ ID NO: 535 - protein, 132 aa, Arabidopsis thaliana
  peptide (1)..(132): Ceres Seq. ID no. 12322750
  misc_feature (1)..(54): Pfam Name: Pfam Description:  C2 domain
  misc_feature (1)..(132): NCBI GI NO: 18409682 NR Description: expressed protein; protein id: At1g70810
  misc_feature (1)..(132): NCBI GI NO: 13430460 NR Description: unknown protein [Arabidopsis thaliana]
  misc_feature (1)..(132): NCBI GI NO: 15223248 NR Description: unknown protein; protein id: At1g70800.1
  misc_feature (1)..(129): NCBI GI NO: 15220022 NR Description: unknown protein; protein id: At1g23140.1
  misc_feature (1)..(132): NCBI GI NO: 18409675 NR Description: zinc finger and C2 domain protein, putative
  misc_feature (1)..(132): NCBI GI NO: 15221907 NR Description: unknown protein; protein id: At1g48590.1
  misc_feature (1)..(132): NCBI GI NO: 25405940 NR Description: protein T1N15.21 [imported] - Arabidopsis thaliana
  misc_feature (1)..(132): NCBI GI NO: 15240322 NR Description: putative protein; protein id: At5g37740
  misc_feature (1)..(132): NCBI GI NO: 30684739 NR Description: C2 domain-containing protein
  misc_feature (1)..(127): NCBI GI NO: 34899392 NR Description: putative chitinase III
MGSQKLKTRVVENNCNPEWNEELTLALRHPDEPVNLIVYDKDTFTSHDKMGDAKIDIKPFLEVHKMGLQELPDGTEIKRVVPNRENCLAEASSIVSNNGKIVQNMILLLRNVECGEVEIQLEWIDIPGSRGL

SEQ ID NO: 536 - DNA, 1065 bp, Arabidopsis thaliana
  misc_feature (1)..(1065): Ceres Seq. ID no. 12371318
attttttccaaaaaaataaaaaacagaaaaaattcgtggaaacgccattaacgagatctagcacaaactcgtagtgtggtgtagaagaagacaaaagcaaggagcttcataataaaaccctagagatatttgtttctccaatttcaaaagacgagacgtgaagaagacgatcgaagatgaacattttcagattagctggtgatatgactcacctagccagtgttcttgtcttgcttctcaagatccacaccatcaaatcctgcgctggtgtttcattgaagactcaagaactctatgccattgtctttgcgacgcgttatttggatattttcacgagttttgtgtctctgtacaacacctctatgaagttggtgtttttaggaagttctttttcgattgtgtggtacatgaagtatcataaggccgtccacaggacttacgacagagagcaagatacgtttcgtcattggttccttgtgcttccttgctttctcttagctcttttgatacatgaaaagtttacctttcttgaggtattgtggacgtcttcattgtacttggaggctgttgccatattacctcagcttgtcttgttgcaaaggactagaaatattgacaacttgaccggacaatatatatttctccttggggggtaccgtggattatacatcctcaactggatctaccgttacttcactgagccgcactttgttcactggataacatggatcgccgggtttgttcaaacactgctctatgccgacttcttctattattatttcctaagctggaagaacaacaaaaagctccaattaccagcttaatttctaaagtttcaatgctcgggaaccctacggattcgatttggtgcccgacaaaacatctaccggaatgttaccaatttactctgttggtggttattagaggagaacgagcatagatgtgtaaactccagcaatctaacttattacactttctttagactttctcgtctctcatcttttttttggtcgacttagtgttactaaatatttcgacgcgacagtaatatattcaccacaattc

SEQ ID NO: 537 - protein, 215 aa, Arabidopsis thaliana
  peptide (1)..(215): Ceres Seq. ID no. 12371319
  misc_feature (1)..(205): Pfam Name: Pfam Description:  ER lumen protein retaining receptor
  misc_feature (1)..(215): NCBI GI NO: 18404390 NR Description: ER lumen retaining receptor
  misc_feature (1)..(215): NCBI GI NO: 21592401 NR Description: ER lumen retaining receptor
  misc_feature (1)..(215): NCBI GI NO: 9293986 NR Description: ER lumen protein-retaining receptor-like protein
  misc_feature (1)..(215): NCBI GI NO: 6685428 NR Description: ER lumen protein retaining receptor
  misc_feature (1)..(214): NCBI GI NO: 21743051 NR Description: OSJNBa0083D01.1
  misc_feature (1)..(215): NCBI GI NO: 14285310 NR Description: ERD2 protein [Scherffelia dubia]
  misc_feature (1)..(215): NCBI GI NO: 18397049 NR Description: ER lumen protein retaining receptor
  misc_feature (1)..(215): NCBI GI NO: 31196307 NR Description: ENSANGP00000012108 [Anopheles gambiae]
  misc_feature (1)..(215): NCBI GI NO: 17137442 NR Description: KDEL receptor CG5183-PA [Drosophila melanogaster]
  misc_feature (1)..(214): NCBI GI NO: 22656361 NR Description: endoplasmic reticulum retention receptor
MNIFRLAGDMTHLASVLVLLLKIHTIKSCAGVSLKTQELYAIVFATRYLDIFTSFVSLYNTSMKLVFLGSSFSIVWYMKYHKAVHRTYDREQDTFRHWFLVLPCFLLALLIHEKFTFLEVLWTSSLYLEAVAILPQLVLLQRTRNIDNLTGQYIFLLGGYRGLYILNWIYRYFTEPHFVHWITWIAGFVQTLLYADFFYYYFLSWKNNKKLQLPA

SEQ ID NO: 538 - protein, 206 aa, Arabidopsis thaliana
  peptide (1)..(206): Ceres Seq. ID no. 12371320
  misc_feature (1)..(196): Pfam Name: Pfam Description:  ER lumen protein retaining receptor
  misc_feature (1)..(206): NCBI GI NO: 18404390 NR Description: ER lumen retaining receptor
  misc_feature (1)..(206): NCBI GI NO: 21592401 NR Description: ER lumen retaining receptor
  misc_feature (1)..(206): NCBI GI NO: 9293986 NR Description: ER lumen protein-retaining receptor-like protein
  misc_feature (1)..(206): NCBI GI NO: 6685428 NR Description: ER lumen protein retaining receptor
  misc_feature (1)..(205): NCBI GI NO: 21743051 NR Description: OSJNBa0083D01.1
  misc_feature (1)..(206): NCBI GI NO: 14285310 NR Description: ERD2 protein [Scherffelia dubia]
  misc_feature (1)..(206): NCBI GI NO: 18397049 NR Description: ER lumen protein retaining receptor
  misc_feature (1)..(206): NCBI GI NO: 31196307 NR Description: ENSANGP00000012108 [Anopheles gambiae]
  misc_feature (1)..(206): NCBI GI NO: 17137442 NR Description: KDEL receptor CG5183-PA [Drosophila melanogaster]
  misc_feature (1)..(205): NCBI GI NO: 22656361 NR Description: endoplasmic reticulum retention receptor
MTHLASVLVLLLKIHTIKSCAGVSLKTQELYAIVFATRYLDIFTSFVSLYNTSMKLVFLGSSFSIVWYMKYHKAVHRTYDREQDTFRHWFLVLPCFLLALLIHEKFTFLEVLWTSSLYLEAVAILPQLVLLQRTRNIDNLTGQYIFLLGGYRGLYILNWIYRYFTEPHFVHWITWIAGFVQTLLYADFFYYYFLSWKNNKKLQLPA

SEQ ID NO: 539 - protein, 153 aa, Arabidopsis thaliana
  peptide (1)..(153): Ceres Seq. ID no. 12371321
  misc_feature (1)..(143): Pfam Name: Pfam Description:  ER lumen protein retaining receptor
  misc_feature (1)..(153): NCBI GI NO: 18404390 NR Description: ER lumen retaining receptor
  misc_feature (1)..(153): NCBI GI NO: 21592401 NR Description: ER lumen retaining receptor
  misc_feature (1)..(153): NCBI GI NO: 9293986 NR Description: ER lumen protein-retaining receptor-like protein
  misc_feature (1)..(153): NCBI GI NO: 6685428 NR Description: ER lumen protein retaining receptor
  misc_feature (1)..(152): NCBI GI NO: 21743051 NR Description: OSJNBa0083D01.1
  misc_feature (1)..(153): NCBI GI NO: 14285310 NR Description: ERD2 protein [Scherffelia dubia]
  misc_feature (1)..(153): NCBI GI NO: 18397049 NR Description: ER lumen protein retaining receptor
  misc_feature (1)..(153): NCBI GI NO: 31196307 NR Description: ENSANGP00000012108 [Anopheles gambiae]
  misc_feature (1)..(153): NCBI GI NO: 17137442 NR Description: KDEL receptor CG5183-PA [Drosophila melanogaster]
  misc_feature (1)..(152): NCBI GI NO: 22656361 NR Description: endoplasmic reticulum retention receptor
MKLVFLGSSFSIVWYMKYHKAVHRTYDREQDTFRHWFLVLPCFLLALLIHEKFTFLEVLWTSSLYLEAVAILPQLVLLQRTRNIDNLTGQYIFLLGGYRGLYILNWIYRYFTEPHFVHWITWIAGFVQTLLYADFFYYYFLSWKNNKKLQLPA

SEQ ID NO: 540 - DNA, 1229 bp, Arabidopsis thaliana
  misc_feature (1)..(1229): Ceres Seq. ID no. 12385455
gattacaatcttgagcagacgaagaaaacccaaaaaaaatccagatccagctgaaattgaattttcaaccaacgaagaagagatttttccaagagcaacagacaagaagaagagaatgaagtcggagctaaatttaccagctgggttccgattccatccaacggacgaggagcttgtgaaattctacttgtgccggaaatgtgcttccgagcagatctcggctccggttatcgccgagattgatctctacaagttcaatccttgggagcttccagagatgtctctgtacggagagaaagagtggtacttcttctcacctagagatcggaaatacccaaacggttcgcgtcctaaccgggcagcaggaaccggttattggaaagctaccggagcagataaaccgattggtaaaccgaagacgttgggtatcaagaaagcactcgtcttctacgcagggaaagctccaaaagggattaagaccaattggataatgcatgagtatcgtctcgctaatgttgatagatcagcttctgttaacaaaaagaacaacctacgacttgatgattgggttttatgtcgaatatacaacaagaaaggaaccatggagaagtatttccccgcggatgagaagccgaggaccacgacaatggctgaacagtcatcatcaccttttgatacatcagactcgacttacccgacattgcaagaggatgattccagcagctcaggtggtcacggtcacgtggtgtcaccggatgttttggaggttcagagcgagcctaaatggggagagcttgaggatgctttggaagcttttgatacttcaatgtttggtagttccatggagttgttgcagcctgacgcttttgtccctcagttcttgtatcagtctgattatttcacttccttccaggatccgcctgagcagaaaccattcttgaattggagttttgctccacaggggtaaaaacggaagagaccaaaaaaggtgtttgctagtagtactgtgatgtgccagagagaagagtctcatctcaactcatccctggctcttagtagtaaaagaagattgtagaatgttaatagcttttagcatcaatgtctcattagcaggcacattcttgttctttcatgagaagtttatatgaaaactaaaaatttatattcaaattcttcaagatgttgcacttatgtagatactgatattaaataacaacctaacctttatg

SEQ ID NO: 541 - protein, 321 aa, Arabidopsis thaliana
  peptide (1)..(321): Ceres Seq. ID no. 12385456
  misc_feature (45)..(170): Pfam Name: NAM Pfam Description: No apical meristem
  misc_feature (39)..(321): NCBI GI NO: 22326685 NR Description: Expressed protein; protein id: At5g08790
  misc_feature (93)..(276): NCBI GI NO: 1076294 NR Description: ATAF2 protein - Arabidopsis thaliana
  misc_feature (99)..(276): NCBI GI NO: 1345504 NR Description: ATAF2 [Arabidopsis thaliana]
  misc_feature (38)..(321): NCBI GI NO: 30697896 NR Description: No apical meristem (NAM) protein family
  misc_feature (39)..(321): NCBI GI NO: 10177060 NR Description: contains similarity to NAC-domain protein~gene_id:MBK5
  misc_feature (38)..(321): NCBI GI NO: 23397338 NR Description: unknown protein [Arabidopsis thaliana]
  misc_feature (42)..(218): NCBI GI NO: 40647397 NR Description: NAC domain protein [Lycopersicon esculentum]
  misc_feature (206)..(312): NCBI GI NO: 40647397 NR Description: NAC domain protein [Lycopersicon esculentum]
  misc_feature (39)..(262): NCBI GI NO: 15223456 NR Description: NAC domain protein, putative
  misc_feature (39)..(186): NCBI GI NO: 26452827 NR Description: putative ATAF2 protein [Arabidopsis thaliana]
ITILSRRRKPKKNPDPAEIEFSTNEEEIFPRATDKKKRMKSELNLPAGFRFHPTDEELVKFYLCRKCASEQISAPVIAEIDLYKFNPWELPEMSLYGEKEWYFFSPRDRKYPNGSRPNRAAGTGYWKATGADKPIGKPKTLGIKKALVFYAGKAPKGIKTNWIMHEYRLANVDRSASVNKKNNLRLDDWVLCRIYNKKGTMEKYFPADEKPRTTTMAEQSSSPFDTSDSTYPTLQEDDSSSSGGHGHVVSPDVLEVQSEPKWGELEDALEAFDTSMFGSSMELLQPDAFVPQFLYQSDYFTSFQDPPEQKPFLNWSFAPQG

SEQ ID NO: 542 - protein, 283 aa, Arabidopsis thaliana
  peptide (1)..(283): Ceres Seq. ID no. 12385457
  misc_feature (7)..(132): Pfam Name: NAM Pfam Description: No apical meristem
  misc_feature (1)..(283): NCBI GI NO: 22326685 NR Description: Expressed protein; protein id: At5g08790
  misc_feature (55)..(238): NCBI GI NO: 1076294 NR Description: ATAF2 protein - Arabidopsis thaliana
  misc_feature (61)..(238): NCBI GI NO: 1345504 NR Description: ATAF2 [Arabidopsis thaliana]
  misc_feature (1)..(283): NCBI GI NO: 30697896 NR Description: No apical meristem (NAM) protein family
  misc_feature (1)..(283): NCBI GI NO: 10177060 NR Description: contains similarity to NAC-domain protein~gene_id:MBK5
  misc_feature (1)..(283): NCBI GI NO: 23397338 NR Description: unknown protein [Arabidopsis thaliana]
  misc_feature (4)..(180): NCBI GI NO: 40647397 NR Description: NAC domain protein [Lycopersicon esculentum]
  misc_feature (168)..(274): NCBI GI NO: 40647397 NR Description: NAC domain protein [Lycopersicon esculentum]
  misc_feature (1)..(224): NCBI GI NO: 15223456 NR Description: NAC domain protein, putative
  misc_feature (1)..(148): NCBI GI NO: 26452827 NR Description: putative ATAF2 protein [Arabidopsis thaliana]
MKSELNLPAGFRFHPTDEELVKFYLCRKCASEQISAPVIAEIDLYKFNPWELPEMSLYGEKEWYFFSPRDRKYPNGSRPNRAAGTGYWKATGADKPIGKPKTLGIKKALVFYAGKAPKGIKTNWIMHEYRLANVDRSASVNKKNNLRLDDWVLCRIYNKKGTMEKYFPADEKPRTTTMAEQSSSPFDTSDSTYPTLQEDDSSSSGGHGHVVSPDVLEVQSEPKWGELEDALEAFDTSMFGSSMELLQPDAFVPQFLYQSDYFTSFQDPPEQKPFLNWSFAPQG

SEQ ID NO: 543 - protein, 229 aa, Arabidopsis thaliana
  peptide (1)..(229): Ceres Seq. ID no. 12385458
  misc_feature (1)..(78): Pfam Name: NAM Pfam Description: No apical meristem
  misc_feature (1)..(229): NCBI GI NO: 22326685 NR Description: Expressed protein; protein id: At5g08790
  misc_feature (1)..(184): NCBI GI NO: 1076294 NR Description: ATAF2 protein - Arabidopsis thaliana
  misc_feature (7)..(184): NCBI GI NO: 1345504 NR Description: ATAF2 [Arabidopsis thaliana]
  misc_feature (1)..(229): NCBI GI NO: 30697896 NR Description: No apical meristem (NAM) protein family
  misc_feature (1)..(229): NCBI GI NO: 10177060 NR Description: contains similarity to NAC-domain protein~gene_id:MBK5
  misc_feature (1)..(229): NCBI GI NO: 23397338 NR Description: unknown protein [Arabidopsis thaliana]
  misc_feature (1)..(126): NCBI GI NO: 40647397 NR Description: NAC domain protein [Lycopersicon esculentum]
  misc_feature (114)..(220): NCBI GI NO: 40647397 NR Description: NAC domain protein [Lycopersicon esculentum]
  misc_feature (1)..(170): NCBI GI NO: 15223456 NR Description: NAC domain protein, putative
  misc_feature (1)..(94): NCBI GI NO: 26452827 NR Description: putative ATAF2 protein [Arabidopsis thaliana]
MSLYGEKEWYFFSPRDRKYPNGSRPNRAAGTGYWKATGADKPIGKPKTLGIKKALVFYAGKAPKGIKTNWIMHEYRLANVDRSASVNKKNNLRLDDWVLCRIYNKKGTMEKYFPADEKPRTTTMAEQSSSPFDTSDSTYPTLQEDDSSSSGGHGHVVSPDVLEVQSEPKWGELEDALEAFDTSMFGSSMELLQPDAFVPQFLYQSDYFTSFQDPPEQKPFLNWSFAPQG

SEQ ID NO: 544 - DNA, 1287 bp, Arabidopsis thaliana
  misc_feature (1)..(1287): Ceres Seq. ID no. 13494261
aactataacttaaacacacacttcatcttctctaaaaccctaaaatttaaacacaagatgggtttggttagatcattgtgcttattaataaccttccttaattgtctcatcatctcggttcatggccaagccaccgcaaggcctggtcctgtttccggcactaggattgggttttacttaactacgtgtcctagagctgagactattgtccgaaacgccgtgaatgctggtttcagttctgaccccagaatcgcacccggaatactgagaatgcatttccacgactgttttgtccaaggttgtgacggttcgatccttatatccggagctaacaccgagagaaccgccggtccgaacctcaatctccaaggatttgaagtcatagacaacgccaaaacgcagctcgaagccgcgtgtcctggagttgtctcttgtgctgatattttagcattagccgctcgtgacacagtcattctcactcaaggaacaggctggcaagtaccaacgggacgtagagatggtagagtttctttggcttcgaatgctaacaatctccctggtccccgtgactccgttgccgttcaacaacagaaattctccgccttgggactcaatactcgtgatctcgtcgtcctcgtcggaggacacacgatcggaacagcaggatgtggtgtattcaggaacaggctattcaataccaccggacaaaccgcagatccaaccatcgacccaacatttttggcgcagcttcaaacacaatgtccccaaaacggcgacggttcagtgcgcgtggatctcgacaccggaagcggaagcacttgggacacttcttactacaacaacctaagccgtgggcgtggagttctccaatccgatcaagtcctttggaccgatccagccactagacccatagtgcaacaattgatggctcctagaagcaccttcaacgttgagtttgcgaggtcaatggtcagaatgagtaatatcggtgtggttaccggagctaatggggaaatccgtagggtttgctctgcggttaattaattaaccgattagaatctgtcgtgataaactttcatgacgcaaagtacttgtttcgagtgtggttttaatctgaacaataaataaaccaatagaaaacgacatacaaagaaaaaacccaaaagtgggttgatgaaaattgtatctataaggtgttggtattcgatttcttttggttttagttaaaaaaaactgtaatgtcttcacaaaaatattataatgagtttggtcctagtttggattcct

SEQ ID NO: 545 - protein, 347 aa, Arabidopsis thaliana
  peptide (1)..(347): Ceres Seq. ID no. 13494262
  misc_feature (70)..(311): Pfam Name: Pfam Description:  Peroxidase
  misc_feature (20)..(347): NCBI GI NO: 15237615 NR Description: peroxidase, putative [Arabidopsis thaliana]
  misc_feature (20)..(347): NCBI GI NO: 21592403 NR Description: peroxidase [Arabidopsis thaliana]
  misc_feature (20)..(347): NCBI GI NO: 15241812 NR Description: peroxidase, putative [Arabidopsis thaliana]
  misc_feature (53)..(347): NCBI GI NO: 18558997 NR Description: bacterial-induced peroxidase [Gossypium hirsutum]
  misc_feature (92)..(347): NCBI GI NO: 1890313 NR Description: peroxidase ATP24a [Arabidopsis thaliana]
  misc_feature (18)..(347): NCBI GI NO: 7433065 NR Description: peroxidase (EC 1
  misc_feature (35)..(347): NCBI GI NO: 129808 NR Description: Cationic peroxidase 2 precursor (PNPC2)
  misc_feature (53)..(347): NCBI GI NO: 19698452 NR Description: bacterial-induced gaiacol peroxidase
  misc_feature (53)..(347): NCBI GI NO: 5381255 NR Description: peroxidase [Nicotiana tabacum]
  misc_feature (26)..(347): NCBI GI NO: 1232069 NR Description: cationic peroxidase [Stylosanthes humilis]
NYNLNTHFIFSKTLKFKHKMGLVRSLCLLITFLNCLIISVHGQATARPGPVSGTRIGFYLTTCPRAETIVRNAVNAGFSSDPRIAPGILRMHFHDCFVQGCDGSILISGANTERTAGPNLNLQGFEVIDNAKTQLEAACPGVVSCADILALAARDTVILTQGTGWQVPTGRRDGRVSLASNANNLPGPRDSVAVQQQKFSALGLNTRDLVVLVGGHTIGTAGCGVFRNRLFNTTGQTADPTIDPTFLAQLQTQCPQNGDGSVRVDLDTGSGSTWDTSYYNNLSRGRGVLQSDQVLWTDPATRPIVQQLMAPRSTFNVEFARSMVRMSNIGVVTGANGEIRRVCSAVN

SEQ ID NO: 546 - protein, 328 aa, Arabidopsis thaliana
  peptide (1)..(328): Ceres Seq. ID no. 13494263
  misc_feature (51)..(292): Pfam Name: Pfam Description:  Peroxidase
  misc_feature (1)..(328): NCBI GI NO: 15237615 NR Description: peroxidase, putative [Arabidopsis thaliana]
  misc_feature (1)..(328): NCBI GI NO: 21592403 NR Description: peroxidase [Arabidopsis thaliana]
  misc_feature (1)..(328): NCBI GI NO: 15241812 NR Description: peroxidase, putative [Arabidopsis thaliana]
  misc_feature (34)..(328): NCBI GI NO: 18558997 NR Description: bacterial-induced peroxidase [Gossypium hirsutum]
  misc_feature (73)..(328): NCBI GI NO: 1890313 NR Description: peroxidase ATP24a [Arabidopsis thaliana]
  misc_feature (1)..(328): NCBI GI NO: 7433065 NR Description: peroxidase (EC 1
  misc_feature (16)..(328): NCBI GI NO: 129808 NR Description: Cationic peroxidase 2 precursor (PNPC2)
  misc_feature (34)..(328): NCBI GI NO: 19698452 NR Description: bacterial-induced gaiacol peroxidase
  misc_feature (34)..(328): NCBI GI NO: 5381255 NR Description: peroxidase [Nicotiana tabacum]
  misc_feature (7)..(328): NCBI GI NO: 1232069 NR Description: cationic peroxidase [Stylosanthes humilis]
MGLVRSLCLLITFLNCLIISVHGQATARPGPVSGTRIGFYLTTCPRAETIVRNAVNAGFSSDPRIAPGILRMHFHDCFVQGCDGSILISGANTERTAGPNLNLQGFEVIDNAKTQLEAACPGVVSCADILALAARDTVILTQGTGWQVPTGRRDGRVSLASNANNLPGPRDSVAVQQQKFSALGLNTRDLVVLVGGHTIGTAGCGVFRNRLFNTTGQTADPTIDPTFLAQLQTQCPQNGDGSVRVDLDTGSGSTWDTSYYNNLSRGRGVLQSDQVLWTDPATRPIVQQLMAPRSTFNVEFARSMVRMSNIGVVTGANGEIRRVCSAVN

SEQ ID NO: 547 - protein, 257 aa, Arabidopsis thaliana
  peptide (1)..(257): Ceres Seq. ID no. 13494264
  misc_feature (1)..(221): Pfam Name: Pfam Description:  Peroxidase
  misc_feature (1)..(257): NCBI GI NO: 15237615 NR Description: peroxidase, putative [Arabidopsis thaliana]
  misc_feature (1)..(257): NCBI GI NO: 21592403 NR Description: peroxidase [Arabidopsis thaliana]
  misc_feature (1)..(257): NCBI GI NO: 15241812 NR Description: peroxidase, putative [Arabidopsis thaliana]
  misc_feature (1)..(257): NCBI GI NO: 18558997 NR Description: bacterial-induced peroxidase [Gossypium hirsutum]
  misc_feature (2)..(257): NCBI GI NO: 1890313 NR Description: peroxidase ATP24a [Arabidopsis thaliana]
  misc_feature (1)..(257): NCBI GI NO: 7433065 NR Description: peroxidase (EC 1
  misc_feature (1)..(257): NCBI GI NO: 129808 NR Description: Cationic peroxidase 2 precursor (PNPC2)
  misc_feature (1)..(257): NCBI GI NO: 19698452 NR Description: bacterial-induced gaiacol peroxidase
  misc_feature (1)..(257): NCBI GI NO: 5381255 NR Description: peroxidase [Nicotiana tabacum]
  misc_feature (1)..(257): NCBI GI NO: 1232069 NR Description: cationic peroxidase [Stylosanthes humilis]
MHFHDCFVQGCDGSILISGANTERTAGPNLNLQGFEVIDNAKTQLEAACPGVVSCADILALAARDTVILTQGTGWQVPTGRRDGRVSLASNANNLPGPRDSVAVQQQKFSALGLNTRDLVVLVGGHTIGTAGCGVFRNRLFNTTGQTADPTIDPTFLAQLQTQCPQNGDGSVRVDLDTGSGSTWDTSYYNNLSRGRGVLQSDQVLWTDPATRPIVQQLMAPRSTFNVEFARSMVRMSNIGVVTGANGEIRRVCSAVN

SEQ ID NO: 548 - DNA, 952 bp, Arabidopsis thaliana
  misc_feature (1)..(952): Ceres Seq. ID no. 13497003
atggataaccctcaagaagaagctgctgaagaagaaacctcatccttcgaacgttaagaggaagaagaataagagaaatcgattcgtggttttgggaaaattcaatggcggtttctactgtatcgtcgtttctattgccatctttcggcattccaagctcttcgccttcttctaccagactcaaagtctctctgctgccttcatcttctacccatggcggccttagttcctgcgtccttacgaaaccatccgtctcgcttacgaaggtcttcgctgttcccgataccctagatccaactccagaaattctcgatgaacccgcctctgaggttccgagctcttcatccatcagtgtagacgcggataagatggcgccaaagcaaaagattaggatcaagcttagatcatactgggtgcctcttattgaggactcatgcaagcagatacttgatgctgcgagaaacaccaatgcaaagacgatgggtcctgttccattgccaaccaagaagcgtatctactgtgttctcaagtctcctcacgttcacaaggatgctaggttccattttgaaatccggacacaccagcgcatgattgatattctctacccgactgctcaaactatcgattctttgatgcaacttgatcttcctgctggtgtcgatgtggaagtgaagctctgaagaagaagcgtaactacaatgatgtgatgggcacttttgcattgaatgaacagactgtttcagatcaactacattgcttagaactggtaagccttgtatcatcttttttgagaacctttgtaacgaaaatgtaagttgtattatctggtccttggaatctatctttagcgatgcttggttcttagttgatgaacatatccttaattaagcaagttcaaaggaatttgtttttgttttactaattgttatgcagtttgcctgtgtccattatg

SEQ ID NO: 549 - protein, 191 aa, Arabidopsis thaliana
  peptide (1)..(191): Ceres Seq. ID no. 13497004
  misc_feature (94)..(189): Pfam Name: Pfam Description:  Ribosomal protein S10p/S20e
  misc_feature (1)..(191): NCBI GI NO: 15231154 NR Description: chloroplast 30S ribosomal protein S10, putative
  misc_feature (1)..(191): NCBI GI NO: 7578929 NR Description: plastid ribosomal protein S10 precursor
  misc_feature (89)..(191): NCBI GI NO: 11467349 NR Description: ribosomal protein S10 [Cyanophora paradoxa]
  misc_feature (94)..(191): NCBI GI NO: 11465752 NR Description: ribosomal protein S10 [Porphyra purpurea]
  misc_feature (92)..(191): NCBI GI NO: 23125142 NR Description: hypothetical protein [Nostoc punctiforme]
  misc_feature (92)..(191): NCBI GI NO: 1350919 NR Description: 30S ribosomal protein S10
  misc_feature (92)..(191): NCBI GI NO: 16330912 NR Description: 30S ribosomal protein S10
  misc_feature (92)..(191): NCBI GI NO: 17231828 NR Description: 30S ribosomal protein S10 [Nostoc sp. PCC 7120]
  misc_feature (92)..(191): NCBI GI NO: 11467745 NR Description: ribosomal protein S10 [Guillardia theta]
  misc_feature (92)..(191): NCBI GI NO: 37523498 NR Description: 30S ribosomal protein S10 [Gloeobacter violaceus]
MAVSTVSSFLLPSFGIPSSSPSSTRLKVSLLPSSSTHGGLSSCVLTKPSVSLTKVFAVPDTLDPTPEILDEPASEVPSSSSISVDADKMAPKQKIRIKLRSYWVPLIEDSCKQILDAARNTNAKTMGPVPLPTKKRIYCVLKSPHVHKDARFHFEIRTHQRMIDILYPTAQTIDSLMQLDLPAGVDVEVKL

SEQ ID NO: 550 - protein, 103 aa, Arabidopsis thaliana
  peptide (1)..(103): Ceres Seq. ID no. 13497005
  misc_feature (6)..(101): Pfam Name: Pfam Description:  Ribosomal protein S10p/S20e
  misc_feature (1)..(103): NCBI GI NO: 15231154 NR Description: chloroplast 30S ribosomal protein S10, putative
  misc_feature (1)..(103): NCBI GI NO: 7578929 NR Description: plastid ribosomal protein S10 precursor
  misc_feature (1)..(103): NCBI GI NO: 11467349 NR Description: ribosomal protein S10 [Cyanophora paradoxa]
  misc_feature (6)..(103): NCBI GI NO: 11465752 NR Description: ribosomal protein S10 [Porphyra purpurea]
  misc_feature (4)..(103): NCBI GI NO: 23125142 NR Description: hypothetical protein [Nostoc punctiforme]
  misc_feature (4)..(103): NCBI GI NO: 1350919 NR Description: 30S ribosomal protein S10
  misc_feature (4)..(103): NCBI GI NO: 16330912 NR Description: 30S ribosomal protein S10
  misc_feature (4)..(103): NCBI GI NO: 17231828 NR Description: 30S ribosomal protein S10 [Nostoc sp. PCC 7120]
  misc_feature (4)..(103): NCBI GI NO: 11467745 NR Description: ribosomal protein S10 [Guillardia theta]
  misc_feature (4)..(103): NCBI GI NO: 37523498 NR Description: 30S ribosomal protein S10 [Gloeobacter violaceus]
MAPKQKIRIKLRSYWVPLIEDSCKQILDAARNTNAKTMGPVPLPTKKRIYCVLKSPHVHKDARFHFEIRTHQRMIDILYPTAQTIDSLMQLDLPAGVDVEVKL

SEQ ID NO: 551 - DNA, 783 bp, Arabidopsis thaliana
  misc_feature (1)..(783): Ceres Seq. ID no. 12580494
aatcaatcaacaaacataagaaaacaaactcaaaaggattcttcttcaaacacaacatctcaaggaaaacatgaaaatgggaatgggtttagtgttccttacagtttttatggctgagaagtcttctacaatggtctctgctcagtcaagctgcacaaacgcgttgattagcatgtcgccgtgtctcaactacataactggaaactctacctctcctaatcagcaatgctgtaatcagttgagtagagtagtccagtcttctcctgactgtttgtgtcaagtccttaacggtggaggctctcagcttgggatcaatattaaccaaacacaagctcttggtctgcctagggcttgtaatgttcagactcctcctgtcagtcgctgtaataccggtggtggtggtggtggttctacttctgactctcctgcagaatcaccaaactcttcaggaccaggtaatggatcgaaaaccgtaccagtaggagaaggagacggacccccatcgtctgatggaagctctatcaagttctcatttcctctcattgccttcttctccgcggtttcctacatggcaatcttctgagttactattttcccatacgcttttgtgccactcagattgcattctttatttgtccctatttattcacatttcgttgtgattttgtgtgatgtattttatgctctgtaaatccctactctccgggtgatattgctttgttgtaccaacggagagcattttggatctctttaccttttataataaacattactttccagaac

SEQ ID NO: 552 - protein, 170 aa, Arabidopsis thaliana
  peptide (1)..(170): Ceres Seq. ID no. 12580495
  misc_feature (28)..(105): Pfam Name: Pfam Description:  Protease inhibitor/seed storage/LTP family
  misc_feature (1)..(170): NCBI GI NO: 18403453 NR Description: expressed protein; protein id: At3g22600
  misc_feature (3)..(170): NCBI GI NO: 24417478 NR Description: unknown [Arabidopsis thaliana]
  misc_feature (5)..(170): NCBI GI NO: 21554014 NR Description: unknown [Arabidopsis thaliana]
  misc_feature (1)..(169): NCBI GI NO: 21592722 NR Description: unknown [Arabidopsis thaliana]
  misc_feature (1)..(169): NCBI GI NO: 18414320 NR Description: Expressed protein; protein id: At4g14815
  misc_feature (23)..(169): NCBI GI NO: 28269454 NR Description: putative protease inhibitor
  misc_feature (7)..(153): NCBI GI NO: 21592774 NR Description: unknown [Arabidopsis thaliana]
  misc_feature (7)..(153): NCBI GI NO: 18407534 NR Description: expressed protein; protein id: At2g48130
  misc_feature (23)..(143): NCBI GI NO: 25553602 NR Description: OJ1656_E11.34
  misc_feature (4)..(166): NCBI GI NO: 25553595 NR Description: OJ1656_E11.26
MKMGMGLVFLTVFMAEKSSTMVSAQSSCTNALISMSPCLNYITGNSTSPNQQCCNQLSRVVQSSPDCLCQVLNGGGSQLGININQTQALGLPRACNVQTPPVSRCNTGGGGGGSTSDSPAESPNSSGPGNGSKTVPVGEGDGPPSSDGSSIKFSFPLIAFFSAVSYMAIF

SEQ ID NO: 553 - protein, 168 aa, Arabidopsis thaliana
  peptide (1)..(168): Ceres Seq. ID no. 12580496
  misc_feature (26)..(103): Pfam Name: Pfam Description:  Protease inhibitor/seed storage/LTP family
  misc_feature (1)..(168): NCBI GI NO: 18403453 NR Description: expressed protein; protein id: At3g22600
  misc_feature (1)..(168): NCBI GI NO: 24417478 NR Description: unknown [Arabidopsis thaliana]
  misc_feature (3)..(168): NCBI GI NO: 21554014 NR Description: unknown [Arabidopsis thaliana]
  misc_feature (1)..(167): NCBI GI NO: 21592722 NR Description: unknown [Arabidopsis thaliana]
  misc_feature (1)..(167): NCBI GI NO: 18414320 NR Description: Expressed protein; protein id: At4g14815
  misc_feature (21)..(167): NCBI GI NO: 28269454 NR Description: putative protease inhibitor
  misc_feature (5)..(151): NCBI GI NO: 21592774 NR Description: unknown [Arabidopsis thaliana]
  misc_feature (5)..(151): NCBI GI NO: 18407534 NR Description: expressed protein; protein id: At2g48130
  misc_feature (21)..(141): NCBI GI NO: 25553602 NR Description: OJ1656_E11.34
  misc_feature (2)..(164): NCBI GI NO: 25553595 NR Description: OJ1656_E11.26
MGMGLVFLTVFMAEKSSTMVSAQSSCTNALISMSPCLNYITGNSTSPNQQCCNQLSRVVQSSPDCLCQVLNGGGSQLGININQTQALGLPRACNVQTPPVSRCNTGGGGGGSTSDSPAESPNSSGPGNGSKTVPVGEGDGPPSSDGSSIKFSFPLIAFFSAVSYMAIF

SEQ ID NO: 554 - protein, 166 aa, Arabidopsis thaliana
  peptide (1)..(166): Ceres Seq. ID no. 12580497
  misc_feature (24)..(101): Pfam Name: Pfam Description:  Protease inhibitor/seed storage/LTP family
  misc_feature (1)..(166): NCBI GI NO: 18403453 NR Description: expressed protein; protein id: At3g22600
  misc_feature (1)..(166): NCBI GI NO: 24417478 NR Description: unknown [Arabidopsis thaliana]
  misc_feature (1)..(166): NCBI GI NO: 21554014 NR Description: unknown [Arabidopsis thaliana]
  misc_feature (1)..(165): NCBI GI NO: 21592722 NR Description: unknown [Arabidopsis thaliana]
  misc_feature (1)..(165): NCBI GI NO: 18414320 NR Description: Expressed protein; protein id: At4g14815
  misc_feature (19)..(165): NCBI GI NO: 28269454 NR Description: putative protease inhibitor
  misc_feature (3)..(149): NCBI GI NO: 21592774 NR Description: unknown [Arabidopsis thaliana]
  misc_feature (3)..(149): NCBI GI NO: 18407534 NR Description: expressed protein; protein id: At2g48130
  misc_feature (19)..(139): NCBI GI NO: 25553602 NR Description: OJ1656_E11.34
  misc_feature (1)..(162): NCBI GI NO: 25553595 NR Description: OJ1656_E11.26
MGLVFLTVFMAEKSSTMVSAQSSCTNALISMSPCLNYITGNSTSPNQQCCNQLSRVVQSSPDCLCQVLNGGGSQLGININQTQALGLPRACNVQTPPVSRCNTGGGGGGSTSDSPAESPNSSGPGNGSKTVPVGEGDGPPSSDGSSIKFSFPLIAFFSAVSYMAIF

SEQ ID NO: 555 - DNA, 1138 bp, Arabidopsis thaliana
  misc_feature (1)..(1138): Ceres Seq. ID no. 13492871
tcattcttcaaataaattaaaatcttcgttggcgttgttgttggttgcgttacagattttggactaatcattattttcgtgcctgcaaagtcagcacgacgatcgcgtttcgatcttcaaagtagaagaagacccgccacaatcacaaatcgcggtgcatatagtctaaagggtcaatggcctcttcttcggatccatggatgagagagtacaatgaggctttgaaactctctgaggatattaatggcatgatgtctgaaaggaatgcctccgggttaaccgggcctgatgctcaacgtcgtgcctctgcaattcgaagaaagatcaccattttggggactcgattagacagtctgcaatcccttcttgtcaaggttcctggcaagcagcatgtttcggagaaagagatgaatcgtcgcaaggatatggttgggaatttgagatcaaaaacaaatcaggtggcctctgctttgaatatgtcaaactttgcaaacagagacagcttgtttggaacagatttaaagccggatgatgcgataaatagagtctctggcatggacaaccaaggaattgttgtatttcaacggcaagttatgagagaacaagacgagggacttgagaagttggaggaaacagtcatgagtaccaaacacattgctctcgctgttaacgaggagctcaccctgcagacaaggcttattgatgacttagattacgatgtggatatcactgactctcgcttacggcgtgttcaaaagagccttgccttgatgaacaagagcatgaaaagtggttgctcatgcatgtctatgctcttgtctgtgcttggaatcgttggtcttgctcttgtaatttggctgctggttaagtacctgtaataatgccaatgtggtggcaacttgtgaaagctcatccttttctctcagcctatcctctgtgcttaatggttgttttctattccttctatcgattgattcgtgtctgtgaggcaaagaagaataccactgcgtgtaagaaaccctcagaagtacataatctgtattaccttcgtatcaaccacgaattgtaaactaagttgacatttgtctatatatggtatggctcctacttggttcaataaagagaactagtggcttgg

SEQ ID NO: 556 - protein, 233 aa, Arabidopsis thaliana
  peptide (1)..(233): Ceres Seq. ID no. 13492872
  misc_feature (142)..(204): Pfam Name: Pfam Description:  SNARE domain
  misc_feature (1)..(233): NCBI GI NO: 18412435 NR Description: syntaxin of plants 52 (SYP52)
  misc_feature (1)..(233): NCBI GI NO: 21592406 NR Description: unknown [Arabidopsis thaliana]
  misc_feature (1)..(175): NCBI GI NO: 25372945 NR Description: protein F20B17.2 [imported] - Arabidopsis thaliana
  misc_feature (160)..(233): NCBI GI NO: 25372945 NR Description: protein F20B17.2 [imported] - Arabidopsis thaliana
  misc_feature (1)..(233): NCBI GI NO: 18394339 NR Description: syntaxin of plants 51 (SYP51)
  misc_feature (1)..(232): NCBI GI NO: 34902234 NR Description: Hypothetical protein
  misc_feature (1)..(175): NCBI GI NO: 15219172 NR Description: hypothetical protein [Arabidopsis thaliana]
  misc_feature (1)..(196): NCBI GI NO: 22329605 NR Description: hypothetical protein [Arabidopsis thaliana]
  misc_feature (6)..(227): NCBI GI NO: 13928908 NR Description: syntaxin 8; syntaxin-like protein 3I35
  misc_feature (6)..(227): NCBI GI NO: 9055356 NR Description: syntaxin 8; syntaxin-like protein 3I35
MASSSDPWMREYNEALKLSEDINGMMSERNASGLTGPDAQRRASAIRRKITILGTRLDSLQSLLVKVPGKQHVSEKEMNRRKDMVGNLRSKTNQVASALNMSNFANRDSLFGTDLKPDDAINRVSGMDNQGIVVFQRQVMREQDEGLEKLEETVMSTKHIALAVNEELTLQTRLIDDLDYDVDITDSRLRRVQKSLALMNKSMKSGCSCMSMLLSVLGIVGLALVIWLLVKYL

SEQ ID NO: 557 - protein, 225 aa, Arabidopsis thaliana
  peptide (1)..(225): Ceres Seq. ID no. 13492873
  misc_feature (134)..(196): Pfam Name: Pfam Description:  SNARE domain
  misc_feature (1)..(225): NCBI GI NO: 18412435 NR Description: syntaxin of plants 52 (SYP52)
  misc_feature (1)..(225): NCBI GI NO: 21592406 NR Description: unknown [Arabidopsis thaliana]
  misc_feature (1)..(167): NCBI GI NO: 25372945 NR Description: protein F20B17.2 [imported] - Arabidopsis thaliana
  misc_feature (152)..(225): NCBI GI NO: 25372945 NR Description: protein F20B17.2 [imported] - Arabidopsis thaliana
  misc_feature (1)..(225): NCBI GI NO: 18394339 NR Description: syntaxin of plants 51 (SYP51)
  misc_feature (1)..(224): NCBI GI NO: 34902234 NR Description: Hypothetical protein
  misc_feature (1)..(167): NCBI GI NO: 15219172 NR Description: hypothetical protein [Arabidopsis thaliana]
  misc_feature (1)..(188): NCBI GI NO: 22329605 NR Description: hypothetical protein [Arabidopsis thaliana]
  misc_feature (1)..(219): NCBI GI NO: 13928908 NR Description: syntaxin 8; syntaxin-like protein 3I35
  misc_feature (1)..(219): NCBI GI NO: 9055356 NR Description: syntaxin 8; syntaxin-like protein 3I35
MREYNEALKLSEDINGMMSERNASGLTGPDAQRRASAIRRKITILGTRLDSLQSLLVKVPGKQHVSEKEMNRRKDMVGNLRSKTNQVASALNMSNFANRDSLFGTDLKPDDAINRVSGMDNQGIVVFQRQVMREQDEGLEKLEETVMSTKHIALAVNEELTLQTRLIDDLDYDVDITDSRLRRVQKSLALMNKSMKSGCSCMSMLLSVLGIVGLALVIWLLVKYL

SEQ ID NO: 558 - protein, 209 aa, Arabidopsis thaliana
  peptide (1)..(209): Ceres Seq. ID no. 13492874
  misc_feature (118)..(180): Pfam Name: Pfam Description:  SNARE domain
  misc_feature (1)..(209): NCBI GI NO: 18412435 NR Description: syntaxin of plants 52 (SYP52)
  misc_feature (1)..(209): NCBI GI NO: 21592406 NR Description: unknown [Arabidopsis thaliana]
  misc_feature (1)..(151): NCBI GI NO: 25372945 NR Description: protein F20B17.2 [imported] - Arabidopsis thaliana
  misc_feature (136)..(209): NCBI GI NO: 25372945 NR Description: protein F20B17.2 [imported] - Arabidopsis thaliana
  misc_feature (1)..(209): NCBI GI NO: 18394339 NR Description: syntaxin of plants 51 (SYP51)
  misc_feature (1)..(208): NCBI GI NO: 34902234 NR Description: Hypothetical protein
  misc_feature (1)..(151): NCBI GI NO: 15219172 NR Description: hypothetical protein [Arabidopsis thaliana]
  misc_feature (1)..(172): NCBI GI NO: 22329605 NR Description: hypothetical protein [Arabidopsis thaliana]
  misc_feature (1)..(203): NCBI GI NO: 13928908 NR Description: syntaxin 8; syntaxin-like protein 3I35
  misc_feature (1)..(203): NCBI GI NO: 9055356 NR Description: syntaxin 8; syntaxin-like protein 3I35
MMSERNASGLTGPDAQRRASAIRRKITILGTRLDSLQSLLVKVPGKQHVSEKEMNRRKDMVGNLRSKTNQVASALNMSNFANRDSLFGTDLKPDDAINRVSGMDNQGIVVFQRQVMREQDEGLEKLEETVMSTKHIALAVNEELTLQTRLIDDLDYDVDITDSRLRRVQKSLALMNKSMKSGCSCMSMLLSVLGIVGLALVIWLLVKYL

SEQ ID NO: 559 - DNA, 872 bp, Arabidopsis thaliana
  misc_feature (1)..(872): Ceres Seq. ID no. 12327663
atcgaacattaaaacctgattttactgaaactgtgctgcgaaggagaagccgcaaaccattttttgtcaatctagggttcttcttcgtacttgcagatttcgcctccgttttcactacgatctgtgaagatgttctccgctcagaacaagatcaataaggacaagaatgctgagccaacagaatgcgaggagcaagttgctcaggctttgtttgatttggagaacactaaccaggagttgaaaagcgagttgaaagatctctacatcaaccaagctgttcacatggatatctctggaaaccgcaaagctgttgtgatttacgttccattcagattgaggaaagctttccgcaagattcatccccgtctcgtcagagagcttgagaagaagttcagtggaaaggatgttatctttgttaccacaagaaggatcatgcgtccccccaagaagggtgctgctgttcagaggccacgtaacagaactcttacctcagttcatgaagctatgcttgaagatgttgctttccccgctgagattgttggaaagcgtactcgctaccgtcttgatggttccaagatcatgaaggtctttttggatgccaaggaaaagaacaacacagagtacaagctcgagactatggtcggtgtgtaccgtaaacttactggcaaagatgttgtttttgagtacccagtcgaagcttgaaagaagatgatgaagaaccatcaggatagtgaaagagagcttttgtttatgttttgtggtatttaggatgaaggaaactctcttgattcagttccttgttcacaatctttaatgttctatttacaatgactactttttgtgtttttcaattttgaaacctctatgatttc

SEQ ID NO: 560 - protein, 190 aa, Arabidopsis thaliana
  peptide (1)..(190): Ceres Seq. ID no. 12327664
  misc_feature (4)..(190): Pfam Name: Pfam Description:  Ribosomal protein S7e
  misc_feature (1)..(190): NCBI GI NO: 21592413 NR Description: 40S ribosomal protein S7-like
  misc_feature (1)..(190): NCBI GI NO: 15237278 NR Description: 40S ribosomal protein S7-like
  misc_feature (1)..(188): NCBI GI NO: 15232926 NR Description: putative 40S ribosomal protein
  misc_feature (1)..(188): NCBI GI NO: 20139962 NR Description: 40S ribosomal protein S7
  misc_feature (1)..(188): NCBI GI NO: 20139964 NR Description: 40S ribosomal protein S7
  misc_feature (1)..(188): NCBI GI NO: 15221972 NR Description: 40S ribosomal protein S7 homolog, putative
  misc_feature (1)..(188): NCBI GI NO: 22671664 NR Description: ribosomal protein S7
  misc_feature (1)..(188): NCBI GI NO: 4588906 NR Description: ribosomal protein S7 [Secale cereale]
  misc_feature (1)..(188): NCBI GI NO: 14787424 NR Description: Ribosomal protein S7
  misc_feature (1)..(187): NCBI GI NO: 1710775 NR Description: 40S RIBOSOMAL PROTEIN S7
MFSAQNKINKDKNAEPTECEEQVAQALFDLENTNQELKSELKDLYINQAVHMDISGNRKAVVIYVPFRLRKAFRKIHPRLVRELEKKFSGKDVIFVTTRRIMRPPKKGAAVQRPRNRTLTSVHEAMLEDVAFPAEIVGKRTRYRLDGSKIMKVFLDAKEKNNTEYKLETMVGVYRKLTGKDVVFEYPVEA

SEQ ID NO: 561 - protein, 139 aa, Arabidopsis thaliana
  peptide (1)..(139): Ceres Seq. ID no. 12327665
  misc_feature (1)..(139): Pfam Name: Pfam Description:  Ribosomal protein S7e
  misc_feature (1)..(139): NCBI GI NO: 21592413 NR Description: 40S ribosomal protein S7-like
  misc_feature (1)..(139): NCBI GI NO: 15237278 NR Description: 40S ribosomal protein S7-like
  misc_feature (1)..(137): NCBI GI NO: 15232926 NR Description: putative 40S ribosomal protein
  misc_feature (1)..(137): NCBI GI NO: 20139962 NR Description: 40S ribosomal protein S7
  misc_feature (1)..(137): NCBI GI NO: 20139964 NR Description: 40S ribosomal protein S7
  misc_feature (1)..(137): NCBI GI NO: 15221972 NR Description: 40S ribosomal protein S7 homolog, putative
  misc_feature (1)..(137): NCBI GI NO: 22671664 NR Description: ribosomal protein S7
  misc_feature (1)..(137): NCBI GI NO: 4588906 NR Description: ribosomal protein S7 [Secale cereale]
  misc_feature (1)..(137): NCBI GI NO: 14787424 NR Description: Ribosomal protein S7
  misc_feature (1)..(136): NCBI GI NO: 1710775 NR Description: 40S RIBOSOMAL PROTEIN S7
MDISGNRKAVVIYVPFRLRKAFRKIHPRLVRELEKKFSGKDVIFVTTRRIMRPPKKGAAVQRPRNRTLTSVHEAMLEDVAFPAEIVGKRTRYRLDGSKIMKVFLDAKEKNNTEYKLETMVGVYRKLTGKDVVFEYPVEA

SEQ ID NO: 562 - DNA, 873 bp, Arabidopsis thaliana
  misc_feature (1)..(873): Ceres Seq. ID no. 13497760
attataacttggatcagattcttcttctcctctaaacaacaacaaagtctctcttccttctgtctttcacatttcctcttcccctaaaaacagaactcaaaaccaaaacaaaatgactcgctcctctagattccttggtacggcgtcgcctccaccaccggaagaaatcctcgccgccgaaaccgacatggttgtgattctctcagcacttctctgcgctctcgtatgcgtagccggtttagccgccgtagctcgctgcgcttggctccgccgtctcaccggagttaatcccgccgccgtcggagaagctccaccgcctaacaaaggcctcaagaaaaaagcacttcaagctctccctaaatcaacttacaccgcctctgcctctaccgccgccgccgctgacgatctaccgtgctcttcagtcggagacggagattcatccaccgagtgtgcaatatgcataacggaattttcggagggcgaagaaatcagaatcttaccgctgtgtagtcacgccttccacgtggcgtgtatagacaagtggttgacttcacggtcgtcgtgtccgtcttgtcgtcggatattggtgccggtgaagtgtgataggtgtgggcaccatgcttcgacggcggagactcaggtcaaagatcaacctcctcatcaccaacatccttcacagttcacttccgccattattcctgcttttcttccttgaaatgttttcactttattaaatttttataatttgctaaaaatatcggcatgattaaaagtaaagtattaattaattaggaattagtaatctttagttaagtacttttatatttctcctctgtaatcctctgttctgaattaatcagatgaaatttcgat

SEQ ID NO: 563 - protein, 200 aa, Arabidopsis thaliana
  peptide (1)..(200): Ceres Seq. ID no. 13497761
  misc_feature (113)..(154): Pfam Name: RING finger Pfam Description: Zinc finger, C3HC4 type
  misc_feature (1)..(200): NCBI GI NO: 15237013 NR Description: RING-H2 finger protein RHA3b
  misc_feature (1)..(200): NCBI GI NO: 15227839 NR Description: RING zinc finger protein -related
  misc_feature (10)..(181): NCBI GI NO: 15218042 NR Description: RING zinc finger protein -related
  misc_feature (71)..(166): NCBI GI NO: 37536508 NR Description: putative ring finger protein
  misc_feature (1)..(68): NCBI GI NO: 37536508 NR Description: putative ring finger protein
  misc_feature (1)..(164): NCBI GI NO: 7489432 NR Description: probable ring finger protein - barley
  misc_feature (6)..(167): NCBI GI NO: 15223041 NR Description: RING zinc finger protein -related
  misc_feature (6)..(167): NCBI GI NO: 21555237 NR Description: putative RING zinc finger protein
  misc_feature (20)..(188): NCBI GI NO: 9293902 NR Description: contains similarity to RING zinc fingerprotein~gene_id:MVE11
  misc_feature (10)..(182): NCBI GI NO: 15222073 NR Description: RING-H2 finger protein RHA3a -related
MTRSSRFLGTASPPPPEEILAAETDMVVILSALLCALVCVAGLAAVARCAWLRRLTGVNPAAVGEAPPPNKGLKKKALQALPKSTYTASASTAAAADDLPCSSVGDGDSSTECAICITEFSEGEEIRILPLCSHAFHVACIDKWLTSRSSCPSCRRILVPVKCDRCGHHASTAETQVKDQPPHHQHPSQFTSAIIPAFLP

SEQ ID NO: 564 - protein, 175 aa, Arabidopsis thaliana
  peptide (1)..(175): Ceres Seq. ID no. 13497762
  misc_feature (88)..(129): Pfam Name: RING finger Pfam Description: Zinc finger, C3HC4 type
  misc_feature (1)..(175): NCBI GI NO: 15237013 NR Description: RING-H2 finger protein RHA3b
  misc_feature (1)..(175): NCBI GI NO: 15227839 NR Description: RING zinc finger protein -related
  misc_feature (1)..(156): NCBI GI NO: 15218042 NR Description: RING zinc finger protein -related
  misc_feature (46)..(141): NCBI GI NO: 37536508 NR Description: putative ring finger protein
  misc_feature (1)..(43): NCBI GI NO: 37536508 NR Description: putative ring finger protein
  misc_feature (1)..(139): NCBI GI NO: 7489432 NR Description: probable ring finger protein - barley
  misc_feature (1)..(142): NCBI GI NO: 15223041 NR Description: RING zinc finger protein -related
  misc_feature (1)..(142): NCBI GI NO: 21555237 NR Description: putative RING zinc finger protein
  misc_feature (1)..(163): NCBI GI NO: 9293902 NR Description: contains similarity to RING zinc fingerprotein~gene_id:MVE11
  misc_feature (1)..(157): NCBI GI NO: 15222073 NR Description: RING-H2 finger protein RHA3a -related
MVVILSALLCALVCVAGLAAVARCAWLRRLTGVNPAAVGEAPPPNKGLKKKALQALPKSTYTASASTAAAADDLPCSSVGDGDSSTECAICITEFSEGEEIRILPLCSHAFHVACIDKWLTSRSSCPSCRRILVPVKCDRCGHHASTAETQVKDQPPHHQHPSQFTSAIIPAFLP

SEQ ID NO: 565 - DNA, 1259 bp, Arabidopsis thaliana
  misc_feature (1)..(1259): Ceres Seq. ID no. 12370424
aagcatcgctctagttaaggaagcagcaggtttggatccgaaccaaccaacggatcagatcagaaacaaaatattcaacggctcagatttattctaattttcctccttttattgttggttttttcattcgtcttcgagatctttcttctcagaggtgtaacgaaaacgctagaacaataactttgatcgttcttcttcttctcttgaatcggaaacaatggcggatgaacataagcatgaagaatcttcacctaatttggatccagcagtggaggttgtagagagggaatcgttgatggagaagttatcggagaagatccatcacaaaggtgattcgtcgtcttcatcatcatcagatgacgaaaacgagaagaagtcttcgtcatcgtctccaaagtctttgaaatcgaaggtttatcgtttgttcggaagagagagacctgttcataaggttctcggcggcggaaaaccggcagatatatttatgtggaaggacaagaaaatgtcaggaggtgtatttggcggtgctacagtggcatgggtgctatttgaattgatggagtatcatcttcttactctgttatgtcacgttatgatcgttgctcttgctgtgttgtttctatggtctaatgccactatgttcattcacaagtctccaccaaagattcctgaagttcatatccctgaagaacctcttcttcagcttgcttcgggtcttagaatcgaaatcaaccgtgggatctcttctcttcgtgagattgcgtcggggagggatatcaagaagttcctctctgctattgccggattgtgggttctatcgatcttgggcggctgctatagtttcttgacattggcatacatagctctggttctgctcttcactgttcctcttttctacgacaagtacgaagacaaagtagactcatacggtgagaaagcaatggctgagttgaagaagcaatacgctgtgttggacgcaaaggtattcagcaaaatcccaagaggaccgttgaaagacaagaagaaggattagttttttttggggtttttgttttgtgtgggttttctttggagtgcaatgtgcacaatgctctggtttttatacacgtgggttgtgttgtgttgtgaattggtaatctaaaaggttatgtgttagatctcaacccaaattttacttgacaactttgctttgtttttggagtggtttgtggcattagcacaatgattgtagtcgttctcttgatctatacttttaatgt

SEQ ID NO: 566 - protein, 271 aa, Arabidopsis thaliana
  peptide (1)..(271): Ceres Seq. ID no. 12370425
  misc_feature (1)..(271): NCBI GI NO: 15237093 NR Description: putative protein; protein id: At4g11220
  misc_feature (1)..(271): NCBI GI NO: 15236556 NR Description: putative protein; protein id: At4g23630
  misc_feature (24)..(271): NCBI GI NO: 15238125 NR Description: putative protein; protein id: At5g41600
  misc_feature (22)..(269): NCBI GI NO: 34909318 NR Description: OSJNBb0021A09.5
  misc_feature (17)..(271): NCBI GI NO: 15222616 NR Description: hypothetical protein; protein id: At1g64090
  misc_feature (54)..(269): NCBI GI NO: 34904202 NR Description: P0492F05.25
  misc_feature (24)..(59): NCBI GI NO: 34904202 NR Description: P0492F05.25
  misc_feature (20)..(270): NCBI GI NO: 18406991 NR Description: expressed protein; protein id: At2g46170
  misc_feature (42)..(261): NCBI GI NO: 15234108 NR Description: hypothetical protein; protein id: At4g01230.1
  misc_feature (22)..(268): NCBI GI NO: 15233147 NR Description: putative protein; protein id: At3g61560.1
MADEHKHEESSPNLDPAVEVVERESLMEKLSEKIHHKGDSSSSSSSDDENEKKSSSSSPKSLKSKVYRLFGRERPVHKVLGGGKPADIFMWKDKKMSGGVFGGATVAWVLFELMEYHLLTLLCHVMIVALAVLFLWSNATMFIHKSPPKIPEVHIPEEPLLQLASGLRIEINRGISSLREIASGRDIKKFLSAIAGLWVLSILGGCYSFLTLAYIALVLLFTVPLFYDKYEDKVDSYGEKAMAELKKQYAVLDAKVFSKIPRGPLKDKKKD

SEQ ID NO: 567 - protein, 245 aa, Arabidopsis thaliana
  peptide (1)..(245): Ceres Seq. ID no. 12370426
  misc_feature (1)..(245): NCBI GI NO: 15237093 NR Description: putative protein; protein id: At4g11220
  misc_feature (1)..(245): NCBI GI NO: 15236556 NR Description: putative protein; protein id: At4g23630
  misc_feature (1)..(245): NCBI GI NO: 15238125 NR Description: putative protein; protein id: At5g41600
  misc_feature (1)..(243): NCBI GI NO: 34909318 NR Description: OSJNBb0021A09.5
  misc_feature (1)..(245): NCBI GI NO: 15222616 NR Description: hypothetical protein; protein id: At1g64090
  misc_feature (28)..(243): NCBI GI NO: 34904202 NR Description: P0492F05.25
  misc_feature (1)..(33): NCBI GI NO: 34904202 NR Description: P0492F05.25
  misc_feature (1)..(244): NCBI GI NO: 18406991 NR Description: expressed protein; protein id: At2g46170
  misc_feature (16)..(235): NCBI GI NO: 15234108 NR Description: hypothetical protein; protein id: At4g01230.1
  misc_feature (1)..(242): NCBI GI NO: 15233147 NR Description: putative protein; protein id: At3g61560.1
MEKLSEKIHHKGDSSSSSSSDDENEKKSSSSSPKSLKSKVYRLFGRERPVHKVLGGGKPADIFMWKDKKMSGGVFGGATVAWVLFELMEYHLLTLLCHVMIVALAVLFLWSNATMFIHKSPPKIPEVHIPEEPLLQLASGLRIEINRGISSLREIASGRDIKKFLSAIAGLWVLSILGGCYSFLTLAYIALVLLFTVPLFYDKYEDKVDSYGEKAMAELKKQYAVLDAKVFSKIPRGPLKDKKKD

SEQ ID NO: 568 - protein, 182 aa, Arabidopsis thaliana
  peptide (1)..(182): Ceres Seq. ID no. 12370427
  misc_feature (1)..(182): NCBI GI NO: 15237093 NR Description: putative protein; protein id: At4g11220
  misc_feature (1)..(182): NCBI GI NO: 15236556 NR Description: putative protein; protein id: At4g23630
  misc_feature (1)..(182): NCBI GI NO: 15238125 NR Description: putative protein; protein id: At5g41600
  misc_feature (1)..(180): NCBI GI NO: 34909318 NR Description: OSJNBb0021A09.5
  misc_feature (1)..(182): NCBI GI NO: 15222616 NR Description: hypothetical protein; protein id: At1g64090
  misc_feature (1)..(180): NCBI GI NO: 34904202 NR Description: P0492F05.25
  misc_feature (1)..(181): NCBI GI NO: 18406991 NR Description: expressed protein; protein id: At2g46170
  misc_feature (1)..(172): NCBI GI NO: 15234108 NR Description: hypothetical protein; protein id: At4g01230.1
  misc_feature (1)..(179): NCBI GI NO: 15233147 NR Description: putative protein; protein id: At3g61560.1
  misc_feature (1)..(182): NCBI GI NO: 34897094 NR Description: unknown protein
MWKDKKMSGGVFGGATVAWVLFELMEYHLLTLLCHVMIVALAVLFLWSNATMFIHKSPPKIPEVHIPEEPLLQLASGLRIEINRGISSLREIASGRDIKKFLSAIAGLWVLSILGGCYSFLTLAYIALVLLFTVPLFYDKYEDKVDSYGEKAMAELKKQYAVLDAKVFSKIPRGPLKDKKKD

SEQ ID NO: 569 - DNA, 1289 bp, Arabidopsis thaliana
  misc_feature (1)..(1289): Ceres Seq. ID no. 12324513
acattcactcatatcactacactttccattaattaccaatatatttttactacttaaaaaagatattggtcttgaaatggagagttacttaacgaaatggtgtgtagtgcttgtgttgttgtgtttcgggtttagtgtagtaaaagcacaagcacaagctcaagttccatgtttctttgtttttggtgactctttggttgacaatggaaacaacaacggtcttatttctattgcaagatccaattacttcccttacggtatcgatttcggcggccctaccggccgtttctccaacggcaagactactgttgatgtgatcgctgagctacttggatttaatggctacattcctgcgtacaatactgtgagtggtcggcaaatactctccggagttaactacgcttccgcagctgctggaatccgagaagaaaccggtcgacaattgggacaaaggataagctttagtggacaagttaggaactaccagaccacagtatcgcaagttgtgcagcttctaggagacgagactcgtgcagctgattacctcaagagatgtatttactctgttggtttaggaagcaacgactatctcaacaactacttcatgcctacgttttactcttcaagcagacaattcacacccgaacaatacgctaacgatctcatcagtcgctacagcacccagctcaatgcattatacaactatggggctcgaaagtttgcattgagtggaattggagcagttggttgtagtcctaacgcgctcgcaggcagtcccgacggtaggacttgcgtagaccgcatcaactcagcaaaccagatcttcaacaacaagctaagatctcttgttgatcagctcaacaacaatcaccctgatgcaaagttcatctacatcaatgcttatggcattttccaggacatgatcacaaatcctgccagatttgggtttagagtgacgaacgcgggatgttgcggtattgggaggaatgctggacagatcacatgtttaccgggacagagaccgtgtagagaccgcaatgcgtacgtgttctgggacgcatttcaccctactgaagccgcaaatgtgatcatcgcaaggagatcgtacaatgcacaatcggcttcagacgcttaccctatggatatttcaaggctggcacagctttgaagaaacatagtaaaataagaactaaagaagttccacaaaccaatgtgtgatcttgttgtgtaccgtaccgctatttaagattttcttgacgtaattgaaatcgagtaaaacattattctac

SEQ ID NO: 570 - protein, 388 aa, Arabidopsis thaliana
  peptide (1)..(388): Ceres Seq. ID no. 12324514
  misc_feature (58)..(368): Pfam Name: Pfam Description:  GDSL-like Lipase/Acylhydrolase
  misc_feature (26)..(388): NCBI GI NO: 15220514 NR Description: lipase/hydrolase, putative; protein id: At1g29670
  misc_feature (26)..(388): NCBI GI NO: 21592417 NR Description: lipase/hydrolase, putative [Arabidopsis thaliana]
  misc_feature (26)..(388): NCBI GI NO: 15220512 NR Description: lipase/hydrolase, putative; protein id: At1g29660
  misc_feature (26)..(388): NCBI GI NO: 21594055 NR Description: lipase/hydrolase, putative [Arabidopsis thaliana]
  misc_feature (30)..(388): NCBI GI NO: 15242458 NR Description: GDSL-motif lipase/hydrolase-like protein
  misc_feature (30)..(388): NCBI GI NO: 21553940 NR Description: GDSL-motif lipase/hydrolase-like protein
  misc_feature (20)..(388): NCBI GI NO: 7485419 NR Description: hypothetical protein F13C5
  misc_feature (30)..(388): NCBI GI NO: 18415211 NR Description: Expressed protein; protein id: At4g18970
  misc_feature (30)..(388): NCBI GI NO: 21618199 NR Description: GDSL-motif lipase/hydrolase-like protein
  misc_feature (59)..(377): NCBI GI NO: 30693137 NR Description: lipase family [Arabidopsis thaliana]
HSLISLHFPLITNIFLLLKKDIGLEMESYLTKWCVVLVLLCFGFSVVKAQAQAQVPCFFVFGDSLVDNGNNNGLISIARSNYFPYGIDFGGPTGRFSNGKTTVDVIAELLGFNGYIPAYNTVSGRQILSGVNYASAAAGIREETGRQLGQRISFSGQVRNYQTTVSQVVQLLGDETRAADYLKRCIYSVGLGSNDYLNNYFMPTFYSSSRQFTPEQYANDLISRYSTQLNALYNYGARKFALSGIGAVGCSPNALAGSPDGRTCVDRINSANQIFNNKLRSLVDQLNNNHPDAKFIYINAYGIFQDMITNPARFGFRVTNAGCCGIGRNAGQITCLPGQRPCRDRNAYVFWDAFHPTEAANVIIARRSYNAQSASDAYPMDISRLAQL

SEQ ID NO: 571 - protein, 363 aa, Arabidopsis thaliana
  peptide (1)..(363): Ceres Seq. ID no. 12324515
  misc_feature (33)..(343): Pfam Name: Pfam Description:  GDSL-like Lipase/Acylhydrolase
  misc_feature (1)..(363): NCBI GI NO: 15220514 NR Description: lipase/hydrolase, putative; protein id: At1g29670
  misc_feature (1)..(363): NCBI GI NO: 21592417 NR Description: lipase/hydrolase, putative [Arabidopsis thaliana]
  misc_feature (1)..(363): NCBI GI NO: 15220512 NR Description: lipase/hydrolase, putative; protein id: At1g29660
  misc_feature (1)..(363): NCBI GI NO: 21594055 NR Description: lipase/hydrolase, putative [Arabidopsis thaliana]
  misc_feature (5)..(363): NCBI GI NO: 15242458 NR Description: GDSL-motif lipase/hydrolase-like protein
  misc_feature (5)..(363): NCBI GI NO: 21553940 NR Description: GDSL-motif lipase/hydrolase-like protein
  misc_feature (1)..(363): NCBI GI NO: 7485419 NR Description: hypothetical protein F13C5
  misc_feature (5)..(363): NCBI GI NO: 18415211 NR Description: Expressed protein; protein id: At4g18970
  misc_feature (5)..(363): NCBI GI NO: 21618199 NR Description: GDSL-motif lipase/hydrolase-like protein
  misc_feature (34)..(352): NCBI GI NO: 30693137 NR Description: lipase family [Arabidopsis thaliana]
MESYLTKWCVVLVLLCFGFSVVKAQAQAQVPCFFVFGDSLVDNGNNNGLISIARSNYFPYGIDFGGPTGRFSNGKTTVDVIAELLGFNGYIPAYNTVSGRQILSGVNYASAAAGIREETGRQLGQRISFSGQVRNYQTTVSQVVQLLGDETRAADYLKRCIYSVGLGSNDYLNNYFMPTFYSSSRQFTPEQYANDLISRYSTQLNALYNYGARKFALSGIGAVGCSPNALAGSPDGRTCVDRINSANQIFNNKLRSLVDQLNNNHPDAKFIYINAYGIFQDMITNPARFGFRVTNAGCCGIGRNAGQITCLPGQRPCRDRNAYVFWDAFHPTEAANVIIARRSYNAQSASDAYPMDISRLAQL

SEQ ID NO: 572 - DNA, 865 bp, Arabidopsis thaliana
  misc_feature (1)..(865): Ceres Seq. ID no. 13580449
aattccaaaaacactccccaaatataatttcccgagaaaatcctcagccgctcgagctcagagtcgaaaatggtgtcaggatcagggatattctcgaagcgcgttgtcgtcgacgcgcgccaccacatgcttggccgtcttgcgtcgatcaccgccaaagagcttctcaatggccagaaagttgtcattgtccggtgcgaagagatttgcctctccggtggactcgttcgtcagaaaatgaagtacatgaggtttcttcgcaaacgtatgaacactaaaccttctcatggtcctattcacttccgtgctccttccaaaatcttctggcgtaccgttcgcggtatgattccacacaagacgaagcgtggagctgctgcactagcacgtttgaaggtatatgaaggtgttcctactccatatgacaagatcaagaggatgggtcatccctgatgctctcaaggtgttgaggcttcaagctggtcacaaatactgtctgttgggccgtctttcttctgaagttgggtggaaccattacgacaccatcaaggagctggagacaaagaggaaggagagagcccacgtggtttacgagcgaaagaagcaacttaacaaacttagagttaaggccgagaaggtcgctgaagagaagctcggagcacagctcgatattcttgcgccagttaagtactgagcttgtcagtagtagttttttttttttggtaaggagcttgtcagtagtagtttgtctttgcatgttttgagccaacccaatacctttttactttttatcttttacttaggtcttgtatcgaaatttgtactcctaacattttattcttgagttttatttattatattgcgtggc

SEQ ID NO: 573 - protein, 126 aa, Arabidopsis thaliana
  peptide (1)..(126): Ceres Seq. ID no. 13580450
  misc_feature (11)..(126): Pfam Name: Pfam Description:  Ribosomal protein L13
  misc_feature (1)..(126): NCBI GI NO: 15239698 NR Description: 60S ribosomal protein L13A (RPL13aD)
  misc_feature (1)..(126): NCBI GI NO: 15235617 NR Description: 60S ribosomal protein L13A (RPL13aC)
  misc_feature (1)..(126): NCBI GI NO: 15231394 NR Description: 60S ribosomal protein L13A (RPL13aA)
  misc_feature (1)..(126): NCBI GI NO: 15230197 NR Description: 60S ribosomal protein L13A (RPL13aB)
  misc_feature (1)..(126): NCBI GI NO: 19423912 NR Description: putative 60S ribosomal protein
  misc_feature (1)..(126): NCBI GI NO: 3914535 NR Description: 60S RIBOSOMAL PROTEIN L13A
  misc_feature (1)..(126): NCBI GI NO: 21326116 NR Description: putative 60S ribosomal protein [Sorghum bicolor]
  misc_feature (1)..(126): NCBI GI NO: 37718812 NR Description: putative ribosomal protein L13a
  misc_feature (1)..(126): NCBI GI NO: 33146452 NR Description: putative 60S ribosomal protein
  misc_feature (1)..(126): NCBI GI NO: 40748267 NR Description: 60S ribosomal protein L13a [Capsicum annuum]
MVSGSGIFSKRVVVDARHHMLGRLASITAKELLNGQKVVIVRCEEICLSGGLVRQKMKYMRFLRKRMNTKPSHGPIHFRAPSKIFWRTVRGMIPHKTKRGAAALARLKVYEGVPTPYDKIKRMGHP

SEQ ID NO: 574 - protein, 107 aa, Arabidopsis thaliana
  peptide (1)..(107): Ceres Seq. ID no. 13580451
  misc_feature (1)..(107): Pfam Name: Pfam Description:  Ribosomal protein L13
  misc_feature (1)..(107): NCBI GI NO: 15239698 NR Description: 60S ribosomal protein L13A (RPL13aD)
  misc_feature (1)..(107): NCBI GI NO: 15235617 NR Description: 60S ribosomal protein L13A (RPL13aC)
  misc_feature (1)..(107): NCBI GI NO: 15231394 NR Description: 60S ribosomal protein L13A (RPL13aA)
  misc_feature (1)..(107): NCBI GI NO: 15230197 NR Description: 60S ribosomal protein L13A (RPL13aB)
  misc_feature (1)..(107): NCBI GI NO: 19423912 NR Description: putative 60S ribosomal protein
  misc_feature (1)..(107): NCBI GI NO: 3914535 NR Description: 60S RIBOSOMAL PROTEIN L13A
  misc_feature (1)..(107): NCBI GI NO: 21326116 NR Description: putative 60S ribosomal protein [Sorghum bicolor]
  misc_feature (1)..(107): NCBI GI NO: 37718812 NR Description: putative ribosomal protein L13a
  misc_feature (1)..(107): NCBI GI NO: 33146452 NR Description: putative 60S ribosomal protein
  misc_feature (1)..(107): NCBI GI NO: 40748267 NR Description: 60S ribosomal protein L13a [Capsicum annuum]
MLGRLASITAKELLNGQKVVIVRCEEICLSGGLVRQKMKYMRFLRKRMNTKPSHGPIHFRAPSKIFWRTVRGMIPHKTKRGAAALARLKVYEGVPTPYDKIKRMGHP

SEQ ID NO: 575 - protein, 97 aa, Arabidopsis thaliana
  peptide (1)..(97): Ceres Seq. ID no. 13580452
  misc_feature (15)..(97): NCBI GI NO: 15239698 NR Description: 60S ribosomal protein L13A (RPL13aD)
  misc_feature (15)..(97): NCBI GI NO: 15235617 NR Description: 60S ribosomal protein L13A (RPL13aC)
  misc_feature (15)..(97): NCBI GI NO: 15231394 NR Description: 60S ribosomal protein L13A (RPL13aA)
  misc_feature (15)..(97): NCBI GI NO: 15230197 NR Description: 60S ribosomal protein L13A (RPL13aB)
  misc_feature (15)..(97): NCBI GI NO: 19423912 NR Description: putative 60S ribosomal protein
  misc_feature (15)..(97): NCBI GI NO: 3914535 NR Description: 60S RIBOSOMAL PROTEIN L13A
  misc_feature (15)..(97): NCBI GI NO: 21326116 NR Description: putative 60S ribosomal protein [Sorghum bicolor]
  misc_feature (10)..(97): NCBI GI NO: 37718812 NR Description: putative ribosomal protein L13a
  misc_feature (10)..(97): NCBI GI NO: 33146452 NR Description: putative 60S ribosomal protein
  misc_feature (15)..(80): NCBI GI NO: 40748267 NR Description: 60S ribosomal protein L13a [Capsicum annuum]
MKVFLLHMTRSRGWVIPDALKVLRLQAGHKYCLLGRLSSEVGWNHYDTIKELETKRKERAHVVYERKKQLNKLRVKAEKVAEEKLGAQLDILAPVKY

SEQ ID NO: 576 - DNA, 627 bp, Arabidopsis thaliana
  misc_feature (1)..(627): Ceres Seq. ID no. 12377321
cataatcctcaaaaatctcaactttatctcccaaaacacaaaacaaaaaaaaatggcttccactgctctctcaagcgccatcgtcggaacttcattcatccgtcgttccccagctccaatcagtctccgttcccttccatcagccaacacacaatccctcttcggtctcaaatcaggcaccgctcgtggtggacgtgtcacagccatggctacatacaaggtcaagttcatcacaccagaaggtgagctagaggttgagtgtgacgacgacgtctacgttcttgatgctgctgaggaagctggaatcgatttgccttactcttgccgtgctggttcttgttcgagctgtgctggtaaagttgtgtctggatctgttgatcagtctgaccagagtttccttgatgatgaacagattggtgaagggtttgttctcacttgtgctgcttaccctacctctgatgttaccattgaaacccacaaagaagaagacattgtttaagcctcacctactcaccagcttttgatggtttaaaaatcatgtctttataattgagtttgttgttacaaaactattgttatctgttgttattgttcctggtttggctcaccatcaatcgatgacatttt

SEQ ID NO: 577 - protein, 165 aa, Arabidopsis thaliana
  peptide (1)..(165): Ceres Seq. ID no. 12377322
  misc_feature (77)..(152): Pfam Name: Pfam Description:  2Fe-2S iron-sulfur cluster binding domain
  misc_feature (18)..(165): NCBI GI NO: 15219837 NR Description: ferrodoxin precursor; protein id: At1g60950
  misc_feature (18)..(165): NCBI GI NO: 15220256 NR Description: ferredoxin precusor isolog; protein id: At1g10960
  misc_feature (18)..(135): NCBI GI NO: 16604416 NR Description: At1g10960/T19D16_12 [Arabidopsis thaliana]
  misc_feature (18)..(164): NCBI GI NO: 3023743 NR Description: Ferredoxin I, chloroplast precursor
  misc_feature (18)..(164): NCBI GI NO: 119937 NR Description: Ferredoxin I, chloroplast precursor (Fd I)
  misc_feature (18)..(164): NCBI GI NO: 3023752 NR Description: Ferredoxin I, chloroplast precursor
  misc_feature (18)..(165): NCBI GI NO: 34921349 NR Description: Ferredoxin, chloroplast precursor (PFLP)
  misc_feature (70)..(165): NCBI GI NO: 81707 NR Description: ferredoxin [2Fe-2S] A, leaf - radish
  misc_feature (70)..(165): NCBI GI NO: 947124 NR Description: ferredoxin component a1
  misc_feature (18)..(164): NCBI GI NO: 119931 NR Description: Ferredoxin I, chloroplast precursor
IILKNLNFISQNTKQKKMASTALSSAIVGTSFIRRSPAPISLRSLPSANTQSLFGLKSGTARGGRVTAMATYKVKFITPEGELEVECDDDVYVLDAAEEAGIDLPYSCRAGSCSSCAGKVVSGSVDQSDQSFLDDEQIGEGFVLTCAAYPTSDVTIETHKEEDIV

SEQ ID NO: 578 - protein, 148 aa, Arabidopsis thaliana
  peptide (1)..(148): Ceres Seq. ID no. 12377323
  misc_feature (60)..(135): Pfam Name: Pfam Description:  2Fe-2S iron-sulfur cluster binding domain
  misc_feature (1)..(148): NCBI GI NO: 15219837 NR Description: ferrodoxin precursor; protein id: At1g60950
  misc_feature (1)..(148): NCBI GI NO: 15220256 NR Description: ferredoxin precusor isolog; protein id: At1g10960
  misc_feature (1)..(118): NCBI GI NO: 16604416 NR Description: At1g10960/T19D16_12 [Arabidopsis thaliana]
  misc_feature (1)..(147): NCBI GI NO: 3023743 NR Description: Ferredoxin I, chloroplast precursor
  misc_feature (1)..(147): NCBI GI NO: 119937 NR Description: Ferredoxin I, chloroplast precursor (Fd I)
  misc_feature (1)..(147): NCBI GI NO: 3023752 NR Description: Ferredoxin I, chloroplast precursor
  misc_feature (1)..(148): NCBI GI NO: 34921349 NR Description: Ferredoxin, chloroplast precursor (PFLP)
  misc_feature (53)..(148): NCBI GI NO: 81707 NR Description: ferredoxin [2Fe-2S] A, leaf - radish
  misc_feature (53)..(148): NCBI GI NO: 947124 NR Description: ferredoxin component a1
  misc_feature (1)..(147): NCBI GI NO: 119931 NR Description: Ferredoxin I, chloroplast precursor
MASTALSSAIVGTSFIRRSPAPISLRSLPSANTQSLFGLKSGTARGGRVTAMATYKVKFITPEGELEVECDDDVYVLDAAEEAGIDLPYSCRAGSCSSCAGKVVSGSVDQSDQSFLDDEQIGEGFVLTCAAYPTSDVTIETHKEEDIV

SEQ ID NO: 579 - protein, 97 aa, Arabidopsis thaliana
  peptide (1)..(97): Ceres Seq. ID no. 12377324
  misc_feature (9)..(84): Pfam Name: Pfam Description:  2Fe-2S iron-sulfur cluster binding domain
  misc_feature (1)..(97): NCBI GI NO: 15219837 NR Description: ferrodoxin precursor; protein id: At1g60950
  misc_feature (1)..(97): NCBI GI NO: 15220256 NR Description: ferredoxin precusor isolog; protein id: At1g10960
  misc_feature (1)..(67): NCBI GI NO: 16604416 NR Description: At1g10960/T19D16_12 [Arabidopsis thaliana]
  misc_feature (1)..(96): NCBI GI NO: 3023743 NR Description: Ferredoxin I, chloroplast precursor
  misc_feature (1)..(96): NCBI GI NO: 119937 NR Description: Ferredoxin I, chloroplast precursor (Fd I)
  misc_feature (1)..(96): NCBI GI NO: 3023752 NR Description: Ferredoxin I, chloroplast precursor
  misc_feature (1)..(97): NCBI GI NO: 34921349 NR Description: Ferredoxin, chloroplast precursor (PFLP)
  misc_feature (2)..(97): NCBI GI NO: 81707 NR Description: ferredoxin [2Fe-2S] A, leaf - radish
  misc_feature (2)..(97): NCBI GI NO: 947124 NR Description: ferredoxin component a1
  misc_feature (1)..(96): NCBI GI NO: 119931 NR Description: Ferredoxin I, chloroplast precursor
MATYKVKFITPEGELEVECDDDVYVLDAAEEAGIDLPYSCRAGSCSSCAGKVVSGSVDQSDQSFLDDEQIGEGFVLTCAAYPTSDVTIETHKEEDIV

SEQ ID NO: 580 - DNA, 647 bp, Arabidopsis thaliana
  misc_feature (1)..(647): Ceres Seq. ID no. 12394127
accaacgttgattattcttcttctctctttctcatctaaaccaaaaaatggcagatcagctcaccgatgatcagatctctgagttcaaggaagcttttagccttttcgacaaagacggagatggttgcatcacaacgaaagagctaggaacagtgatgagatcattaggtcaaaatccaacagaagcagagttacaagatatgataaacgaagtagatgctgatggtaacggaaccatagacttccctgagtttctgaacctaatggctaggaagatgaaggacactgactctgaagaagagctgaaagaagctttcagggttttcgataaggaccagaacggtttcatctcggcagctgagttaagacatgtaatgacaaatcttggtgagaagttaactgatgaagaagttgatgagatgatcaaagaagctgatgttgatggagatggtcagatcaattatgaagagtttgtcaaagttatgatggcaaagtgaggaaactattctcatatcttttctctctttttctttctttctttttttgaattgaacaactctgattattgctttattctatgtttgactgttcattattatgcattcgtcccaaatttcatgttatgaactattttgtgactttggggt

SEQ ID NO: 581 - protein, 149 aa, Arabidopsis thaliana
  peptide (1)..(149): Ceres Seq. ID no. 12394128
  misc_feature (12)..(40): Pfam Name: Pfam Description:  EF hand
  misc_feature (1)..(149): NCBI GI NO: 15225840 NR Description: calmodulin; protein id: At2g27030
  misc_feature (1)..(149): NCBI GI NO: 30683369 NR Description: calmodulin [Arabidopsis thaliana]
  misc_feature (1)..(149): NCBI GI NO: 15229784 NR Description: calmodulin 7; protein id: At3g43810
  misc_feature (1)..(149): NCBI GI NO: 34304715 NR Description: calmodulin 4 [Daucus carota]
  misc_feature (1)..(149): NCBI GI NO: 3121848 NR Description: CALMODULIN
  misc_feature (1)..(149): NCBI GI NO: 34903134 NR Description: unnamed protein product
  misc_feature (1)..(149): NCBI GI NO: 115515 NR Description: Calmodulin
  misc_feature (1)..(149): NCBI GI NO: 3121849 NR Description: CALMODULIN
  misc_feature (1)..(149): NCBI GI NO: 30688187 NR Description: calmodulin-6 (CAM6) [Arabidopsis thaliana]
  misc_feature (1)..(149): NCBI GI NO: 289525 NR Description: calmodulin
MADQLTDDQISEFKEAFSLFDKDGDGCITTKELGTVMRSLGQNPTEAELQDMINEVDADGNGTIDFPEFLNLMARKMKDTDSEEELKEAFRVFDKDQNGFISAAELRHVMTNLGEKLTDEEVDEMIKEADVDGDGQINYEEFVKVMMAK

SEQ ID NO: 582 - protein, 113 aa, Arabidopsis thaliana
  peptide (1)..(113): Ceres Seq. ID no. 12394129
  misc_feature (1)..(113): NCBI GI NO: 15225840 NR Description: calmodulin; protein id: At2g27030
  misc_feature (1)..(113): NCBI GI NO: 30683369 NR Description: calmodulin [Arabidopsis thaliana]
  misc_feature (1)..(113): NCBI GI NO: 15229784 NR Description: calmodulin 7; protein id: At3g43810
  misc_feature (1)..(113): NCBI GI NO: 34304715 NR Description: calmodulin 4 [Daucus carota]
  misc_feature (1)..(113): NCBI GI NO: 3121848 NR Description: CALMODULIN
  misc_feature (1)..(113): NCBI GI NO: 34903134 NR Description: unnamed protein product
  misc_feature (1)..(113): NCBI GI NO: 115515 NR Description: Calmodulin
  misc_feature (1)..(113): NCBI GI NO: 3121849 NR Description: CALMODULIN
  misc_feature (1)..(113): NCBI GI NO: 30688187 NR Description: calmodulin-6 (CAM6) [Arabidopsis thaliana]
  misc_feature (1)..(113): NCBI GI NO: 289525 NR Description: calmodulin
MRSLGQNPTEAELQDMINEVDADGNGTIDFPEFLNLMARKMKDTDSEEELKEAFRVFDKDQNGFISAAELRHVMTNLGEKLTDEEVDEMIKEADVDGDGQINYEEFVKVMMAK

SEQ ID NO: 583 - protein, 98 aa, Arabidopsis thaliana
  peptide (1)..(98): Ceres Seq. ID no. 12394130
  misc_feature (1)..(98): NCBI GI NO: 15225840 NR Description: calmodulin; protein id: At2g27030
  misc_feature (1)..(98): NCBI GI NO: 30683369 NR Description: calmodulin [Arabidopsis thaliana]
  misc_feature (1)..(98): NCBI GI NO: 15229784 NR Description: calmodulin 7; protein id: At3g43810
  misc_feature (1)..(98): NCBI GI NO: 34304715 NR Description: calmodulin 4 [Daucus carota]
  misc_feature (1)..(98): NCBI GI NO: 3121848 NR Description: CALMODULIN
  misc_feature (1)..(98): NCBI GI NO: 34903134 NR Description: unnamed protein product
  misc_feature (1)..(98): NCBI GI NO: 115515 NR Description: Calmodulin
  misc_feature (1)..(98): NCBI GI NO: 3121849 NR Description: CALMODULIN
  misc_feature (1)..(98): NCBI GI NO: 30688187 NR Description: calmodulin-6 (CAM6) [Arabidopsis thaliana]
  misc_feature (1)..(98): NCBI GI NO: 289525 NR Description: calmodulin
MINEVDADGNGTIDFPEFLNLMARKMKDTDSEEELKEAFRVFDKDQNGFISAAELRHVMTNLGEKLTDEEVDEMIKEADVDGDGQINYEEFVKVMMAK

SEQ ID NO: 584 - DNA, 702 bp, Arabidopsis thaliana
  misc_feature (1)..(702): Ceres Seq. ID no. 13509139
atgcgtatgagttgtaacggatgtcgagttctacgaaaaggctgcagtgaaaactgtagcataagaccttgtcttcaatggatcaaatccgctgaatctcaagccaacgccaccgtcttcctcgccaagttttatggccgtgcggggctcatgaacctcctcaacaccggtcctgaccacctccgtcctgcgatatttagatcattgttgtacgaagcatgcgggaggattgtgaatccgatatacggatccgtggggttattgtggtcaggaaactggcatctttgtcaagcggccgttgaggcagtaatgagaggctcacccgtgactccgatcgcatgcgacgcagcggttactggtcaagcacctccttttaacaacaagctttgcgacataagacacgtgtcaagcagggacgagaacgttaagagacggagccgtggtgcatgcaaggaagagagaaacgtgaggtctttgagtcatgagtcgtcactgagtcacgagtcaccggtgtcttctgaggagacgacgacggaggaaccaaagacttggatcgggcttgagctgactttggggttggagcctttagcacgtggaaatcacgtggtggtaccgatgaagaaaagaaagttagagaggtgtggcacgtctgaggatgaggacacgtgtaagattgagcttggactggtgtgcagtgagtga

SEQ ID NO: 585 - protein, 233 aa, Arabidopsis thaliana
  peptide (1)..(233): Ceres Seq. ID no. 13509140
  misc_feature (4)..(109): Pfam Name: Pfam Description:  Protein of unknown function DUF260
  misc_feature (1)..(233): NCBI GI NO: 15219829 NR Description: lateral organ boundaries (LOB) domain family
  misc_feature (1)..(149): NCBI GI NO: 18396229 NR Description: lateral organ boundaries
  misc_feature (1)..(149): NCBI GI NO: 21554191 NR Description: unknown [Arabidopsis thaliana]
  misc_feature (1)..(182): NCBI GI NO: 34914608 NR Description: P0520B06.17
  misc_feature (1)..(148): NCBI GI NO: 34895540 NR Description: unnamed protein product
  misc_feature (1)..(136): NCBI GI NO: 15221429 NR Description: lateral organ boundaries
  misc_feature (3)..(180): NCBI GI NO: 15240739 NR Description: lateral organ boundaries
  misc_feature (3)..(180): NCBI GI NO: 21593577 NR Description: unknown [Arabidopsis thaliana]
  misc_feature (3)..(196): NCBI GI NO: 21592894 NR Description: unknown [Arabidopsis thaliana]
  misc_feature (3)..(113): NCBI GI NO: 15235604 NR Description: lateral organ boundaries (LOB) domain family
MRMSCNGCRVLRKGCSENCSIRPCLQWIKSAESQANATVFLAKFYGRAGLMNLLNTGPDHLRPAIFRSLLYEACGRIVNPIYGSVGLLWSGNWHLCQAAVEAVMRGSPVTPIACDAAVTGQAPPFNNKLCDIRHVSSRDENVKRRSRGACKEERNVRSLSHESSLSHESPVSSEETTTEEPKTWIGLELTLGLEPLARGNHVVVPMKKRKLERCGTSEDEDTCKIELGLVCSE

SEQ ID NO: 586 - protein, 231 aa, Arabidopsis thaliana
  peptide (1)..(231): Ceres Seq. ID no. 13509141
  misc_feature (2)..(107): Pfam Name: Pfam Description:  Protein of unknown function DUF260
  misc_feature (1)..(231): NCBI GI NO: 15219829 NR Description: lateral organ boundaries (LOB) domain family
  misc_feature (1)..(147): NCBI GI NO: 18396229 NR Description: lateral organ boundaries
  misc_feature (1)..(147): NCBI GI NO: 21554191 NR Description: unknown [Arabidopsis thaliana]
  misc_feature (1)..(180): NCBI GI NO: 34914608 NR Description: P0520B06.17
  misc_feature (1)..(146): NCBI GI NO: 34895540 NR Description: unnamed protein product
  misc_feature (1)..(134): NCBI GI NO: 15221429 NR Description: lateral organ boundaries
  misc_feature (1)..(178): NCBI GI NO: 15240739 NR Description: lateral organ boundaries
  misc_feature (1)..(178): NCBI GI NO: 21593577 NR Description: unknown [Arabidopsis thaliana]
  misc_feature (1)..(194): NCBI GI NO: 21592894 NR Description: unknown [Arabidopsis thaliana]
  misc_feature (1)..(111): NCBI GI NO: 15235604 NR Description: lateral organ boundaries (LOB) domain family
MSCNGCRVLRKGCSENCSIRPCLQWIKSAESQANATVFLAKFYGRAGLMNLLNTGPDHLRPAIFRSLLYEACGRIVNPIYGSVGLLWSGNWHLCQAAVEAVMRGSPVTPIACDAAVTGQAPPFNNKLCDIRHVSSRDENVKRRSRGACKEERNVRSLSHESSLSHESPVSSEETTTEEPKTWIGLELTLGLEPLARGNHVVVPMKKRKLERCGTSEDEDTCKIELGLVCSE

SEQ ID NO: 587 - protein, 183 aa, Arabidopsis thaliana
  peptide (1)..(183): Ceres Seq. ID no. 13509142
  misc_feature (1)..(59): Pfam Name: Pfam Description:  Protein of unknown function DUF260
  misc_feature (1)..(183): NCBI GI NO: 15219829 NR Description: lateral organ boundaries (LOB) domain family
  misc_feature (1)..(99): NCBI GI NO: 18396229 NR Description: lateral organ boundaries
  misc_feature (1)..(99): NCBI GI NO: 21554191 NR Description: unknown [Arabidopsis thaliana]
  misc_feature (1)..(132): NCBI GI NO: 34914608 NR Description: P0520B06.17
  misc_feature (1)..(98): NCBI GI NO: 34895540 NR Description: unnamed protein product
  misc_feature (1)..(86): NCBI GI NO: 15221429 NR Description: lateral organ boundaries
  misc_feature (1)..(130): NCBI GI NO: 15240739 NR Description: lateral organ boundaries
  misc_feature (1)..(130): NCBI GI NO: 21593577 NR Description: unknown [Arabidopsis thaliana]
  misc_feature (1)..(146): NCBI GI NO: 21592894 NR Description: unknown [Arabidopsis thaliana]
  misc_feature (1)..(63): NCBI GI NO: 15235604 NR Description: lateral organ boundaries (LOB) domain family
MNLLNTGPDHLRPAIFRSLLYEACGRIVNPIYGSVGLLWSGNWHLCQAAVEAVMRGSPVTPIACDAAVTGQAPPFNNKLCDIRHVSSRDENVKRRSRGACKEERNVRSLSHESSLSHESPVSSEETTTEEPKTWIGLELTLGLEPLARGNHVVVPMKKRKLERCGTSEDEDTCKIELGLVCSE

SEQ ID NO: 588 - DNA, 1002 bp, Arabidopsis thaliana
  misc_feature (1)..(1002): Ceres Seq. ID no. 12371985
acacacccatagtcgtcttcctcgatcagtctctctctcaaattgcaaaggtttcttcgaggactttggcatactgcagtttttctgattcggaattttaaataaaaatcggtcgtgacgatttaggttgttggagctgtagtgcttaaaaaccctaactttatactgtttagagcagcagtccctccatgtcaggtcttgtggcgttatgcagagctcgagcttctgcttcgtcttctttattcaacagcgttattcgtccagcatttcgcaatttctctacaggttttgctgatacacagaacaaatcattggtagcacaaatgaaagaagagatgctccacatggacatcaactcaatgataggaagttccatgccactaggtatgatgcgtatcggaacaatcatccacaacatcgagatgaacccagggcaaggcgcaaagatggtccgagctgcaggaaccaacgccaagatcctaaaggagcctgctaaagggaaatgcttgataaagcttccgtcaggggacaccaagtggatcaatgccaaatgtcgtgctacgattggcacagtgtcgaacccgtctcatggaacgaagaagctatataaagcaggacagagtaggtggttagggataaggcccaaagttagaggagtggcgatgaatccgtgtgatcatccacacggtggaggtgaaggaaaaagcaaaagtagtggaagcagaggaaggacatcggttagtccgtggggaaaaccgtgtaaaggcggttacaaatcagctagtgtcaagaagaagaagaagcgtttggcagaagcagcagccaaaatgtgatatgggtgaacaagtttcgattttcttcaaatgtttctttcttttaaaaagcctccaatgttatttggttacgttattgaatctgttttttgagagttttttaggcttcatgaaactagaagatctttgatcagttgagaataaatatggttacgtgtttacttttatt

SEQ ID NO: 589 - protein, 214 aa, Arabidopsis thaliana
  peptide (1)..(214): Ceres Seq. ID no. 12371986
  misc_feature (57)..(190): Pfam Name: Pfam Description:  Ribosomal Proteins L2, C-terminal domain
  misc_feature (1)..(214): NCBI GI NO: 18406440 NR Description: Expressed protein; protein id: At2g44065
  misc_feature (1)..(214): NCBI GI NO: 21592449 NR Description: unknown [Arabidopsis thaliana]
  misc_feature (46)..(214): NCBI GI NO: 1076398 NR Description: ribosomal protein L2 - Arabidopsis thaliana
  misc_feature (18)..(203): NCBI GI NO: 17644114 NR Description: ribosomal protein L2 [Gossypium arboreum]
  misc_feature (5)..(204): NCBI GI NO: 17644112 NR Description: ribosomal protein L2 [Lycopersicon esculentum]
  misc_feature (29)..(204): NCBI GI NO: 17644110 NR Description: ribosomal protein L2 [Zea mays]
  misc_feature (53)..(207): NCBI GI NO: 6094106 NR Description: MITOCHONDRIAL 60S RIBOSOMAL PROTEIN L2
  misc_feature (53)..(207): NCBI GI NO: 7440638 NR Description: probable ribosomal protein L2
  misc_feature (53)..(197): NCBI GI NO: 17933116 NR Description: ribosomal protein L2 [Dicentra sp. Qiu 95026]
  misc_feature (53)..(192): NCBI GI NO: 17933118 NR Description: ribosomal protein L2 [Platanus occidentalis]
MSGLVALCRARASASSSLFNSVIRPAFRNFSTGFADTQNKSLVAQMKEEMLHMDINSMIGSSMPLGMMRIGTIIHNIEMNPGQGAKMVRAAGTNAKILKEPAKGKCLIKLPSGDTKWINAKCRATIGTVSNPSHGTKKLYKAGQSRWLGIRPKVRGVAMNPCDHPHGGGEGKSKSSGSRGRTSVSPWGKPCKGGYKSASVKKKKKRLAEAAAKM

SEQ ID NO: 590 - protein, 169 aa, Arabidopsis thaliana
  peptide (1)..(169): Ceres Seq. ID no. 12371987
  misc_feature (12)..(145): Pfam Name: Pfam Description:  Ribosomal Proteins L2, C-terminal domain
  misc_feature (1)..(169): NCBI GI NO: 18406440 NR Description: Expressed protein; protein id: At2g44065
  misc_feature (1)..(169): NCBI GI NO: 21592449 NR Description: unknown [Arabidopsis thaliana]
  misc_feature (1)..(169): NCBI GI NO: 1076398 NR Description: ribosomal protein L2 - Arabidopsis thaliana
  misc_feature (1)..(158): NCBI GI NO: 17644114 NR Description: ribosomal protein L2 [Gossypium arboreum]
  misc_feature (1)..(159): NCBI GI NO: 17644112 NR Description: ribosomal protein L2 [Lycopersicon esculentum]
  misc_feature (1)..(159): NCBI GI NO: 17644110 NR Description: ribosomal protein L2 [Zea mays]
  misc_feature (8)..(162): NCBI GI NO: 6094106 NR Description: MITOCHONDRIAL 60S RIBOSOMAL PROTEIN L2
  misc_feature (8)..(162): NCBI GI NO: 7440638 NR Description: probable ribosomal protein L2
  misc_feature (8)..(152): NCBI GI NO: 17933116 NR Description: ribosomal protein L2 [Dicentra sp. Qiu 95026]
  misc_feature (8)..(147): NCBI GI NO: 17933118 NR Description: ribosomal protein L2 [Platanus occidentalis]
MKEEMLHMDINSMIGSSMPLGMMRIGTIIHNIEMNPGQGAKMVRAAGTNAKILKEPAKGKCLIKLPSGDTKWINAKCRATIGTVSNPSHGTKKLYKAGQSRWLGIRPKVRGVAMNPCDHPHGGGEGKSKSSGSRGRTSVSPWGKPCKGGYKSASVKKKKKRLAEAAAKM

SEQ ID NO: 591 - protein, 165 aa, Arabidopsis thaliana
  peptide (1)..(165): Ceres Seq. ID no. 12371988
  misc_feature (8)..(141): Pfam Name: Pfam Description:  Ribosomal Proteins L2, C-terminal domain
  misc_feature (1)..(165): NCBI GI NO: 18406440 NR Description: Expressed protein; protein id: At2g44065
  misc_feature (1)..(165): NCBI GI NO: 21592449 NR Description: unknown [Arabidopsis thaliana]
  misc_feature (1)..(165): NCBI GI NO: 1076398 NR Description: ribosomal protein L2 - Arabidopsis thaliana
  misc_feature (1)..(154): NCBI GI NO: 17644114 NR Description: ribosomal protein L2 [Gossypium arboreum]
  misc_feature (1)..(155): NCBI GI NO: 17644112 NR Description: ribosomal protein L2 [Lycopersicon esculentum]
  misc_feature (1)..(155): NCBI GI NO: 17644110 NR Description: ribosomal protein L2 [Zea mays]
  misc_feature (4)..(158): NCBI GI NO: 6094106 NR Description: MITOCHONDRIAL 60S RIBOSOMAL PROTEIN L2
  misc_feature (4)..(158): NCBI GI NO: 7440638 NR Description: probable ribosomal protein L2
  misc_feature (4)..(148): NCBI GI NO: 17933116 NR Description: ribosomal protein L2 [Dicentra sp. Qiu 95026]
  misc_feature (4)..(143): NCBI GI NO: 17933118 NR Description: ribosomal protein L2 [Platanus occidentalis]
MLHMDINSMIGSSMPLGMMRIGTIIHNIEMNPGQGAKMVRAAGTNAKILKEPAKGKCLIKLPSGDTKWINAKCRATIGTVSNPSHGTKKLYKAGQSRWLGIRPKVRGVAMNPCDHPHGGGEGKSKSSGSRGRTSVSPWGKPCKGGYKSASVKKKKKRLAEAAAKM

SEQ ID NO: 592 - DNA, 1223 bp, Arabidopsis thaliana
  misc_feature (1)..(1223): Ceres Seq. ID no. 12334539
aacgacaagtgacattatcattactctcatcgagagcgttggtctctcttctccttcacctttgagtttctcgaggctcttttcttaattttactgctaaatagtagtgtttactgtcttcagccgccgtcgccggattccattatcgaaggcgacggaagcagtatcttaggttttgtccgacgaagctccgtttgattgttatcggttccgttgtattcgtcgatcttccattttcgcatttgttttctatatccgaagatgggaagcagtccagctccgtttgccgatattggcaagaaagccaaagatctcctaaacaaggattacatttttgaccacaagtttactctcacaatgctgagtgctacaggaacggaatttgtggctactggtttgaagaaggatgatttcttttttggcgatataagcacactatataaaggtcaaaacaccattgttgatctgaaaatcgacagccactctagtgtgtcgacgaaagtaactctcaaaaatctcttgccatccgctaaagctgtaattagtttcaaaatacctgatcacaagtctggcaagctggatgtgcaatatgttcatcctcatgctacgctcaattccagcattggcctcaacccaactcctctgttagatctatcagcaactatcggaagccagaatgtttgccttggtggtgaagtcagtttcgacacagcttcatcatcactaacaaagtacaatgcagggattggtttcaacaaccaaggcgtctctgctgcactcatactggaggataaaggggagagtctgagagctacttacgtccacacagtgaacccaaccacatcctttggtgcagaactgatccgtcgcttctccaattataacaacagcttcaccgtcggaagctctcactctgtggatcaattcacagtggttaagaccagattttctaacagtgggaaagcagggatggtggtccagagagaatggagaccgaagtcgcacatcactttctcagctgagtatgactcaaaggctgtgacctcttcaccaaagcttggtctcgccctcgccctcaaaccataaaacaagaaaagagctcttatcagtttggaaaacacaaactaaacaattcaatttttcaccaagtgctaaaaaaatcacccccaaacgaacggtttgtagggttattgaatcacttttgcattaatatttgttttttc

SEQ ID NO: 593 - protein, 274 aa, Arabidopsis thaliana
  peptide (1)..(274): Ceres Seq. ID no. 12334540
  misc_feature (4)..(267): Pfam Name: Pfam Description:  Eukaryotic porin
  misc_feature (1)..(274): NCBI GI NO: 15242146 NR Description: porin-like protein; protein id: At5g57490
  misc_feature (1)..(274): NCBI GI NO: 36957233 NR Description: VDAC3.1 [Lotus corniculatus var. japonicus]
  misc_feature (1)..(274): NCBI GI NO: 629728 NR Description: porin I, 36K - potato
  misc_feature (1)..(274): NCBI GI NO: 1172556 NR Description: 36 kDa outer mitochondrial membrane protein porin
  misc_feature (5)..(274): NCBI GI NO: 7339529 NR Description: voltage-dependent anion channel [Oryza sativa]
  misc_feature (1)..(274): NCBI GI NO: 5031279 NR Description: porin [Prunus armeniaca]
  misc_feature (1)..(274): NCBI GI NO: 36957183 NR Description: VDAC1.2 [Lotus corniculatus var. japonicus]
  misc_feature (1)..(274): NCBI GI NO: 36957170 NR Description: VDAC1.1 [Lotus corniculatus var. japonicus]
  misc_feature (1)..(274): NCBI GI NO: 36957216 NR Description: VDAC2.1 [Lotus corniculatus var. japonicus]
  misc_feature (1)..(274): NCBI GI NO: 7442953 NR Description: porin - common ice plant
MGSSPAPFADIGKKAKDLLNKDYIFDHKFTLTMLSATGTEFVATGLKKDDFFFGDISTLYKGQNTIVDLKIDSHSSVSTKVTLKNLLPSAKAVISFKIPDHKSGKLDVQYVHPHATLNSSIGLNPTPLLDLSATIGSQNVCLGGEVSFDTASSSLTKYNAGIGFNNQGVSAALILEDKGESLRATYVHTVNPTTSFGAELIRRFSNYNNSFTVGSSHSVDQFTVVKTRFSNSGKAGMVVQREWRPKSHITFSAEYDSKAVTSSPKLGLALALKP

SEQ ID NO: 594 - protein, 242 aa, Arabidopsis thaliana
  peptide (1)..(242): Ceres Seq. ID no. 12334541
  misc_feature (1)..(235): Pfam Name: Pfam Description:  Eukaryotic porin
  misc_feature (1)..(242): NCBI GI NO: 15242146 NR Description: porin-like protein; protein id: At5g57490
  misc_feature (1)..(242): NCBI GI NO: 36957233 NR Description: VDAC3.1 [Lotus corniculatus var. japonicus]
  misc_feature (1)..(242): NCBI GI NO: 629728 NR Description: porin I, 36K - potato
  misc_feature (1)..(242): NCBI GI NO: 1172556 NR Description: 36 kDa outer mitochondrial membrane protein porin
  misc_feature (1)..(242): NCBI GI NO: 7339529 NR Description: voltage-dependent anion channel [Oryza sativa]
  misc_feature (1)..(242): NCBI GI NO: 5031279 NR Description: porin [Prunus armeniaca]
  misc_feature (1)..(242): NCBI GI NO: 36957183 NR Description: VDAC1.2 [Lotus corniculatus var. japonicus]
  misc_feature (1)..(242): NCBI GI NO: 36957170 NR Description: VDAC1.1 [Lotus corniculatus var. japonicus]
  misc_feature (1)..(242): NCBI GI NO: 36957216 NR Description: VDAC2.1 [Lotus corniculatus var. japonicus]
  misc_feature (1)..(242): NCBI GI NO: 7442953 NR Description: porin - common ice plant
MLSATGTEFVATGLKKDDFFFGDISTLYKGQNTIVDLKIDSHSSVSTKVTLKNLLPSAKAVISFKIPDHKSGKLDVQYVHPHATLNSSIGLNPTPLLDLSATIGSQNVCLGGEVSFDTASSSLTKYNAGIGFNNQGVSAALILEDKGESLRATYVHTVNPTTSFGAELIRRFSNYNNSFTVGSSHSVDQFTVVKTRFSNSGKAGMVVQREWRPKSHITFSAEYDSKAVTSSPKLGLALALKP

SEQ ID NO: 595 - DNA, 1005 bp, Arabidopsis thaliana
  misc_feature (1)..(1005): Ceres Seq. ID no. 12562843
atccaatttcatcacatcttattaactaaagagccttttacttgcgccacactctcaccgcaatggccgcctcgacaatggctctctcctctcctgctttgaccggaaaggccgttaagctatccccggcggcctccgaagtatttggaaccggccgaatcaccatgcgcaaagcctccaagcccaccggtccatccggcagcccatggtacggatccgaccgagtcaagtacttgggtccattctccggtgagcctccgagctacctcactggagagttccccggtgattacgggtgggacactgccggtctatccgccgatcccgagaccttcgctaggaaccgtgagctagaagttatccacagcagatgggccatgctcggagccctaggctgcgttttccctgagctattggctaggaacggagtgaagttcggagaagcggtttggttcaaggctggttcacagatcttcagcgacggaggattggactacttgggcaaccccgagcttggtccacgctcagagcatcttagccatttgggctactcaagttatcctcatgggagctgttgagggctaccagagtcgccggagatggtccattgggagaagcagaggacttgctttacccaggtgggagcttcgacccattgggcctcgctactgaccccgaggctttcgcggagttgaaggtgaaggagctcaagaacggaaggttggctatgttctctatgtttggattcttcgttcaggccattgtcaccggaaagggaccgttggagaacctcgcggaccacttggctgatccagtcaacaacaatgcatgggccttcgctaccaacttcgtccccggaaagtgagtttaatttgtgatcgagttgtgtgtatccggtttgttgcatcttggaaatgtgatgcagatttcatatcttgtaaattactttgtatgtgtgtgaaatatttaagaagctttatgatattgatggatcagtcacttact

SEQ ID NO: 596 - protein, 171 aa, Arabidopsis thaliana
  peptide (1)..(171): Ceres Seq. ID no. 12562844
  misc_feature (64)..(151): Pfam Name: Pfam Description:  Chlorophyll A-B binding protein
  misc_feature (1)..(151): NCBI GI NO: 18403549 NR Description: photosystem II type I  chlorophyll a /b binding
  misc_feature (1)..(151): NCBI GI NO: 21592428 NR Description: putative photosystem II type I chlorophyll a b bindingprotein
  misc_feature (1)..(151): NCBI GI NO: 115819 NR Description: Chlorophyll A-B binding protein 1B
  misc_feature (1)..(151): NCBI GI NO: 693914 NR Description: chlorophyll a/b binding protein
  misc_feature (1)..(151): NCBI GI NO: 224927 NR Description: protein 1B,chlorophyll binding
  misc_feature (1)..(151): NCBI GI NO: 693916 NR Description: chlorophyll a/b binding protein
  misc_feature (1)..(151): NCBI GI NO: 2645999 NR Description: chlorophyll a/b binding protein of LHCII type I precursor
  misc_feature (1)..(151): NCBI GI NO: 693920 NR Description: chlorophyll a/b binding protein
  misc_feature (1)..(151): NCBI GI NO: 482445 NR Description: chlorophyll a/b-binding protein precursor
  misc_feature (1)..(151): NCBI GI NO: 693922 NR Description: chlorophyll a/b binding protein
MAASTMALSSPALTGKAVKLSPAASEVFGTGRITMRKASKPTGPSGSPWYGSDRVKYLGPFSGEPPSYLTGEFPGDYGWDTAGLSADPETFARNRELEVIHSRWAMLGALGCVFPELLARNGVKFGEAVWFKAGSQIFSDGGLDYLGNPELGPRSEHLSHLGYSSYPHGSC

SEQ ID NO: 597 - protein, 166 aa, Arabidopsis thaliana
  peptide (1)..(166): Ceres Seq. ID no. 12562845
  misc_feature (59)..(146): Pfam Name: Pfam Description:  Chlorophyll A-B binding protein
  misc_feature (1)..(146): NCBI GI NO: 18403549 NR Description: photosystem II type I  chlorophyll a /b binding
  misc_feature (1)..(146): NCBI GI NO: 21592428 NR Description: putative photosystem II type I chlorophyll a b bindingprotein
  misc_feature (1)..(146): NCBI GI NO: 115819 NR Description: Chlorophyll A-B binding protein 1B
  misc_feature (1)..(146): NCBI GI NO: 693914 NR Description: chlorophyll a/b binding protein
  misc_feature (1)..(146): NCBI GI NO: 224927 NR Description: protein 1B,chlorophyll binding
  misc_feature (1)..(146): NCBI GI NO: 693916 NR Description: chlorophyll a/b binding protein
  misc_feature (1)..(146): NCBI GI NO: 2645999 NR Description: chlorophyll a/b binding protein of LHCII type I precursor
  misc_feature (1)..(146): NCBI GI NO: 693920 NR Description: chlorophyll a/b binding protein
  misc_feature (1)..(146): NCBI GI NO: 482445 NR Description: chlorophyll a/b-binding protein precursor
  misc_feature (1)..(146): NCBI GI NO: 693922 NR Description: chlorophyll a/b binding protein
MALSSPALTGKAVKLSPAASEVFGTGRITMRKASKPTGPSGSPWYGSDRVKYLGPFSGEPPSYLTGEFPGDYGWDTAGLSADPETFARNRELEVIHSRWAMLGALGCVFPELLARNGVKFGEAVWFKAGSQIFSDGGLDYLGNPELGPRSEHLSHLGYSSYPHGSC

SEQ ID NO: 598 - protein, 137 aa, Arabidopsis thaliana
  peptide (1)..(137): Ceres Seq. ID no. 12562846
  misc_feature (30)..(117): Pfam Name: Pfam Description:  Chlorophyll A-B binding protein
  misc_feature (1)..(117): NCBI GI NO: 18403549 NR Description: photosystem II type I  chlorophyll a /b binding
  misc_feature (1)..(117): NCBI GI NO: 21592428 NR Description: putative photosystem II type I chlorophyll a b bindingprotein
  misc_feature (1)..(117): NCBI GI NO: 115819 NR Description: Chlorophyll A-B binding protein 1B
  misc_feature (1)..(117): NCBI GI NO: 693914 NR Description: chlorophyll a/b binding protein
  misc_feature (1)..(117): NCBI GI NO: 224927 NR Description: protein 1B,chlorophyll binding
  misc_feature (1)..(117): NCBI GI NO: 693916 NR Description: chlorophyll a/b binding protein
  misc_feature (1)..(117): NCBI GI NO: 2645999 NR Description: chlorophyll a/b binding protein of LHCII type I precursor
  misc_feature (1)..(117): NCBI GI NO: 693920 NR Description: chlorophyll a/b binding protein
  misc_feature (1)..(117): NCBI GI NO: 482445 NR Description: chlorophyll a/b-binding protein precursor
  misc_feature (1)..(117): NCBI GI NO: 693922 NR Description: chlorophyll a/b binding protein
MRKASKPTGPSGSPWYGSDRVKYLGPFSGEPPSYLTGEFPGDYGWDTAGLSADPETFARNRELEVIHSRWAMLGALGCVFPELLARNGVKFGEAVWFKAGSQIFSDGGLDYLGNPELGPRSEHLSHLGYSSYPHGSC

SEQ ID NO: 599 - DNA, 1494 bp, Arabidopsis thaliana
  misc_feature (1)..(1494): Ceres Seq. ID no. 12324357
gagagatcactgtacttattgggttttgatctttgatggctccactgagtccaagagtagtggtgaaggtggatttgaagaagaagccatggcagcaggaccagccattgcacaatagatggcatccggagataccaccagtagcagaggtcaaggctggtgagtttttccgggtagaaatgattgatgcaatgggaggtgttatcaaggacaatgactctgcaagcgatatcaagaacctagtcctaactactactcatcacctaagtgggccgattagggttgtagatgaggaaggtgttgcagctaaagcaggtgatcttcttgctgttgagatatgcaacttgggtcctcttccaggagatgaatggggattcactggttcgtttgatagagagaatggtggcggtttcttgactgaccatttcccttgtgcgaccaaagctatttggtactttgaagggatctatgcctactctcctcagattcctggagtacgatttccgggtttgacacacccaggagtcattggcactgcaccatcgaatgaactcttgagaatatggaatgatagggaaagacaattagaagaaagtggtgttgagtccctaacactatgtgaggtagtgcatcagcggccattagcatgcctaccaacaactaaaggatgtctcctcgggaatattgaagaaggaacaccagaatgggaaaggattgcaaacgaggctgcgaggacaataccaggaagagaaaacggaggaaactgtgacattaaaaacctaagcagaggctctaaaatatatcttccagtatttgttgaaggggctaatctaagcacaggagacatgcatttctcacaaggtgatggtgagatctcgttctgcggagccatcgagatgagtggatttctagaactcaagtgtgaaatcataagaaatgggatgcaagagtaccttacgccaatgggacctacccctctccatgtaaacccaatctttgagataggaccagtggaaccgaggttctcagagtggcttgtcttcgaaggtatcagtgtcgatgagagcggaaaacagcattacctagatgcaacagttgcttacaaacgggcagttctcaacgccatagactatcttttcaaatttggttactcaaaagaacaggtgtacctcttactctcatgttgtccatgtgaaggaagactatctgggatagttgattctccgagtgccgttgctacactagcaatacctacagccatctttgatcaggatattaggccaaagaatcggaaggttccagtaggacctcgggttgtgaggaaaccagatgtactgaagagcacatatgatggaaagcttccaattacaaagaatccaagttcttcctcttagcttctacaaaaaaattaaaattaaaatttagaagctaataccaagattgtataatcaagcatatgttccaataataaagcaataacttggtgttttcttt

SEQ ID NO: 600 - protein, 452 aa, Arabidopsis thaliana
  peptide (1)..(452): Ceres Seq. ID no. 12324358
  misc_feature (8)..(202): Pfam Name: Pfam Description:  Acetamidase/Formamidase family
  misc_feature (1)..(452): NCBI GI NO: 21592429 NR Description: formamidase-like protein [Arabidopsis thaliana]
  misc_feature (1)..(452): NCBI GI NO: 18420069 NR Description: formamidase - like protein; protein id: At4g37550
  misc_feature (214)..(452): NCBI GI NO: 7488106 NR Description: probable formamidase (EC 3
  misc_feature (1)..(202): NCBI GI NO: 7488106 NR Description: probable formamidase (EC 3
  misc_feature (1)..(452): NCBI GI NO: 18420071 NR Description: formamidase - like protein; protein id: At4g37560
  misc_feature (1)..(452): NCBI GI NO: 14334654 NR Description: putative formamidase [Arabidopsis thaliana]
  misc_feature (1)..(451): NCBI GI NO: 34909818 NR Description: putative formamidase
  misc_feature (4)..(419): NCBI GI NO: 19115927 NR Description: formamidase-like protein
  misc_feature (12)..(416): NCBI GI NO: 33600391 NR Description: formamidase [Bordetella bronchiseptica]
  misc_feature (12)..(416): NCBI GI NO: 33592607 NR Description: formamidase [Bordetella pertussis]
MAPLSPRVVVKVDLKKKPWQQDQPLHNRWHPEIPPVAEVKAGEFFRVEMIDAMGGVIKDNDSASDIKNLVLTTTHHLSGPIRVVDEEGVAAKAGDLLAVEICNLGPLPGDEWGFTGSFDRENGGGFLTDHFPCATKAIWYFEGIYAYSPQIPGVRFPGLTHPGVIGTAPSNELLRIWNDRERQLEESGVESLTLCEVVHQRPLACLPTTKGCLLGNIEEGTPEWERIANEAARTIPGRENGGNCDIKNLSRGSKIYLPVFVEGANLSTGDMHFSQGDGEISFCGAIEMSGFLELKCEIIRNGMQEYLTPMGPTPLHVNPIFEIGPVEPRFSEWLVFEGISVDESGKQHYLDATVAYKRAVLNAIDYLFKFGYSKEQVYLLLSCCPCEGRLSGIVDSPSAVATLAIPTAIFDQDIRPKNRKVPVGPRVVRKPDVLKSTYDGKLPITKNPSSSS

SEQ ID NO: 601 - protein, 404 aa, Arabidopsis thaliana
  peptide (1)..(404): Ceres Seq. ID no. 12324359
  misc_feature (1)..(154): Pfam Name: Pfam Description:  Acetamidase/Formamidase family
  misc_feature (1)..(404): NCBI GI NO: 21592429 NR Description: formamidase-like protein [Arabidopsis thaliana]
  misc_feature (1)..(404): NCBI GI NO: 18420069 NR Description: formamidase - like protein; protein id: At4g37550
  misc_feature (166)..(404): NCBI GI NO: 7488106 NR Description: probable formamidase (EC 3
  misc_feature (1)..(154): NCBI GI NO: 7488106 NR Description: probable formamidase (EC 3
  misc_feature (1)..(404): NCBI GI NO: 18420071 NR Description: formamidase - like protein; protein id: At4g37560
  misc_feature (1)..(404): NCBI GI NO: 14334654 NR Description: putative formamidase [Arabidopsis thaliana]
  misc_feature (1)..(403): NCBI GI NO: 34909818 NR Description: putative formamidase
  misc_feature (1)..(371): NCBI GI NO: 19115927 NR Description: formamidase-like protein
  misc_feature (1)..(368): NCBI GI NO: 33600391 NR Description: formamidase [Bordetella bronchiseptica]
  misc_feature (1)..(368): NCBI GI NO: 33592607 NR Description: formamidase [Bordetella pertussis]
MIDAMGGVIKDNDSASDIKNLVLTTTHHLSGPIRVVDEEGVAAKAGDLLAVEICNLGPLPGDEWGFTGSFDRENGGGFLTDHFPCATKAIWYFEGIYAYSPQIPGVRFPGLTHPGVIGTAPSNELLRIWNDRERQLEESGVESLTLCEVVHQRPLACLPTTKGCLLGNIEEGTPEWERIANEAARTIPGRENGGNCDIKNLSRGSKIYLPVFVEGANLSTGDMHFSQGDGEISFCGAIEMSGFLELKCEIIRNGMQEYLTPMGPTPLHVNPIFEIGPVEPRFSEWLVFEGISVDESGKQHYLDATVAYKRAVLNAIDYLFKFGYSKEQVYLLLSCCPCEGRLSGIVDSPSAVATLAIPTAIFDQDIRPKNRKVPVGPRVVRKPDVLKSTYDGKLPITKNPSSSS

SEQ ID NO: 602 - protein, 400 aa, Arabidopsis thaliana
  peptide (1)..(400): Ceres Seq. ID no. 12324360
  misc_feature (1)..(150): Pfam Name: Pfam Description:  Acetamidase/Formamidase family
  misc_feature (1)..(400): NCBI GI NO: 21592429 NR Description: formamidase-like protein [Arabidopsis thaliana]
  misc_feature (1)..(400): NCBI GI NO: 18420069 NR Description: formamidase - like protein; protein id: At4g37550
  misc_feature (162)..(400): NCBI GI NO: 7488106 NR Description: probable formamidase (EC 3
  misc_feature (1)..(150): NCBI GI NO: 7488106 NR Description: probable formamidase (EC 3
  misc_feature (1)..(400): NCBI GI NO: 18420071 NR Description: formamidase - like protein; protein id: At4g37560
  misc_feature (1)..(400): NCBI GI NO: 14334654 NR Description: putative formamidase [Arabidopsis thaliana]
  misc_feature (1)..(399): NCBI GI NO: 34909818 NR Description: putative formamidase
  misc_feature (1)..(367): NCBI GI NO: 19115927 NR Description: formamidase-like protein
  misc_feature (1)..(364): NCBI GI NO: 33600391 NR Description: formamidase [Bordetella bronchiseptica]
  misc_feature (1)..(364): NCBI GI NO: 33592607 NR Description: formamidase [Bordetella pertussis]
MGGVIKDNDSASDIKNLVLTTTHHLSGPIRVVDEEGVAAKAGDLLAVEICNLGPLPGDEWGFTGSFDRENGGGFLTDHFPCATKAIWYFEGIYAYSPQIPGVRFPGLTHPGVIGTAPSNELLRIWNDRERQLEESGVESLTLCEVVHQRPLACLPTTKGCLLGNIEEGTPEWERIANEAARTIPGRENGGNCDIKNLSRGSKIYLPVFVEGANLSTGDMHFSQGDGEISFCGAIEMSGFLELKCEIIRNGMQEYLTPMGPTPLHVNPIFEIGPVEPRFSEWLVFEGISVDESGKQHYLDATVAYKRAVLNAIDYLFKFGYSKEQVYLLLSCCPCEGRLSGIVDSPSAVATLAIPTAIFDQDIRPKNRKVPVGPRVVRKPDVLKSTYDGKLPITKNPSSSS

SEQ ID NO: 603 - DNA, 1330 bp, Arabidopsis thaliana
  misc_feature (1)..(1330): Ceres Seq. ID no. 12324401
gattgagagcaaagtctcactctcttccttaagctctgagaaacctccgataagcttatcggacaaaaagagaagtagacgccgccatggataggcttttgcaacctccttcttctcactcaattgctccctccaaattccaatcaagaccatctcccttattactccaccgtctccactcaacgaatcttagtacttttccctcctctcgccgtctcgagtcacgccgaatcagctccatttcctgcttcttccgtcagaatccatcgccggatacatctccaggattgaatcagagtagtaatttcttgattgcttcttctcaaaccgatgcgtcgaaacctaatccaggatttatccaacggatcgtgagcagttttgagcaacgcaagaccataccggcaggaatggttatattagtctctgctatagctgcgcttttgcttaatcccattcttgtgccgcctgctttcgctagctttcaaacggctactaattctggtggagctgctgtggttggtggaaaactcctcaggactgaagtattgacaagtgcttggactggtttctttgctggttgcttacacacgttatctggacctgatcaccttgctgctttggctccactttcgattggacggacgagaatggagagtgctgcggttggagctctttggggatgtggtcatgacgctggtcagctcatctttggtttattgtttctgcttctaaaagataggctccacattgaagttataagaacttggggtacaagagttgttggtttgactctccttgtgattggtgctatgggaatcaaagaagcttctgagatgccggaaccatgtgttgttactttggagaatggggaaacagatgagaaaagcttaaagaagaaaaagatagggtttgcgacatttgcgactgggattgttcatggcctgcaaccggatgctctgatgatggtattgcctgcattggctcttccttctcggatagccggtgcttcgtttctcatcatgttcttgattgggacggtgattgcgatgggaagctacacagtttttattgggtcgtgtagcgaagcgttgaaagagaaagttcctaggatcactgagaaactaacgtgggcatcttctcttgtggccattggacttggattggcaattattgtcagccagttctttggattcagcctgtattgaagaaaacatcgtcaagtctttgtagctctctctgtaggataagattttttgcatgtaccaacaaaatttgtatctttgcttcagaatctttttcttcaatcaaatacaagtttgagtttggctcc

SEQ ID NO: 604 - protein, 372 aa, Arabidopsis thaliana
  peptide (1)..(372): Ceres Seq. ID no. 12324402
  misc_feature (1)..(372): NCBI GI NO: 15724154 NR Description: At2g16800/T24I21.21 [Arabidopsis thaliana]
  misc_feature (1)..(372): NCBI GI NO: 18398217 NR Description: expressed protein; protein id: At2g16800
  misc_feature (1)..(372): NCBI GI NO: 21592431 NR Description: unknown [Arabidopsis thaliana]
  misc_feature (1)..(372): NCBI GI NO: 18418571 NR Description: putative protein; protein id: At4g35080
  misc_feature (102)..(372): NCBI GI NO: 7486794 NR Description: hypothetical protein M4E13
  misc_feature (101)..(372): NCBI GI NO: 34897966 NR Description: hypothetical protein~similar to Arabidopsis thalianachromosome 2
  misc_feature (102)..(372): NCBI GI NO: 21397272 NR Description: Hypothetical protein
  misc_feature (153)..(321): NCBI GI NO: 33866162 NR Description: cyanobacterial conserved hypothetical protein
  misc_feature (153)..(321): NCBI GI NO: 33862611 NR Description: marine cyanobacterial conserved hypothetical
  misc_feature (153)..(323): NCBI GI NO: 33240819 NR Description: Hydrogenase accessory protein or high-affinity nickel-transport protein homolog
MDRLLQPPSSHSIAPSKFQSRPSPLLLHRLHSTNLSTFPSSRRLESRRISSISCFFRQNPSPDTSPGLNQSSNFLIASSQTDASKPNPGFIQRIVSSFEQRKTIPAGMVILVSAIAALLLNPILVPPAFASFQTATNSGGAAVVGGKLLRTEVLTSAWTGFFAGCLHTLSGPDHLAALAPLSIGRTRMESAAVGALWGCGHDAGQLIFGLLFLLLKDRLHIEVIRTWGTRVVGLTLLVIGAMGIKEASEMPEPCVVTLENGETDEKSLKKKKIGFATFATGIVHGLQPDALMMVLPALALPSRIAGASFLIMFLIGTVIAMGSYTVFIGSCSEALKEKVPRITEKLTWASSLVAIGLGLAIIVSQFFGFSLY

SEQ ID NO: 605 - protein, 265 aa, Arabidopsis thaliana
  peptide (1)..(265): Ceres Seq. ID no. 12324403
  misc_feature (1)..(265): NCBI GI NO: 15724154 NR Description: At2g16800/T24I21.21 [Arabidopsis thaliana]
  misc_feature (1)..(265): NCBI GI NO: 18398217 NR Description: expressed protein; protein id: At2g16800
  misc_feature (1)..(265): NCBI GI NO: 21592431 NR Description: unknown [Arabidopsis thaliana]
  misc_feature (1)..(265): NCBI GI NO: 18418571 NR Description: putative protein; protein id: At4g35080
  misc_feature (1)..(265): NCBI GI NO: 7486794 NR Description: hypothetical protein M4E13
  misc_feature (1)..(265): NCBI GI NO: 34897966 NR Description: hypothetical protein~similar to Arabidopsis thalianachromosome 2
  misc_feature (1)..(265): NCBI GI NO: 21397272 NR Description: Hypothetical protein
  misc_feature (46)..(214): NCBI GI NO: 33866162 NR Description: cyanobacterial conserved hypothetical protein
  misc_feature (46)..(214): NCBI GI NO: 33862611 NR Description: marine cyanobacterial conserved hypothetical
  misc_feature (46)..(216): NCBI GI NO: 33240819 NR Description: Hydrogenase accessory protein or high-affinity nickel-transport protein homolog
MVILVSAIAALLLNPILVPPAFASFQTATNSGGAAVVGGKLLRTEVLTSAWTGFFAGCLHTLSGPDHLAALAPLSIGRTRMESAAVGALWGCGHDAGQLIFGLLFLLLKDRLHIEVIRTWGTRVVGLTLLVIGAMGIKEASEMPEPCVVTLENGETDEKSLKKKKIGFATFATGIVHGLQPDALMMVLPALALPSRIAGASFLIMFLIGTVIAMGSYTVFIGSCSEALKEKVPRITEKLTWASSLVAIGLGLAIIVSQFFGFSLY

SEQ ID NO: 606 - DNA, 1033 bp, Arabidopsis thaliana
  misc_feature (1)..(1033): Ceres Seq. ID no. 12334955
acattaccatcattagaaaactttcctaattagatcaagatcgtcgttatctctcttgttttttcttcatataatttagttatttttagagaaatgggaaggggtagggttgaattgaagaggatagagaacaagatcaatagacaagtgacatactcgaaaagaagaactggtcttttgaagaaagctcaggagatctctgttctttgtgatgccgaggtttcccttattgtcttctcccataagggcaaatagttcgagtactcctctgaatcttgcatggagaaggtactagaacgctacgagaggtattcttacgccgagagacagctgattgcacctgactctcacgttaatgcacagacgaactggtcaatggagtatagcaggcttaaggccaagattgagcttttggagagaaaccaaaggcattatctgggagaagagttggaaccaatgagcctcaaggatctccaaaatctggagcagcagcttgagactgctcttaagcacattcgctccagaaaaaatcaactcatgaatgagtccctcaaccacctccaaagaaaggagaaggagatacaggaggaaaacagcatgcttaccaaacagataaagaagagggaaaacatcctaaggacaaaacaaatccaatgtgagcagctgaaccgcagcgtcgacgatgtaccacagccacaaccatttcaacacccccatctttacatgatcgctcatcagacttctcctttcctaaatatgggtggtttgtaccaaggagaagaccaaacggcgatgaggaggaacaatctggatctgactcttgaacccatttacaattaccttggctgttacgccgcttgaatagactacatcgatctatatcaatctctttaaaataatataagatcgatcctctattcatgatctatattaaacaccggttaattaatatatttttggtatgtccttatatcatatcaacatcatcaagcctttttccaattcaatatatcttgtatttcggggagcaatg

SEQ ID NO: 607 - protein, 193 aa, Arabidopsis thaliana
  peptide (1)..(193): Ceres Seq. ID no. 12334956
  misc_feature (13)..(114): Pfam Name: Pfam Description:  K-box region
  misc_feature (1)..(193): NCBI GI NO: 642589 NR Description: amino acid feature: K-box, bp 283
  misc_feature (1)..(193): NCBI GI NO: 18395839 NR Description: floral regulatory gene CAULIFLOWER
  misc_feature (1)..(193): NCBI GI NO: 30580167 NR Description: Transcription factor CAULIFLOWER
  misc_feature (1)..(193): NCBI GI NO: 6469345 NR Description: DNA-binding protein
  misc_feature (1)..(193): NCBI GI NO: 7446539 NR Description: MADS box protein homolog CAL - wild cabbage
  misc_feature (1)..(193): NCBI GI NO: 1561780 NR Description: homeotic protein boi2AP1 [Brassica oleracea]
  misc_feature (1)..(193): NCBI GI NO: 3913047 NR Description: Floral homeotic protein APETALA1 (MADS C)
  misc_feature (1)..(193): NCBI GI NO: 887392 NR Description: BOAP1 [Brassica oleracea]
  misc_feature (1)..(193): NCBI GI NO: 15222220 NR Description: floral homeotic gene APETALA1
  misc_feature (1)..(193): NCBI GI NO: 1561778 NR Description: homeotic protein boi1AP1 [Brassica oleracea]
MEKVLERYERYSYAERQLIAPDSHVNAQTNWSMEYSRLKAKIELLERNQRHYLGEELEPMSLKDLQNLEQQLETALKHIRSRKNQLMNESLNHLQRKEKEIQEENSMLTKQIKKRENILRTKQIQCEQLNRSVDDVPQPQPFQHPHLYMIAHQTSPFLNMGGLYQGEDQTAMRRNNLDLTLEPIYNYLGCYAA

SEQ ID NO: 608 - protein, 161 aa, Arabidopsis thaliana
  peptide (1)..(161): Ceres Seq. ID no. 12334957
  misc_feature (1)..(82): Pfam Name: Pfam Description:  K-box region
  misc_feature (1)..(161): NCBI GI NO: 642589 NR Description: amino acid feature: K-box, bp 283
  misc_feature (1)..(161): NCBI GI NO: 18395839 NR Description: floral regulatory gene CAULIFLOWER
  misc_feature (1)..(161): NCBI GI NO: 30580167 NR Description: Transcription factor CAULIFLOWER
  misc_feature (1)..(161): NCBI GI NO: 6469345 NR Description: DNA-binding protein
  misc_feature (1)..(161): NCBI GI NO: 7446539 NR Description: MADS box protein homolog CAL - wild cabbage
  misc_feature (1)..(161): NCBI GI NO: 1561780 NR Description: homeotic protein boi2AP1 [Brassica oleracea]
  misc_feature (1)..(161): NCBI GI NO: 3913047 NR Description: Floral homeotic protein APETALA1 (MADS C)
  misc_feature (1)..(161): NCBI GI NO: 887392 NR Description: BOAP1 [Brassica oleracea]
  misc_feature (1)..(161): NCBI GI NO: 15222220 NR Description: floral homeotic gene APETALA1
  misc_feature (1)..(161): NCBI GI NO: 1561778 NR Description: homeotic protein boi1AP1 [Brassica oleracea]
MEYSRLKAKIELLERNQRHYLGEELEPMSLKDLQNLEQQLETALKHIRSRKNQLMNESLNHLQRKEKEIQEENSMLTKQIKKRENILRTKQIQCEQLNRSVDDVPQPQPFQHPHLYMIAHQTSPFLNMGGLYQGEDQTAMRRNNLDLTLEPIYNYLGCYAA

SEQ ID NO: 609 - protein, 134 aa, Arabidopsis thaliana
  peptide (1)..(134): Ceres Seq. ID no. 12334958
  misc_feature (1)..(55): Pfam Name: Pfam Description:  K-box region
  misc_feature (1)..(134): NCBI GI NO: 642589 NR Description: amino acid feature: K-box, bp 283
  misc_feature (1)..(134): NCBI GI NO: 18395839 NR Description: floral regulatory gene CAULIFLOWER
  misc_feature (1)..(134): NCBI GI NO: 30580167 NR Description: Transcription factor CAULIFLOWER
  misc_feature (1)..(134): NCBI GI NO: 6469345 NR Description: DNA-binding protein
  misc_feature (1)..(134): NCBI GI NO: 7446539 NR Description: MADS box protein homolog CAL - wild cabbage
  misc_feature (1)..(134): NCBI GI NO: 1561780 NR Description: homeotic protein boi2AP1 [Brassica oleracea]
  misc_feature (1)..(134): NCBI GI NO: 3913047 NR Description: Floral homeotic protein APETALA1 (MADS C)
  misc_feature (1)..(134): NCBI GI NO: 887392 NR Description: BOAP1 [Brassica oleracea]
  misc_feature (1)..(134): NCBI GI NO: 15222220 NR Description: floral homeotic gene APETALA1
  misc_feature (1)..(134): NCBI GI NO: 1561778 NR Description: homeotic protein boi1AP1 [Brassica oleracea]
MSLKDLQNLEQQLETALKHIRSRKNQLMNESLNHLQRKEKEIQEENSMLTKQIKKRENILRTKQIQCEQLNRSVDDVPQPQPFQHPHLYMIAHQTSPFLNMGGLYQGEDQTAMRRNNLDLTLEPIYNYLGCYAA

SEQ ID NO: 610 - DNA, 1213 bp, Arabidopsis thaliana
  misc_feature (1)..(1213): Ceres Seq. ID no. 13647078
aacatacacatcaccactaagtagaagaaaaatggcgactcttaaggtttctgattctgttcctgctccttctgatgatgctgagcaattgagaaccgcttttgaaggatggggtacgaacgaggacttgatcatatcaatcttggctcacagaagtgctgaacagaggaaagtcatcaggcaagcataccatgaaacctacggcgaagaccttctcaagactcttgacaaggagctctctaacgacttcgagagagctatcttgttgtggactcttgaacccggtgagcgtgatgctttattggctaatgaagctacaaaaagatggacttcaagcaaccaagtgcttatggaagttgcttgcacaaggacatcaacgcagctgcttcacgctaggcaagcttaccatgctcgctacaagaagtctcttgaagaggacgttgctcaccacactaccggtgacttcagaaagcttttggtttctcttgttacctcatacaggtacgaaggagatgaagtgaacatgacattggctaagcaagaagctaagctggtccatgaaaaaatcaaggacaagcactacaatgatgaggatgttattagaatcttgtccacaagaagcaaagctcagatcaatgctacttttaaccgttaccaagatgatcatggcgaggaaattctcaagagtcttgaggaaggagatgatgatgacaagttccttgctttgttgaggtcaaccattcagtgcttgacaagaccagagctttactttgtcgatgttcttcgttcagcaatcaacaaaactggaactgatgaaggagcactcactagaattgtcaccacaagagctgagattgacttgaaggtcattggagaggagtaccagcgcaggaacagcattcctttggagaaagccattaccaaagacacacgtggagattacgagaagatgctcgtcgcacttctcggtgaagatgatgcttaatcaatcaatcctctacagagaaacataagcttctttatagcttatgttatctcttatctccctctctctatctctctttttgatgagtttcaaatcgtttgattttgtttctacaaaaaccttgtttgtttctgttgtgtgttttgagttactaaataatgcaaaagagagagacagagagaaccagtgtggtctcttaagttatatatatatgaagagcattggccc

SEQ ID NO: 611 - protein, 327 aa, Arabidopsis thaliana
  peptide (1)..(327): Ceres Seq. ID no. 15219131
  misc_feature (23)..(90): Pfam Name: Pfam Description:  Annexin
  misc_feature (11)..(327): NCBI GI NO: 15220216 NR Description: Ca2+-dependent membrane-binding protein annexin
  misc_feature (11)..(327): NCBI GI NO: 1621539 NR Description: annexin-like protein
  misc_feature (13)..(327): NCBI GI NO: 1429207 NR Description: annexin [Arabidopsis thaliana]
  misc_feature (11)..(323): NCBI GI NO: 7484723 NR Description: fiber annexin - upland cotton
  misc_feature (12)..(323): NCBI GI NO: 15214410 NR Description: annexin [Gossypium hirsutum]
  misc_feature (12)..(323): NCBI GI NO: 33357398 NR Description: Chain A, Annexin Gh1 From Cotton
  misc_feature (11)..(327): NCBI GI NO: 2459926 NR Description: annexin [Lavatera thuringiaca]
  misc_feature (12)..(323): NCBI GI NO: 7441510 NR Description: annexin - upland cotton (fragment)
  misc_feature (11)..(326): NCBI GI NO: 2129923 NR Description: annexin - pepper
  misc_feature (11)..(326): NCBI GI NO: 12084607 NR Description: Chain A, Crystal Structure Of Annexin 24
TYTSPLSRRKMATLKVSDSVPAPSDDAEQLRTAFEGWGTNEDLIISILAHRSAEQRKVIRQAYHETYGEDLLKTLDKELSNDFERAILLWTLEPGERDALLANEATKRWTSSNQVLMEVACTRTSTQLLHARQAYHARYKKSLEEDVAHHTTGDFRKLLVSLVTSYRYEGDEVNMTLAKQEAKLVHEKIKDKHYNDEDVIRILSTRSKAQINATFNRYQDDHGEEILKSLEEGDDDDKFLALLRSTIQCLTRPELYFVDVLRSAINKTGTDEGALTRIVTTRAEIDLKVIGEEYQRRNSIPLEKAITKDTRGDYEKMLVALLGEDDA

SEQ ID NO: 612 - protein, 317 aa, Arabidopsis thaliana
  peptide (1)..(317): Ceres Seq. ID no. 15219132
  misc_feature (13)..(80): Pfam Name: Pfam Description:  Annexin
  misc_feature (1)..(317): NCBI GI NO: 15220216 NR Description: Ca2+-dependent membrane-binding protein annexin
  misc_feature (1)..(317): NCBI GI NO: 1621539 NR Description: annexin-like protein
  misc_feature (3)..(317): NCBI GI NO: 1429207 NR Description: annexin [Arabidopsis thaliana]
  misc_feature (1)..(313): NCBI GI NO: 7484723 NR Description: fiber annexin - upland cotton
  misc_feature (2)..(313): NCBI GI NO: 15214410 NR Description: annexin [Gossypium hirsutum]
  misc_feature (2)..(313): NCBI GI NO: 33357398 NR Description: Chain A, Annexin Gh1 From Cotton
  misc_feature (1)..(317): NCBI GI NO: 2459926 NR Description: annexin [Lavatera thuringiaca]
  misc_feature (2)..(313): NCBI GI NO: 7441510 NR Description: annexin - upland cotton (fragment)
  misc_feature (1)..(316): NCBI GI NO: 2129923 NR Description: annexin - pepper
  misc_feature (1)..(316): NCBI GI NO: 12084607 NR Description: Chain A, Crystal Structure Of Annexin 24
MATLKVSDSVPAPSDDAEQLRTAFEGWGTNEDLIISILAHRSAEQRKVIRQAYHETYGEDLLKTLDKELSNDFERAILLWTLEPGERDALLANEATKRWTSSNQVLMEVACTRTSTQLLHARQAYHARYKKSLEEDVAHHTTGDFRKLLVSLVTSYRYEGDEVNMTLAKQEAKLVHEKIKDKHYNDEDVIRILSTRSKAQINATFNRYQDDHGEEILKSLEEGDDDDKFLALLRSTIQCLTRPELYFVDVLRSAINKTGTDEGALTRIVTTRAEIDLKVIGEEYQRRNSIPLEKAITKDTRGDYEKMLVALLGEDDA

SEQ ID NO: 613 - protein, 211 aa, Arabidopsis thaliana
  peptide (1)..(211): Ceres Seq. ID no. 15219133
  misc_feature (1)..(211): NCBI GI NO: 15220216 NR Description: Ca2+-dependent membrane-binding protein annexin
  misc_feature (1)..(211): NCBI GI NO: 1621539 NR Description: annexin-like protein
  misc_feature (1)..(211): NCBI GI NO: 1429207 NR Description: annexin [Arabidopsis thaliana]
  misc_feature (1)..(207): NCBI GI NO: 7484723 NR Description: fiber annexin - upland cotton
  misc_feature (1)..(207): NCBI GI NO: 15214410 NR Description: annexin [Gossypium hirsutum]
  misc_feature (1)..(207): NCBI GI NO: 33357398 NR Description: Chain A, Annexin Gh1 From Cotton
  misc_feature (1)..(211): NCBI GI NO: 2459926 NR Description: annexin [Lavatera thuringiaca]
  misc_feature (1)..(207): NCBI GI NO: 7441510 NR Description: annexin - upland cotton (fragment)
  misc_feature (1)..(210): NCBI GI NO: 2129923 NR Description: annexin - pepper
  misc_feature (1)..(210): NCBI GI NO: 12084607 NR Description: Chain A, Crystal Structure Of Annexin 24
MEVACTRTSTQLLHARQAYHARYKKSLEEDVAHHTTGDFRKLLVSLVTSYRYEGDEVNMTLAKQEAKLVHEKIKDKHYNDEDVIRILSTRSKAQINATFNRYQDDHGEEILKSLEEGDDDDKFLALLRSTIQCLTRPELYFVDVLRSAINKTGTDEGALTRIVTTRAEIDLKVIGEEYQRRNSIPLEKAITKDTRGDYEKMLVALLGEDDA

SEQ ID NO: 614 - DNA, 710 bp, Arabidopsis thaliana
  misc_feature (1)..(710): Ceres Seq. ID no. 13489897
gttctaaaattaagacaactctaaatgttagtatcgtttctgtaatatttattatatcctcttcttcttttttactgattcatcaaatcggggatcggataagcctgactgcttcagggtttaagggttactctcactcacacttccgctggtttgacaagattggataaaagcagccatggcaagtctgataatgactacaccattcccaggttctgtcactacatgtaagaagacaaataacctgtcagttcaaagagcctttagggtgacttgtatgcagacagagaaaccattagaggagctatacaatgttaaagtggaacggaaagtttcacagaaacggttggaggaacttggggtttcgagatggtcagtttggaagacagggaaatgcaaattgccatgggattggcaggtggatcagttggtttacattgaacaaggagaggttcgagttgttcccgaaggaagcaagaggtatatgcagtttttagctggagatcttgttcggtatccgaaatggttggaagctgatcttttctttaacgctccttatattgagcggtattgtttcaaggcctatggtgatgattgatccaactttgacttttgagtttttagtagagccaagaaactttacacttgttgtgtgttgttgtagcctgatggatctttttgtgataatataagaaaacaagttctctctc

SEQ ID NO: 615 - protein, 139 aa, Arabidopsis thaliana
  peptide (1)..(139): Ceres Seq. ID no. 13489898
  misc_feature (54)..(130): Pfam Name: DUF861 Pfam Description: Protein of unknown function
  misc_feature (1)..(139): NCBI GI NO: 15225202 NR Description: expressed protein [Arabidopsis thaliana]
  misc_feature (1)..(139): NCBI GI NO: 18403036 NR Description: expressed protein [Arabidopsis thaliana]
  misc_feature (1)..(139): NCBI GI NO: 21592432 NR Description: unknown [Arabidopsis thaliana]
  misc_feature (6)..(57): NCBI GI NO: 26451964 NR Description: unknown protein [Arabidopsis thaliana]
  misc_feature (11)..(115): NCBI GI NO: 38344542 NR Description: OSJNBa0027P08.10
  misc_feature (24)..(134): NCBI GI NO: 21553516 NR Description: unknown [Arabidopsis thaliana]
  misc_feature (42)..(134): NCBI GI NO: 15235021 NR Description: expressed protein [Arabidopsis thaliana]
  misc_feature (46)..(114): NCBI GI NO: 23127631 NR Description: hypothetical protein [Nostoc punctiforme]
  misc_feature (45)..(127): NCBI GI NO: 15229267 NR Description: hypothetical protein [Arabidopsis thaliana]
  misc_feature (20)..(115): NCBI GI NO: 15234988 NR Description: expressed protein [Arabidopsis thaliana]
MASLIMTTPFPGSVTTCKKTNNLSVQRAFRVTCMQTEKPLEELYNVKVERKVSQKRLEELGVSRWSVWKTGKCKLPWDWQVDQLVYIEQGEVRVVPEGSKRYMQFLAGDLVRYPKWLEADLFFNAPYIERYCFKAYGDD

SEQ ID NO: 616 - protein, 134 aa, Arabidopsis thaliana
  peptide (1)..(134): Ceres Seq. ID no. 13489899
  misc_feature (49)..(125): Pfam Name: DUF861 Pfam Description: Protein of unknown function
  misc_feature (1)..(134): NCBI GI NO: 15225202 NR Description: expressed protein [Arabidopsis thaliana]
  misc_feature (1)..(134): NCBI GI NO: 18403036 NR Description: expressed protein [Arabidopsis thaliana]
  misc_feature (1)..(134): NCBI GI NO: 21592432 NR Description: unknown [Arabidopsis thaliana]
  misc_feature (1)..(52): NCBI GI NO: 26451964 NR Description: unknown protein [Arabidopsis thaliana]
  misc_feature (6)..(110): NCBI GI NO: 38344542 NR Description: OSJNBa0027P08.10
  misc_feature (19)..(129): NCBI GI NO: 21553516 NR Description: unknown [Arabidopsis thaliana]
  misc_feature (37)..(129): NCBI GI NO: 15235021 NR Description: expressed protein [Arabidopsis thaliana]
  misc_feature (41)..(109): NCBI GI NO: 23127631 NR Description: hypothetical protein [Nostoc punctiforme]
  misc_feature (40)..(122): NCBI GI NO: 15229267 NR Description: hypothetical protein [Arabidopsis thaliana]
  misc_feature (15)..(110): NCBI GI NO: 15234988 NR Description: expressed protein [Arabidopsis thaliana]
MTTPFPGSVTTCKKTNNLSVQRAFRVTCMQTEKPLEELYNVKVERKVSQKRLEELGVSRWSVWKTGKCKLPWDWQVDQLVYIEQGEVRVVPEGSKRYMQFLAGDLVRYPKWLEADLFFNAPYIERYCFKAYGDD

SEQ ID NO: 617 - protein, 106 aa, Arabidopsis thaliana
  peptide (1)..(106): Ceres Seq. ID no. 13489900
  misc_feature (21)..(97): Pfam Name: DUF861 Pfam Description: Protein of unknown function
  misc_feature (1)..(106): NCBI GI NO: 15225202 NR Description: expressed protein [Arabidopsis thaliana]
  misc_feature (1)..(106): NCBI GI NO: 18403036 NR Description: expressed protein [Arabidopsis thaliana]
  misc_feature (1)..(106): NCBI GI NO: 21592432 NR Description: unknown [Arabidopsis thaliana]
  misc_feature (1)..(24): NCBI GI NO: 26451964 NR Description: unknown protein [Arabidopsis thaliana]
  misc_feature (1)..(82): NCBI GI NO: 38344542 NR Description: OSJNBa0027P08.10
  misc_feature (1)..(101): NCBI GI NO: 21553516 NR Description: unknown [Arabidopsis thaliana]
  misc_feature (9)..(101): NCBI GI NO: 15235021 NR Description: expressed protein [Arabidopsis thaliana]
  misc_feature (13)..(81): NCBI GI NO: 23127631 NR Description: hypothetical protein [Nostoc punctiforme]
  misc_feature (12)..(94): NCBI GI NO: 15229267 NR Description: hypothetical protein [Arabidopsis thaliana]
  misc_feature (1)..(82): NCBI GI NO: 15234988 NR Description: expressed protein [Arabidopsis thaliana]
MQTEKPLEELYNVKVERKVSQKRLEELGVSRWSVWKTGKCKLPWDWQVDQLVYIEQGEVRVVPEGSKRYMQFLAGDLVRYPKWLEADLFFNAPYIERYCFKAYGDD

SEQ ID NO: 618 - DNA, 1263 bp, Arabidopsis thaliana
  misc_feature (1)..(1263): Ceres Seq. ID no. 12324361
ttttcagagattgatgataggtgtagaagaaccatgaaatcgatattaattggatttgttttctttcttttatcatcatttcgtagcttcttcgtgaccaccacctattcccaagtgatccatcaccggcgtctacggccatggccaccgccagaatctgggtccggcccatcacctggcccatctccatcaccacataacaaaaccacaccggcagtgtttttctttggggattcgatcatagatacaggaaataataataatctaacaacagaaatgaaatgtaattttagtccttatggtaaggattttccactcggagttgcaactggtagattcagcaacggaaaggtcgtttccgattatatatctgaatatttgggagtaaaaccaattgtaccagcatattttgaccccaatgtacaactagaagatcttctcacgggtgtatcatttgcttcagagagtaaagtcaatgttggagcaattgacatatttccaacgacacatagcgagagtaaagaggttagtaggggaagagaagacggatcaactgttagccaagggcttatccgttgtggtcgcaggcagcaacgatttggctattacatattatggtcatggtgctcaattgctcaaagatgatatccactactttacttcaaagatggcaaattccgcggcaagttttgttatgcaattatacgaatatggagcaagacaaatagcagttctaggaacaccaccacttggctgcgtaccaatactaagaactctaaaaggaggtcttcgtagagagtgtgctcaagatataaactatgcttctcagcttttcaacgtcaaactctccaacattttggaccaattggcaaaaaacctaccaaattccaatctcatttacattgacatatactctgctttcagtcacatcttagaaaattcagcagattatgggtttgaagaaataaagagaggttgttgtggaactggatttgtggaagctggtccactttgcaatcgattcacaacatttgtgtgctccaatgtatctgcttacatgttttgggatagtctccatcctacccaaagattctataaaatcttaaccaaaatactttttgagaaatacatccacaatttaaattgagtagtgtgatcaaatgactcacattgtatgctttaagttttcttaaagcttgtgcagttgttattgtaagtcactatattgattaccaattgattttaagagaaacttttatcacg

SEQ ID NO: 619 - protein, 223 aa, Arabidopsis thaliana
  peptide (1)..(223): Ceres Seq. ID no. 12324362
  misc_feature (1)..(214): Pfam Name: Pfam Description:  GDSL-like Lipase/Acylhydrolase
  misc_feature (1)..(159): NCBI GI NO: 25511649 NR Description: T20H2.9 protein - Arabidopsis thaliana
  misc_feature (1)..(159): NCBI GI NO: 15223790 NR Description: anter-specific proline-rich protein APG precursor
  misc_feature (1)..(221): NCBI GI NO: 18394825 NR Description: anter-specific proline-rich protein APG precursor
  misc_feature (1)..(221): NCBI GI NO: 21592372 NR Description: anter-specific proline-rich protein APG precursor
  misc_feature (1)..(220): NCBI GI NO: 728868 NR Description: ANTER-SPECIFIC PROLINE-RICH PROTEIN APG
  misc_feature (1)..(223): NCBI GI NO: 99694 NR Description: proline-rich protein APG - Arabidopsis thaliana
  misc_feature (1)..(223): NCBI GI NO: 21431729 NR Description: Anter-specific proline-rich protein APG precursor
  misc_feature (1)..(219): NCBI GI NO: 18266041 NR Description: anther-specific proline-rich protein
  misc_feature (1)..(198): NCBI GI NO: 15223790 NR Description: anter-specific proline-rich protein APG precursor
  misc_feature (1)..(198): NCBI GI NO: 25511649 NR Description: T20H2.9 protein - Arabidopsis thaliana
MLEQLTYFQRHIARVKRLVGEEKTDQLLAKGLSVVVAGSNDLAITYYGHGAQLLKDDIHYFTSKMANSAASFVMQLYEYGARQIAVLGTPPLGCVPILRTLKGGLRRECAQDINYASQLFNVKLSNILDQLAKNLPNSNLIYIDIYSAFSHILENSADYGFEEIKRGCCGTGFVEAGPLCNRFTTFVCSNVSAYMFWDSLHPTQRFYKILTKILFEKYIHNLN

SEQ ID NO: 620 - protein, 214 aa, Arabidopsis thaliana
  peptide (1)..(214): Ceres Seq. ID no. 12324363
  misc_feature (73)..(177): Pfam Name: Pfam Description:  GDSL-like Lipase/Acylhydrolase
  misc_feature (16)..(154): NCBI GI NO: 25511649 NR Description: T20H2.9 protein - Arabidopsis thaliana
  misc_feature (72)..(154): NCBI GI NO: 15223790 NR Description: anter-specific proline-rich protein APG precursor
  misc_feature (46)..(154): NCBI GI NO: 15223790 NR Description: anter-specific proline-rich protein APG precursor
  misc_feature (46)..(154): NCBI GI NO: 25511649 NR Description: T20H2.9 protein - Arabidopsis thaliana
  misc_feature (4)..(154): NCBI GI NO: 18394825 NR Description: anter-specific proline-rich protein APG precursor
  misc_feature (4)..(154): NCBI GI NO: 21592372 NR Description: anter-specific proline-rich protein APG precursor
  misc_feature (47)..(177): NCBI GI NO: 728868 NR Description: ANTER-SPECIFIC PROLINE-RICH PROTEIN APG
  misc_feature (46)..(154): NCBI GI NO: 99694 NR Description: proline-rich protein APG - Arabidopsis thaliana
  misc_feature (46)..(154): NCBI GI NO: 21431729 NR Description: Anter-specific proline-rich protein APG precursor
  misc_feature (47)..(176): NCBI GI NO: 18266041 NR Description: anther-specific proline-rich protein
FSEIDDRCRRTMKSILIGFVFFLLSSFRSFFVTTTYSQVIHHRRLRPWPPPESGSGPSPGPSPSPHNKTTPAVFFFGDSIIDTGNNNNLTTEMKCNFSPYGKDFPLGVATGRFSNGKVVSDYISEYLGVKPIVPAYFDPNVQLEDLLTGVSFASESKVNVGAIDIFPTTHSESKEVSRGREDGSTVSQGLIRCGRRQQRFGYYILWSWCSIAQR

SEQ ID NO: 621 - protein, 203 aa, Arabidopsis thaliana
  peptide (1)..(203): Ceres Seq. ID no. 12324364
  misc_feature (62)..(166): Pfam Name: Pfam Description:  GDSL-like Lipase/Acylhydrolase
  misc_feature (5)..(143): NCBI GI NO: 25511649 NR Description: T20H2.9 protein - Arabidopsis thaliana
  misc_feature (61)..(143): NCBI GI NO: 15223790 NR Description: anter-specific proline-rich protein APG precursor
  misc_feature (35)..(143): NCBI GI NO: 15223790 NR Description: anter-specific proline-rich protein APG precursor
  misc_feature (35)..(143): NCBI GI NO: 25511649 NR Description: T20H2.9 protein - Arabidopsis thaliana
  misc_feature (1)..(143): NCBI GI NO: 18394825 NR Description: anter-specific proline-rich protein APG precursor
  misc_feature (1)..(143): NCBI GI NO: 21592372 NR Description: anter-specific proline-rich protein APG precursor
  misc_feature (36)..(166): NCBI GI NO: 728868 NR Description: ANTER-SPECIFIC PROLINE-RICH PROTEIN APG
  misc_feature (35)..(143): NCBI GI NO: 99694 NR Description: proline-rich protein APG - Arabidopsis thaliana
  misc_feature (35)..(143): NCBI GI NO: 21431729 NR Description: Anter-specific proline-rich protein APG precursor
  misc_feature (36)..(165): NCBI GI NO: 18266041 NR Description: anther-specific proline-rich protein
MKSILIGFVFFLLSSFRSFFVTTTYSQVIHHRRLRPWPPPESGSGPSPGPSPSPHNKTTPAVFFFGDSIIDTGNNNNLTTEMKCNFSPYGKDFPLGVATGRFSNGKVVSDYISEYLGVKPIVPAYFDPNVQLEDLLTGVSFASESKVNVGAIDIFPTTHSESKEVSRGREDGSTVSQGLIRCGRRQQRFGYYILWSWCSIAQR

SEQ ID NO: 622 - DNA, 1433 bp, Arabidopsis thaliana
  misc_feature (1)..(1433): Ceres Seq. ID no. 12439643
gtcgcatctcgattcaaagctattgataatttcgtcttcttcttccatggaataacgtgtttaggcgtgtatcacatggttctttctttgtgtgacacaaaaccaacataaagcttccatacgatttagacattgtcgatcgctattgtaagatctggtctgggtcctcgattttggtgaggattgtcgggtggaacaaaactctttcttaaaggctctgcagaaattaattctctgctctggctggatctgatagtgattttacagattgttcaggtcagaaatgggcaatccgggatcagacacagagagaaacaagggaaatgtggtctcaagtgtgtttgatcctgcactctctcgattcgttggattttcccagaaactccaaactcgtcttaagtcccagctgaagaatttgacagatgataagcatgggattggttcttcatggaggcaagataaaggaaactcatcgatctccatgcaaattgatctggagaaacagttagattgttggagggaaaacccttcgtggactgatcagatcccagtcgttaaggtgggtattccaaaaggatcgctttgcaatcttaaagccgaggtgaatgttggtttacctcctgatgcagtctataacattgtaattgaccctgacaatagaagagtcttcaagaatatcaaggaggttatgtcgcggaaagtattggtagatgacgggttaaggcaagtggtggaagttgaacaagcagctttgtggagatttctctggtggtcaggaacaatctcagttcatgtcttggtggatcaggatcgggcagatcactctatgaaattcaagcaagtgaaaagtggattcatgaagagattcgaaggaagctggcaagtaaagcctttgtttgtggatgaacatatgtgcgatcgtttgaaaccgaaaacgctggaggagtataacaggtgcactggaggtaaagggaggatcggatctaaggtaacgctggaccagctaatacagccagcgattgttccacctccgcccatttcttggtatctcagaggaatcacggctaagacgacagagatgcttatccatgacttgttggctgagaccgccaggatccgtgcagctggagtaatggaggatggtcactcgcccgatgagcaacggattggcacacctggagatataaaagaaagatggtctgcacatagaagaacatcaaggagacgacgcaatgatttgtgttaagtcacagactcacacagtccatgattctgggataatagatatcttgaggatttttggatcacccagcaatatgtgaacataatataatatttgttttcataagatacactggcatataaatgtgggaatctattccttgttgaagaagtttacaaccatgactcaatgactcatgaccattacaacc

SEQ ID NO: 623 - protein, 320 aa, Arabidopsis thaliana
  peptide (1)..(320): Ceres Seq. ID no. 12439644
  misc_feature (163)..(262): Pfam Name: Pfam Description:  Domain of unknown function DUF220
  misc_feature (1)..(320): NCBI GI NO: 18409585 NR Description: expressed protein; protein id: At1g70480
  misc_feature (1)..(320): NCBI GI NO: 21592433 NR Description: unknown [Arabidopsis thaliana]
  misc_feature (28)..(277): NCBI GI NO: 2129655 NR Description: hypothetical protein OBP32 - Arabidopsis thaliana
  misc_feature (28)..(315): NCBI GI NO: 18395257 NR Description: Expressed protein; protein id: At1g23560
  misc_feature (28)..(315): NCBI GI NO: 21554971 NR Description: unknown [Arabidopsis thaliana]
  misc_feature (28)..(315): NCBI GI NO: 8778583 NR Description: F28C11.19 [Arabidopsis thaliana]
  misc_feature (53)..(278): NCBI GI NO: 15220802 NR Description: putative OBP32pep protein; protein id: At1g23600.1
  misc_feature (26)..(278): NCBI GI NO: 15220845 NR Description: putative OBP32pep protein; protein id: At1g23690.1
  misc_feature (132)..(298): NCBI GI NO: 8778583 NR Description: F28C11.19 [Arabidopsis thaliana]
  misc_feature (70)..(140): NCBI GI NO: 8778583 NR Description: F28C11.19 [Arabidopsis thaliana]
MGNPGSDTERNKGNVVSSVFDPALSRFVGFSQKLQTRLKSQLKNLTDDKHGIGSSWRQDKGNSSISMQIDLEKQLDCWRENPSWTDQIPVVKVGIPKGSLCNLKAEVNVGLPPDAVYNIVIDPDNRRVFKNIKEVMSRKVLVDDGLRQVVEVEQAALWRFLWWSGTISVHVLVDQDRADHSMKFKQVKSGFMKRFEGSWQVKPLFVDEHMCDRLKPKTLEEYNRCTGGKGRIGSKVTLDQLIQPAIVPPPPISWYLRGITAKTTEMLIHDLLAETARIRAAGVMEDGHSPDEQRIGTPGDIKERWSAHRRTSRRRRNDLC

SEQ ID NO: 624 - protein, 254 aa, Arabidopsis thaliana
  peptide (1)..(254): Ceres Seq. ID no. 12439645
  misc_feature (97)..(196): Pfam Name: Pfam Description:  Domain of unknown function DUF220
  misc_feature (1)..(254): NCBI GI NO: 18409585 NR Description: expressed protein; protein id: At1g70480
  misc_feature (1)..(254): NCBI GI NO: 21592433 NR Description: unknown [Arabidopsis thaliana]
  misc_feature (1)..(211): NCBI GI NO: 2129655 NR Description: hypothetical protein OBP32 - Arabidopsis thaliana
  misc_feature (1)..(249): NCBI GI NO: 18395257 NR Description: Expressed protein; protein id: At1g23560
  misc_feature (1)..(249): NCBI GI NO: 21554971 NR Description: unknown [Arabidopsis thaliana]
  misc_feature (1)..(249): NCBI GI NO: 8778583 NR Description: F28C11.19 [Arabidopsis thaliana]
  misc_feature (1)..(212): NCBI GI NO: 15220802 NR Description: putative OBP32pep protein; protein id: At1g23600.1
  misc_feature (1)..(212): NCBI GI NO: 15220845 NR Description: putative OBP32pep protein; protein id: At1g23690.1
  misc_feature (66)..(232): NCBI GI NO: 8778583 NR Description: F28C11.19 [Arabidopsis thaliana]
  misc_feature (4)..(74): NCBI GI NO: 8778583 NR Description: F28C11.19 [Arabidopsis thaliana]
MQIDLEKQLDCWRENPSWTDQIPVVKVGIPKGSLCNLKAEVNVGLPPDAVYNIVIDPDNRRVFKNIKEVMSRKVLVDDGLRQVVEVEQAALWRFLWWSGTISVHVLVDQDRADHSMKFKQVKSGFMKRFEGSWQVKPLFVDEHMCDRLKPKTLEEYNRCTGGKGRIGSKVTLDQLIQPAIVPPPPISWYLRGITAKTTEMLIHDLLAETARIRAAGVMEDGHSPDEQRIGTPGDIKERWSAHRRTSRRRRNDLC

SEQ ID NO: 625 - protein, 185 aa, Arabidopsis thaliana
  peptide (1)..(185): Ceres Seq. ID no. 12439646
  misc_feature (28)..(127): Pfam Name: Pfam Description:  Domain of unknown function DUF220
  misc_feature (1)..(185): NCBI GI NO: 18409585 NR Description: expressed protein; protein id: At1g70480
  misc_feature (1)..(185): NCBI GI NO: 21592433 NR Description: unknown [Arabidopsis thaliana]
  misc_feature (1)..(142): NCBI GI NO: 2129655 NR Description: hypothetical protein OBP32 - Arabidopsis thaliana
  misc_feature (1)..(180): NCBI GI NO: 18395257 NR Description: Expressed protein; protein id: At1g23560
  misc_feature (1)..(180): NCBI GI NO: 21554971 NR Description: unknown [Arabidopsis thaliana]
  misc_feature (1)..(180): NCBI GI NO: 8778583 NR Description: F28C11.19 [Arabidopsis thaliana]
  misc_feature (1)..(143): NCBI GI NO: 15220802 NR Description: putative OBP32pep protein; protein id: At1g23600.1
  misc_feature (1)..(143): NCBI GI NO: 15220845 NR Description: putative OBP32pep protein; protein id: At1g23690.1
  misc_feature (1)..(163): NCBI GI NO: 8778583 NR Description: F28C11.19 [Arabidopsis thaliana]
  misc_feature (1)..(144): NCBI GI NO: 15220781 NR Description: OBP32pep protein, putative; protein id: At1g23520
MSRKVLVDDGLRQVVEVEQAALWRFLWWSGTISVHVLVDQDRADHSMKFKQVKSGFMKRFEGSWQVKPLFVDEHMCDRLKPKTLEEYNRCTGGKGRIGSKVTLDQLIQPAIVPPPPISWYLRGITAKTTEMLIHDLLAETARIRAAGVMEDGHSPDEQRIGTPGDIKERWSAHRRTSRRRRNDLC

SEQ ID NO: 626 - DNA, 811 bp, Arabidopsis thaliana
  misc_feature (1)..(811): Ceres Seq. ID no. 12321167
aatctataatcattttgtgactcttggagcactctcttctctttgtctctgtgactcacatggagaagaaactgtgaagataccattgacgttgatctatgatgacatcaagagcacttacaacgatatcaaccccgggatgatcataccttacagaatcaaggttgatctgattgtggatgtgccagtattgggaagactgacattgccgctggagaaatgtggagagatcccaattccaaagaaacctgatgttgatatcgagaagattaagttccagaagttctctttggaggaaaccgtggcgattctccatgtgaggcttcagaacatgaatgatttcgacttggggctcaatgacttggactgtgaagtttggctgtgtgatgtaagcattgggaaagcagagatcgcggactcgatcaagcttgacaaaaacggaagcggattgattaatgtgccgatgacattccgaccaaaggactttggttctgcgctttgggatatgattcgtggtaaaggaacagggtacacaatcaaaggtaatattgatgttgatacaccatttggagctatgaagcttcctattatcaaggaaggtggagagacccgtctgaagaaggaagatgatgatgacgacgatgaggaataaggaaacaaagtgctgcagagacagaatggtcatagttactaaatctccgatcttgaaatgtctatttaaaattaaaaaaaaaaagaaagacttgttttgtgtgctttttgataactgatggatcagacttttgaatagagccgtctttttattggactc

SEQ ID NO: 627 - protein, 216 aa, Arabidopsis thaliana
  peptide (1)..(216): Ceres Seq. ID no. 12321168
  misc_feature (19)..(86): Pfam Name: Pfam Description:  Late embryogenesis abundant protein
  misc_feature (19)..(216): NCBI GI NO: 15224810 NR Description: similar to late embryogenesis abundant proteins
  misc_feature (19)..(215): NCBI GI NO: 21592483 NR Description: similar to late embryogenesis abundant proteins
  misc_feature (19)..(216): NCBI GI NO: 3264769 NR Description: late embryogenesis-like protein [Prunus armeniaca]
  misc_feature (19)..(216): NCBI GI NO: 34394536 NR Description: late embryogenesis abundant proteins-like
IYNHFVTLGALSSLCLCDSHGEETVKIPLTLIYDDIKSTYNDINPGMIIPYRIKVDLIVDVPVLGRLTLPLEKCGEIPIPKKPDVDIEKIKFQKFSLEETVAILHVRLQNMNDFDLGLNDLDCEVWLCDVSIGKAEIADSIKLDKNGSGLINVPMTFRPKDFGSALWDMIRGKGTGYTIKGNIDVDTPFGAMKLPIIKEGGETRLKKEDDDDDDEE

SEQ ID NO: 628 - protein, 170 aa, Arabidopsis thaliana
  peptide (1)..(170): Ceres Seq. ID no. 12321169
  misc_feature (36)..(166): Pfam Name: Pfam Description:  Late embryogenesis abundant protein
  misc_feature (1)..(170): NCBI GI NO: 15224810 NR Description: similar to late embryogenesis abundant proteins
  misc_feature (1)..(169): NCBI GI NO: 21592483 NR Description: similar to late embryogenesis abundant proteins
  misc_feature (1)..(170): NCBI GI NO: 3264769 NR Description: late embryogenesis-like protein [Prunus armeniaca]
  misc_feature (1)..(170): NCBI GI NO: 34394536 NR Description: late embryogenesis abundant proteins-like
MIIPYRIKVDLIVDVPVLGRLTLPLEKCGEIPIPKKPDVDIEKIKFQKFSLEETVAILHVRLQNMNDFDLGLNDLDCEVWLCDVSIGKAEIADSIKLDKNGSGLINVPMTFRPKDFGSALWDMIRGKGTGYTIKGNIDVDTPFGAMKLPIIKEGGETRLKKEDDDDDDEE

SEQ ID NO: 629 - DNA, 842 bp, Arabidopsis thaliana
  misc_feature (1)..(842): Ceres Seq. ID no. 12332852
ctctctgtccctctctcgtaaccaaaagccgtctcagaagaaaactcaactgcgaagaatatggcgaccgatgatgtgaacgagcctctcccggcggcggcggaattaccggcgacagaggcggagaaacaaccacacaagctcgaaagaaagtggagtttctggttcgataaccaatcaaagaaaggcgccgcctggggagcttctcttcgtaaagcctatactttcgacaccgtcgaagatttttggggattgcacgagactatatttcagactagcaaattgacagcgaatgctgaaattcacttgttcaaagctggtgttgagccaaagtgggaagatccagagtgtgctaatggaggaaagtggacttgggttgttactgctaataggaaggaagctttagacaaaggctggcttgaaactttgatggctttgattggagagcaatttgatgaagcagatgagatttgtggtgtggttgctagtgtccgtccacagtcgaagcaagacaagctctccttgtggactaggacgaagtctaatgaagctgttctgatgggtattgggaagaagtggaaggagatacttgatgtcaccgacaagataactttcaataaccatgatgattccagaagaagccggttcactgtctgaagaaacgagtgtgaagccagaggaagatgcaatatggctttttttgtgatactgtttggtcggtttactcaaatagctgagacatttagggacattcactttgaggtgtaaactctacaaagttttctgtttcattaaaatgattttttgttataaattaagttgagttatataaatctctttcg

SEQ ID NO: 630 - protein, 198 aa, Arabidopsis thaliana
  peptide (1)..(198): Ceres Seq. ID no. 12332853
  misc_feature (1)..(198): Pfam Name: Pfam Description:  Eukaryotic initiation factor 4E
  misc_feature (1)..(198): NCBI GI NO: 2209274 NR Description: eukaryotic initiation factor (iso)-4F p28 subunit
  misc_feature (1)..(198): NCBI GI NO: 15238558 NR Description: eIF4Eiso protein (emb|CAA71579
  misc_feature (12)..(192): NCBI GI NO: 32698526 NR Description: eukaryotic translation initiation factor iso4E
  misc_feature (9)..(195): NCBI GI NO: 37535224 NR Description: cap-binding protein p28
  misc_feature (9)..(195): NCBI GI NO: 1352442 NR Description: EUKARYOTIC TRANSLATION INITIATION FACTOR 4E
  misc_feature (1)..(195): NCBI GI NO: 6016335 NR Description: EUKARYOTIC TRANSLATION INITIATION FACTOR 4E
  misc_feature (13)..(195): NCBI GI NO: 170753 NR Description: initiation factor (iso)4F p28 subunit
  misc_feature (13)..(195): NCBI GI NO: 547713 NR Description: EUKARYOTIC TRANSLATION INITIATION FACTOR 4E
  misc_feature (2)..(193): NCBI GI NO: 6016334 NR Description: EUKARYOTIC TRANSLATION INITIATION FACTOR 4E
  misc_feature (1)..(193): NCBI GI NO: 34905982 NR Description: eukaryotic translation initiation factor 4E
MATDDVNEPLPAAAELPATEAEKQPHKLERKWSFWFDNQSKKGAAWGASLRKAYTFDTVEDFWGLHETIFQTSKLTANAEIHLFKAGVEPKWEDPECANGGKWTWVVTANRKEALDKGWLETLMALIGEQFDEADEICGVVASVRPQSKQDKLSLWTRTKSNEAVLMGIGKKWKEILDVTDKITFNNHDDSRRSRFTV

SEQ ID NO: 631 - DNA, 1742 bp, Arabidopsis thaliana
  misc_feature (1)..(1742): Ceres Seq. ID no. 12377355
atcattcttagaaccaaaaaggaaagtcccaacgatcccattttactccttttcaccacctctagtagcagagagagagagagagtatggcgattacggtgccgagacggcaactcttcatcggcggtcaatggactgagcccgttctccgtaaaactctccctgttgtcaatcccgccaccgaagacatcatcggttatattccagctgcaacttctgaagatgtggagcttgctgtggaagctgctaggaaagcatttactaggaacaacggaaaggattgggctagagcaactggtgctgttcgtgccaaatacttgcgcgctattgcagctaaggtaatagagaggaagtctgaactagctaatcttgaggctattgattgcggtaaacctctagatgaagcagcatgggacatggatgatgttgctggatgttttgaatattatgctgacctagctgaaggcttggatgcaaagcagaagactcctctttctcttccgatggatacttttaagggttatattctcaaggaacccattggcgtagttggcatgattactccatggaactatccgttattgatggctgtctggaaagtcgctccttcacttgctgctgggtgcacggctatactgaaaccttcagagttggcctccctgacatgtttggagctcgctgatatttgccgcgaggtgggtctaccacctggtgttcttaatattctgactggtttaggaactgaagcaggtgctccactggcatcgcatccacatgttgacaagattgtattcactggaagcacaacaactggaagcagcattatgacttccgctgccaaattggtgaaaccagtttccttggagcttgggggtaaaagccctatcattgtctttgatgatgtcgatattgataaagctgtggaatggactatgtttggttgtttctggacgaatgggcagatttgtagtgccacatctcgacttcttgtgcatgaaaggattgctgacgagtttttggacaagctggtaaagtggaccaagaacattaagatttcagatccttttgaagaaggctgtaggcttggtcctgttgtcagtaaaggacagtacgagagagttctaaagtttgtctcaaacgctaggaatgaaggtgcaactgttctttgtggaggagttcgtcctgagcatttaaagaagggatactttgttgaacctgcgattgtttcaaatgtgactacttcaatggaaatctggagagaggaagtctttggtcctgctctgtgtgtgaaaacattctccaccgaggatgaggcaattcagcttgcaaatgactctcaatatggattagcaggcgcagtattatcaaatgatctggagcggtgtgatcgtgttagtaaggctttccaggcgggaatagtgtgggtcaactgctctcagccatgcttctgccaagctccatggggtggaaccaaacgcagtggatttggccgtgaattgggagaatggggacttgagaactacttgagtgtgaagcaggtgactcagtatatctctgatgaaccatggggatggtacaaacctccttccaagctctgagacaaacactagttcctgatatttccttaaaacatgtactcatgagaatataccaataaagcaagagacccttctgtaagagaaatggtattgctactttaaattcttgaaaaaaatgaaaaataagatgagatgatatttctt

SEQ ID NO: 632 - protein, 503 aa, Arabidopsis thaliana
  peptide (1)..(503): Ceres Seq. ID no. 12377356
  misc_feature (1)..(503): NCBI GI NO: 15228346 NR Description: betaine aldehyde dehydrogenase-like protein
  misc_feature (1)..(501): NCBI GI NO: 18410730 NR Description: betaine aldehyde dehydrogenase, putative
  misc_feature (1)..(500): NCBI GI NO: 11251896 NR Description: betaine-aldehyde dehydrogenase (EC 1.2.1.8)
  misc_feature (1)..(503): NCBI GI NO: 15131692 NR Description: putative aminoaldehyde dehydrogenase
  misc_feature (1)..(503): NCBI GI NO: 11414910 NR Description: betaine aldehyde dehydrogenase [Avicennia marina]
  misc_feature (1)..(500): NCBI GI NO: 2811031 NR Description: Betaine-aldehyde dehydrogenase
  misc_feature (1)..(503): NCBI GI NO: 30698520 NR Description: betaine aldehyde dehydrogenase
  misc_feature (5)..(503): NCBI GI NO: 3913464 NR Description: Betaine-aldehyde dehydrogenase (BADH)
  misc_feature (1)..(503): NCBI GI NO: 17221346 NR Description: aminoaldehyde dehydrogenase [Pisum sativum]
  misc_feature (1)..(500): NCBI GI NO: 20135572 NR Description: betaine aldehyde dehydrogenase BADH1
MAITVPRRQLFIGGQWTEPVLRKTLPVVNPATEDIIGYIPAATSEDVELAVEAARKAFTRNNGKDWARATGAVRAKYLRAIAAKVIERKSELANLEAIDCGKPLDEAAWDMDDVAGCFEYYADLAEGLDAKQKTPLSLPMDTFKGYILKEPIGVVGMITPWNYPLLMAVWKVAPSLAAGCTAILKPSELASLTCLELADICREVGLPPGVLNILTGLGTEAGAPLASHPHVDKIVFTGSTTTGSSIMTSAAKLVKPVSLELGGKSPIIVFDDVDIDKAVEWTMFGCFWTNGQICSATSRLLVHERIADEFLDKLVKWTKNIKISDPFEEGCRLGPVVSKGQYERVLKFVSNARNEGATVLCGGVRPEHLKKGYFVEPAIVSNVTTSMEIWREEVFGPALCVKTFSTEDEAIQLANDSQYGLAGAVLSNDLERCDRVSKAFQAGIVWVNCSQPCFCQAPWGGTKRSGFGRELGEWGLENYLSVKQVTQYISDEPWGWYKPPSKL

SEQ ID NO: 633 - protein, 393 aa, Arabidopsis thaliana
  peptide (1)..(393): Ceres Seq. ID no. 12377357
  misc_feature (1)..(393): NCBI GI NO: 15228346 NR Description: betaine aldehyde dehydrogenase-like protein
  misc_feature (1)..(391): NCBI GI NO: 18410730 NR Description: betaine aldehyde dehydrogenase, putative
  misc_feature (1)..(390): NCBI GI NO: 11251896 NR Description: betaine-aldehyde dehydrogenase (EC 1.2.1.8)
  misc_feature (1)..(393): NCBI GI NO: 15131692 NR Description: putative aminoaldehyde dehydrogenase
  misc_feature (1)..(393): NCBI GI NO: 11414910 NR Description: betaine aldehyde dehydrogenase [Avicennia marina]
  misc_feature (1)..(390): NCBI GI NO: 2811031 NR Description: Betaine-aldehyde dehydrogenase
  misc_feature (1)..(393): NCBI GI NO: 30698520 NR Description: betaine aldehyde dehydrogenase
  misc_feature (1)..(393): NCBI GI NO: 3913464 NR Description: Betaine-aldehyde dehydrogenase (BADH)
  misc_feature (1)..(393): NCBI GI NO: 17221346 NR Description: aminoaldehyde dehydrogenase [Pisum sativum]
  misc_feature (1)..(390): NCBI GI NO: 20135572 NR Description: betaine aldehyde dehydrogenase BADH1
MDDVAGCFEYYADLAEGLDAKQKTPLSLPMDTFKGYILKEPIGVVGMITPWNYPLLMAVWKVAPSLAAGCTAILKPSELASLTCLELADICREVGLPPGVLNILTGLGTEAGAPLASHPHVDKIVFTGSTTTGSSIMTSAAKLVKPVSLELGGKSPIIVFDDVDIDKAVEWTMFGCFWTNGQICSATSRLLVHERIADEFLDKLVKWTKNIKISDPFEEGCRLGPVVSKGQYERVLKFVSNARNEGATVLCGGVRPEHLKKGYFVEPAIVSNVTTSMEIWREEVFGPALCVKTFSTEDEAIQLANDSQYGLAGAVLSNDLERCDRVSKAFQAGIVWVNCSQPCFCQAPWGGTKRSGFGRELGEWGLENYLSVKQVTQYISDEPWGWYKPPSKL

SEQ ID NO: 634 - protein, 364 aa, Arabidopsis thaliana
  peptide (1)..(364): Ceres Seq. ID no. 12377358
  misc_feature (1)..(364): NCBI GI NO: 15228346 NR Description: betaine aldehyde dehydrogenase-like protein
  misc_feature (1)..(362): NCBI GI NO: 18410730 NR Description: betaine aldehyde dehydrogenase, putative
  misc_feature (1)..(361): NCBI GI NO: 11251896 NR Description: betaine-aldehyde dehydrogenase (EC 1.2.1.8)
  misc_feature (1)..(364): NCBI GI NO: 15131692 NR Description: putative aminoaldehyde dehydrogenase
  misc_feature (1)..(364): NCBI GI NO: 11414910 NR Description: betaine aldehyde dehydrogenase [Avicennia marina]
  misc_feature (1)..(361): NCBI GI NO: 2811031 NR Description: Betaine-aldehyde dehydrogenase
  misc_feature (1)..(364): NCBI GI NO: 30698520 NR Description: betaine aldehyde dehydrogenase
  misc_feature (1)..(364): NCBI GI NO: 3913464 NR Description: Betaine-aldehyde dehydrogenase (BADH)
  misc_feature (1)..(364): NCBI GI NO: 17221346 NR Description: aminoaldehyde dehydrogenase [Pisum sativum]
  misc_feature (1)..(361): NCBI GI NO: 20135572 NR Description: betaine aldehyde dehydrogenase BADH1
MDTFKGYILKEPIGVVGMITPWNYPLLMAVWKVAPSLAAGCTAILKPSELASLTCLELADICREVGLPPGVLNILTGLGTEAGAPLASHPHVDKIVFTGSTTTGSSIMTSAAKLVKPVSLELGGKSPIIVFDDVDIDKAVEWTMFGCFWTNGQICSATSRLLVHERIADEFLDKLVKWTKNIKISDPFEEGCRLGPVVSKGQYERVLKFVSNARNEGATVLCGGVRPEHLKKGYFVEPAIVSNVTTSMEIWREEVFGPALCVKTFSTEDEAIQLANDSQYGLAGAVLSNDLERCDRVSKAFQAGIVWVNCSQPCFCQAPWGGTKRSGFGRELGEWGLENYLSVKQVTQYISDEPWGWYKPPSKL

SEQ ID NO: 635 - DNA, 1188 bp, Arabidopsis thaliana
  misc_feature (1)..(1188): Ceres Seq. ID no. 12324550
aatctagaacaagaaaccaaaacatacaccacttctgtttttaaaggtaaaaaagatcaagaagaaaccaaagaaaatcagacagcaacaagaaaagatcagtttttaagagaaggaaagtaggaaacgggtcagattgttggatagagagaggaagcgaaaaaagagtcgcagtgttctttttccactgcgtggttttggtataatcagctgtggctacaacgaggaggcataatctaccgacgtcggattccggtgcgttcaccgactgggcggccacgacgacgacaccttcccgtgccaccgaggatctctctcttggtttcaatgctggttcctccgtcatccacggtggtttaggctcagcttcagtcgccgccggcgttccatcatggcctccgggatcttctgtccgttacggcctaccttcttcggcggcggcgacggagatgggcatggttggtctaagagatgttttccttgttgctccggcttatcaccaccagaacgccggagtgatatctggatccgatcatatgaacagtaatgcagctgcggcggcggcgctcgctgtcggagtgattcctctactcacggcgggtccaccgcagcaaaacgtggaagactccgacattaacttcctcggaaacaaccggagatggcagaataacaacaacaaccacgaaacgcagtatcttcacttcaagagtactaaccagacaacggtcggaacgagctcgaacaactcggggtctggctcaggcgcatcaggaaccgccacgtgtcaagactgtggaaatcaggcgaagaaagaatgtaagcagaggcggtgtaggacttgctgcaagagccgtggctttgattgttctactcacgtgaagagcacgtgggtctctgctgctcggcggagagagaggcaggtcatgcctaccggcgctaatccaacggctggctcgtctctttcgacctcctccgggacgaagaagccgaggatcgtagggtctcaacaacaacaacaacaacaacaacaacaacaagccacttctcatacttcaacttctaacacaccacctcaaagtttcgagaccagctccagccgacaaggtagttttacattttcattagtatacatagctacatgattttatgtatgtatatacatgcatataacactattagcccttcttg

SEQ ID NO: 636 - protein, 230 aa, Arabidopsis thaliana
  peptide (1)..(230): Ceres Seq. ID no. 12324551
  misc_feature (103)..(218): Pfam Name: DUF702 Pfam Description: Domain of unknown function
  misc_feature (1)..(218): NCBI GI NO: 882341 NR Description: LRP1
  misc_feature (1)..(218): NCBI GI NO: 18416839 NR Description: lateral root primordia
  misc_feature (1)..(225): NCBI GI NO: 34906658 NR Description: putative LRP(lateral root primordia) 1
  misc_feature (102)..(216): NCBI GI NO: 15239350 NR Description: zinc finger protein SHI-like
  misc_feature (73)..(157): NCBI GI NO: 15223669 NR Description: hypothetical protein; protein id: At1g19790.1
  misc_feature (100)..(157): NCBI GI NO: 15230389 NR Description: putative protein; protein id: At3g51060.1
  misc_feature (104)..(181): NCBI GI NO: 15234365 NR Description: putative protein; protein id: At4g36260.1
  misc_feature (100)..(157): NCBI GI NO: 15242760 NR Description: putative protein; protein id: At5g33210.1
  misc_feature (73)..(178): NCBI GI NO: 15222285 NR Description: unknown protein; protein id: At1g75520.1
  misc_feature (51)..(169): NCBI GI NO: 15224110 NR Description: unknown protein; protein id: At2g18120.1
MGMVGLRDVFLVAPAYHHQNAGVISGSDHMNSNAAAAAALAVGVIPLLTAGPPQQNVEDSDINFLGNNRRWQNNNNNHETQYLHFKSTNQTTVGTSSNNSGSGSGASGTATCQDCGNQAKKECKQRRCRTCCKSRGFDCSTHVKSTWVSAARRRERQVMPTGANPTAGSSLSTSSGTKKPRIVGSQQQQQQQQQQQATSHTSTSNTPPQSFETSSSRQGSFTFSLVYIAT

SEQ ID NO: 637 - protein, 228 aa, Arabidopsis thaliana
  peptide (1)..(228): Ceres Seq. ID no. 12324552
  misc_feature (101)..(216): Pfam Name: DUF702 Pfam Description: Domain of unknown function
  misc_feature (1)..(216): NCBI GI NO: 882341 NR Description: LRP1
  misc_feature (1)..(216): NCBI GI NO: 18416839 NR Description: lateral root primordia
  misc_feature (1)..(223): NCBI GI NO: 34906658 NR Description: putative LRP(lateral root primordia) 1
  misc_feature (100)..(214): NCBI GI NO: 15239350 NR Description: zinc finger protein SHI-like
  misc_feature (71)..(155): NCBI GI NO: 15223669 NR Description: hypothetical protein; protein id: At1g19790.1
  misc_feature (98)..(155): NCBI GI NO: 15230389 NR Description: putative protein; protein id: At3g51060.1
  misc_feature (102)..(179): NCBI GI NO: 15234365 NR Description: putative protein; protein id: At4g36260.1
  misc_feature (98)..(155): NCBI GI NO: 15242760 NR Description: putative protein; protein id: At5g33210.1
  misc_feature (71)..(176): NCBI GI NO: 15222285 NR Description: unknown protein; protein id: At1g75520.1
  misc_feature (49)..(167): NCBI GI NO: 15224110 NR Description: unknown protein; protein id: At2g18120.1
MVGLRDVFLVAPAYHHQNAGVISGSDHMNSNAAAAAALAVGVIPLLTAGPPQQNVEDSDINFLGNNRRWQNNNNNHETQYLHFKSTNQTTVGTSSNNSGSGSGASGTATCQDCGNQAKKECKQRRCRTCCKSRGFDCSTHVKSTWVSAARRRERQVMPTGANPTAGSSLSTSSGTKKPRIVGSQQQQQQQQQQQATSHTSTSNTPPQSFETSSSRQGSFTFSLVYIAT

SEQ ID NO: 638 - protein, 201 aa, Arabidopsis thaliana
  peptide (1)..(201): Ceres Seq. ID no. 12324553
  misc_feature (74)..(189): Pfam Name: DUF702 Pfam Description: Domain of unknown function
  misc_feature (1)..(189): NCBI GI NO: 882341 NR Description: LRP1
  misc_feature (1)..(189): NCBI GI NO: 18416839 NR Description: lateral root primordia
  misc_feature (1)..(196): NCBI GI NO: 34906658 NR Description: putative LRP(lateral root primordia) 1
  misc_feature (73)..(187): NCBI GI NO: 15239350 NR Description: zinc finger protein SHI-like
  misc_feature (44)..(128): NCBI GI NO: 15223669 NR Description: hypothetical protein; protein id: At1g19790.1
  misc_feature (71)..(128): NCBI GI NO: 15230389 NR Description: putative protein; protein id: At3g51060.1
  misc_feature (75)..(152): NCBI GI NO: 15234365 NR Description: putative protein; protein id: At4g36260.1
  misc_feature (71)..(128): NCBI GI NO: 15242760 NR Description: putative protein; protein id: At5g33210.1
  misc_feature (44)..(149): NCBI GI NO: 15222285 NR Description: unknown protein; protein id: At1g75520.1
  misc_feature (22)..(140): NCBI GI NO: 15224110 NR Description: unknown protein; protein id: At2g18120.1
MNSNAAAAAALAVGVIPLLTAGPPQQNVEDSDINFLGNNRRWQNNNNNHETQYLHFKSTNQTTVGTSSNNSGSGSGASGTATCQDCGNQAKKECKQRRCRTCCKSRGFDCSTHVKSTWVSAARRRERQVMPTGANPTAGSSLSTSSGTKKPRIVGSQQQQQQQQQQQATSHTSTSNTPPQSFETSSSRQGSFTFSLVYIAT

SEQ ID NO: 639 - DNA, 1162 bp, Arabidopsis thaliana
  misc_feature (1)..(1162): Ceres Seq. ID no. 12350405
gtagcagatctgagttttggagagttcaaaggaagaagataactccaataccagaggttcgtaacgattgaaagcattcaggaaacatgcctcctcagaagattgaaactggtcatagcgacactattcatgatgtggtcatggattactatggaaagcgagtagcaactgcctcgtctgactgcacgatcaagataaccggagtaagcaacagcggtggatctcagcatctagctaccttaaccggtcatcgaggtcctgtctggcaagtcgcttgggcgcacccaaagtttggttcacttctcgcttcatgttcctatgatgggcaaattatattatggaaagaaggtaaccaaaaccaatggacacaagctcatgtcttcacagaccacaaagtatctgtcaactctatcgcttgggctcctcatgaacttggactctccttagcttgcggagcatctgatggaaacatatcagttttctcggctcgagctgatggcggttgggacacgacaaagatagaccaagcacaccctgttggtgtcacttcagtgtcgtgggcaccggccacagaaccaggcgcactcgttagctctggtatgatcgatccggtctacaaactagcatccggcgggtgtgatagcacggtgaaagtgtggaagttctcgaacgggtcatggaaaatggattgtttcccggctctcaacaagcacacggattgggtccgtgatgtggcttgggcaccgaacttgggtctcccaaagtcaaccatagccagtggttcagaagatgggaaagtgatcatatggaccatagggaaagaaggtgagcaatgggaaggtactgttttgaaagatttcaaaacaccagtgtggcgggtctcgtggtcgttgaccggtaatttgttggctgtttccgatgggaacaataacgttacagtgtggaaagagtctgttgatggagagtgggaacaagtgactgttgttgagccatagattgttgtttgtttgtttggttatcttttgttttgtggtaatatcaaaatgtggtgtgttctgtatacaatttctagggacctgtttctctctatacgtttctcaggaaagtatattcttatgtattttaatcagacaacagagattgcaaaagaaatgtatttttc

SEQ ID NO: 640 - protein, 302 aa, Arabidopsis thaliana
  peptide (1)..(302): Ceres Seq. ID no. 12350406
  misc_feature (1)..(302): NCBI GI NO: 15232095 NR Description: transport protein SEC13, putative
  misc_feature (1)..(302): NCBI GI NO: 21593236 NR Description: transport protein SEC13, putative
  misc_feature (1)..(302): NCBI GI NO: 15227692 NR Description: G-protein beta family; protein id: At2g30050
  misc_feature (1)..(302): NCBI GI NO: 21593146 NR Description: putative protein transport protein SEC13
  misc_feature (1)..(301): NCBI GI NO: 18147582 NR Description: Sec13p [Oryza sativa]
  misc_feature (1)..(302): NCBI GI NO: 34393220 NR Description: putative Sec13p
  misc_feature (1)..(302): NCBI GI NO: 34897242 NR Description: putative coat protein complex II
  misc_feature (6)..(300): NCBI GI NO: 32451650 NR Description: Unknown (protein for MGC:63980) [Danio rerio]
  misc_feature (6)..(300): NCBI GI NO: 38174439 NR Description: Unknown (protein for MGC:76017)
  misc_feature (6)..(300): NCBI GI NO: 27696242 NR Description: Similar to RIKEN cDNA 1110003H02 gene
MPPQKIETGHSDTIHDVVMDYYGKRVATASSDCTIKITGVSNSGGSQHLATLTGHRGPVWQVAWAHPKFGSLLASCSYDGQIILWKEGNQNQWTQAHVFTDHKVSVNSIAWAPHELGLSLACGASDGNISVFSARADGGWDTTKIDQAHPVGVTSVSWAPATEPGALVSSGMIDPVYKLASGGCDSTVKVWKFSNGSWKMDCFPALNKHTDWVRDVAWAPNLGLPKSTIASGSEDGKVIIWTIGKEGEQWEGTVLKDFKTPVWRVSWSLTGNLLAVSDGNNNVTVWKESVDGEWEQVTVVEP

SEQ ID NO: 641 - protein, 284 aa, Arabidopsis thaliana
  peptide (1)..(284): Ceres Seq. ID no. 12350407
  misc_feature (1)..(284): NCBI GI NO: 15232095 NR Description: transport protein SEC13, putative
  misc_feature (1)..(284): NCBI GI NO: 21593236 NR Description: transport protein SEC13, putative
  misc_feature (1)..(284): NCBI GI NO: 15227692 NR Description: G-protein beta family; protein id: At2g30050
  misc_feature (1)..(284): NCBI GI NO: 21593146 NR Description: putative protein transport protein SEC13
  misc_feature (1)..(283): NCBI GI NO: 18147582 NR Description: Sec13p [Oryza sativa]
  misc_feature (1)..(284): NCBI GI NO: 34393220 NR Description: putative Sec13p
  misc_feature (1)..(284): NCBI GI NO: 34897242 NR Description: putative coat protein complex II
  misc_feature (1)..(282): NCBI GI NO: 32451650 NR Description: Unknown (protein for MGC:63980) [Danio rerio]
  misc_feature (1)..(282): NCBI GI NO: 38174439 NR Description: Unknown (protein for MGC:76017)
  misc_feature (1)..(282): NCBI GI NO: 27696242 NR Description: Similar to RIKEN cDNA 1110003H02 gene
MDYYGKRVATASSDCTIKITGVSNSGGSQHLATLTGHRGPVWQVAWAHPKFGSLLASCSYDGQIILWKEGNQNQWTQAHVFTDHKVSVNSIAWAPHELGLSLACGASDGNISVFSARADGGWDTTKIDQAHPVGVTSVSWAPATEPGALVSSGMIDPVYKLASGGCDSTVKVWKFSNGSWKMDCFPALNKHTDWVRDVAWAPNLGLPKSTIASGSEDGKVIIWTIGKEGEQWEGTVLKDFKTPVWRVSWSLTGNLLAVSDGNNNVTVWKESVDGEWEQVTVVEP

SEQ ID NO: 642 - DNA, 1318 bp, Arabidopsis thaliana
  misc_feature (1)..(1318): Ceres Seq. ID no. 12334532
aaagtaacaaaatactaattcaaaagctttataaagtttcttttctcattcggttctaaagttcctatttttcaatggattacgtgagaacccaagtcgaagctgtttttgatgattctgagcaagatggatcaaccatctctgaatctggaagctgcgattcttcttctgatcgatcttttgctgacgagcttgggcttatggagttgcttgaaggagataaagctcatgatttgatctatcgtaattgtaaatctggtcttggtgatcaatgtcagattctctctgttcttagaaacggatttaggaacgttggatctcgtgcaaagctcaagacttttcaggtttttcaagaggcggtgcagatgaaacacggtggagacggtggagctaaggtgaaatacggttggtgctctgtttcgaaacatgagcttaaaacgatttttgagtatgggtttagcgagccgctgaggaatgatggatcttttggccgtggattgtatctctcgccggataattctcctcttgattgtttgaaggattcagcttcagaatcagaagatgggatgagattcttgttgctttgtagagttctacttggaaaatcagagattgttcctcaaggctcgactagatcatgtccaagttcaccagagtttgattctggtgtggatgatttagtttctacgaagaagtatattgtgtggagtacacacatgaacactcatgttttgcctgagtttcttgtttgcatcaaagctccatttaacctaactcgaagtccaaagagattgagatcaccatggatggcatttcctgtattgatcaaagcattgtccaagtttctacctccttctcaaatacttgtcattcagaaacattacaaagatcaacaaaataggagaattacacggagcgaactaatccaacgagtcagaagcataaccggagacaagttactagttcacatcatcaaagcttgtggacataaagtacaacactaaatctccattgcagatcactttggcgtttttgtttcaaggacacaatcaccatggttgtatttgtctgtttaccaactccaaaatgatcaggactggtagagtccctttctattgttttcccatgatagtgatgaaaaaaaactgttcattagattatttaagatcgattagattagggtcttagcaacattattaatgaagagaacattaacaagttatcatcttgtttttcttttcactcttcttctttcaaaaacatttgtattattgtctggctttgagctgaagaaaatttctggtggactgagttttac

SEQ ID NO: 643 - protein, 309 aa, Arabidopsis thaliana
  peptide (1)..(309): Ceres Seq. ID no. 12334533
  misc_feature (1)..(309): NCBI GI NO: 15241862 NR Description: putative protein; protein id: At5g62520
  misc_feature (1)..(309): NCBI GI NO: 21592445 NR Description: unknown [Arabidopsis thaliana]
  misc_feature (1)..(307): NCBI GI NO: 15228235 NR Description: putative protein; protein id: At3g47720.1
  misc_feature (11)..(306): NCBI GI NO: 15220787 NR Description: hypothetical protein; protein id: At1g23550.1
  misc_feature (11)..(306): NCBI GI NO: 8778582 NR Description: F28C11.18 [Arabidopsis thaliana]
  misc_feature (16)..(301): NCBI GI NO: 15223159 NR Description: hypothetical protein; protein id: At1g70440.1
  misc_feature (16)..(290): NCBI GI NO: 7485680 NR Description: hypothetical protein F17O7
  misc_feature (1)..(231): NCBI GI NO: 29126336 NR Description: putative CEO protein
  misc_feature (236)..(300): NCBI GI NO: 29126336 NR Description: putative CEO protein
  misc_feature (44)..(260): NCBI GI NO: 14150488 NR Description: ATP8 [Arabidopsis thaliana]
MDYVRTQVEAVFDDSEQDGSTISESGSCDSSSDRSFADELGLMELLEGDKAHDLIYRNCKSGLGDQCQILSVLRNGFRNVGSRAKLKTFQVFQEAVQMKHGGDGGAKVKYGWCSVSKHELKTIFEYGFSEPLRNDGSFGRGLYLSPDNSPLDCLKDSASESEDGMRFLLLCRVLLGKSEIVPQGSTRSCPSSPEFDSGVDDLVSTKKYIVWSTHMNTHVLPEFLVCIKAPFNLTRSPKRLRSPWMAFPVLIKALSKFLPPSQILVIQKHYKDQQNRRITRSELIQRVRSITGDKLLVHIIKACGHKVQH

SEQ ID NO: 644 - protein, 267 aa, Arabidopsis thaliana
  peptide (1)..(267): Ceres Seq. ID no. 12334534
  misc_feature (1)..(267): NCBI GI NO: 15241862 NR Description: putative protein; protein id: At5g62520
  misc_feature (1)..(267): NCBI GI NO: 21592445 NR Description: unknown [Arabidopsis thaliana]
  misc_feature (1)..(265): NCBI GI NO: 15228235 NR Description: putative protein; protein id: At3g47720.1
  misc_feature (1)..(264): NCBI GI NO: 15220787 NR Description: hypothetical protein; protein id: At1g23550.1
  misc_feature (1)..(264): NCBI GI NO: 8778582 NR Description: F28C11.18 [Arabidopsis thaliana]
  misc_feature (1)..(259): NCBI GI NO: 15223159 NR Description: hypothetical protein; protein id: At1g70440.1
  misc_feature (1)..(248): NCBI GI NO: 7485680 NR Description: hypothetical protein F17O7
  misc_feature (1)..(189): NCBI GI NO: 29126336 NR Description: putative CEO protein
  misc_feature (194)..(258): NCBI GI NO: 29126336 NR Description: putative CEO protein
  misc_feature (2)..(218): NCBI GI NO: 14150488 NR Description: ATP8 [Arabidopsis thaliana]
MELLEGDKAHDLIYRNCKSGLGDQCQILSVLRNGFRNVGSRAKLKTFQVFQEAVQMKHGGDGGAKVKYGWCSVSKHELKTIFEYGFSEPLRNDGSFGRGLYLSPDNSPLDCLKDSASESEDGMRFLLLCRVLLGKSEIVPQGSTRSCPSSPEFDSGVDDLVSTKKYIVWSTHMNTHVLPEFLVCIKAPFNLTRSPKRLRSPWMAFPVLIKALSKFLPPSQILVIQKHYKDQQNRRITRSELIQRVRSITGDKLLVHIIKACGHKVQH

SEQ ID NO: 645 - protein, 212 aa, Arabidopsis thaliana
  peptide (1)..(212): Ceres Seq. ID no. 12334535
  misc_feature (1)..(212): NCBI GI NO: 15241862 NR Description: putative protein; protein id: At5g62520
  misc_feature (1)..(212): NCBI GI NO: 21592445 NR Description: unknown [Arabidopsis thaliana]
  misc_feature (1)..(210): NCBI GI NO: 15228235 NR Description: putative protein; protein id: At3g47720.1
  misc_feature (1)..(209): NCBI GI NO: 15220787 NR Description: hypothetical protein; protein id: At1g23550.1
  misc_feature (1)..(209): NCBI GI NO: 8778582 NR Description: F28C11.18 [Arabidopsis thaliana]
  misc_feature (1)..(204): NCBI GI NO: 15223159 NR Description: hypothetical protein; protein id: At1g70440.1
  misc_feature (1)..(193): NCBI GI NO: 7485680 NR Description: hypothetical protein F17O7
  misc_feature (1)..(134): NCBI GI NO: 29126336 NR Description: putative CEO protein
  misc_feature (139)..(203): NCBI GI NO: 29126336 NR Description: putative CEO protein
  misc_feature (1)..(163): NCBI GI NO: 14150488 NR Description: ATP8 [Arabidopsis thaliana]
MKHGGDGGAKVKYGWCSVSKHELKTIFEYGFSEPLRNDGSFGRGLYLSPDNSPLDCLKDSASESEDGMRFLLLCRVLLGKSEIVPQGSTRSCPSSPEFDSGVDDLVSTKKYIVWSTHMNTHVLPEFLVCIKAPFNLTRSPKRLRSPWMAFPVLIKALSKFLPPSQILVIQKHYKDQQNRRITRSELIQRVRSITGDKLLVHIIKACGHKVQH

SEQ ID NO: 646 - DNA, 1195 bp, Arabidopsis thaliana
  misc_feature (1)..(1195): Ceres Seq. ID no. 13486843
tgactgcaatttctctctttcgcttctaaaaaaaaacctaacaacctctcttctctcttcctcgttcaacaacaatggagttctggggagttgcggtgacaccaaaaaacgctactaaggtgactcctgaagaagacagccttgtccacatttctcaggcttcacttgactgcacagtgaaatctggagaatctgtggttttgagtgtgactgttggtggggctaaacttgttattggaacactttcacaagacaagttccctcagattagctttgatttggtttttgataaagagtttgagctttcacacagcggtaccaaagcaaatgttcatttcattggctacaaatcccccaacatcgagcaggatgacttcactagttcggatgatgaggatgttcctgaagctgttcctgctcctgcccctactgctgttactgccaacggaaatgctggagcagctgttgtcaaggctgacacaaagccaaaggccaaacctgccgaagtgaagcctgcagaagagaagcctgaatcagacgaggaagatgagtctgatgatgaagatgagtctgaagaggatgatgactctgagaaaggaatggatgttgatgaagatgactcagatgatgacgaggaggaggattctgaggatgaagaagaggaggagactcctaagaagcctgagccaatcaacaagaagaggccaaatgaatctgtatccaaaacacccgtctctggaaagaaggcaaaaccagcagcagcaccagcttctactcctcagaagacagaagagaagaagaaaggaggacacaccgccacaccacacccagctaagaagggtggaaagtctcctgtgaatgctaaccagagccccaagtctggaggtcaatcatccggtggtaacaacaacaagaagccattcaactcaggcaaacaatttggtggttccaacaacaagggttctaacaagggcaagggaaagggtagagcttaaggacgtggatcaaggagaggttttgggttttcgagtagatgatgaaaacacttggaagtgtggttttggatttttatcttattttattagtataacttgttatcggatgagctattttgagtatttgcaatttctactttcctatgtaattcagtatatgaatatttgctgaaatgagaaagaagactcgaattgcaaac

SEQ ID NO: 647 - protein, 306 aa, Arabidopsis thaliana
  peptide (1)..(306): Ceres Seq. ID no. 13486844
  misc_feature (124)..(243): Pfam Name: Pfam Description:  AMP-binding enzyme
  misc_feature (1)..(306): NCBI GI NO: 30688577 NR Description: histone deacetylase-related protein
  misc_feature (1)..(306): NCBI GI NO: 25352191 NR Description: probable histone deacetylase (EC 3.5.1.-)
  misc_feature (95)..(306): NCBI GI NO: 30688581 NR Description: histone deacetylase-related protein
  misc_feature (1)..(301): NCBI GI NO: 7804960 NR Description: putative histone deacetylase HD2 [Oryza sativa]
  misc_feature (1)..(282): NCBI GI NO: 7489751 NR Description: histone deacetylase (EC 3
  misc_feature (1)..(285): NCBI GI NO: 7716948 NR Description: histone deacetylase 2 isoform b [Zea mays]
  misc_feature (1)..(269): NCBI GI NO: 7716950 NR Description: histone deacetylase 2 isoform c [Zea mays]
  misc_feature (1)..(300): NCBI GI NO: 22597156 NR Description: nucleolar histone deacetylase HD2-P39
  misc_feature (1)..(290): NCBI GI NO: 11282318 NR Description: histone deacetylase-like protein
  misc_feature (1)..(290): NCBI GI NO: 7804963 NR Description: putative histone deacetylase HD2c
MEFWGVAVTPKNATKVTPEEDSLVHISQASLDCTVKSGESVVLSVTVGGAKLVIGTLSQDKFPQISFDLVFDKEFELSHSGTKANVHFIGYKSPNIEQDDFTSSDDEDVPEAVPAPAPTAVTANGNAGAAVVKADTKPKAKPAEVKPAEEKPESDEEDESDDEDESEEDDDSEKGMDVDEDDSDDDEEEDSEDEEEEETPKKPEPINKKRPNESVSKTPVSGKKAKPAAAPASTPQKTEEKKKGGHTATPHPAKKGGKSPVNANQSPKSGGQSSGGNNNKKPFNSGKQFGGSNNKGSNKGKGKGRA

SEQ ID NO: 648 - DNA, 1335 bp, Arabidopsis thaliana
  misc_feature (1)..(1335): Ceres Seq. ID no. 13490506
aaaattacatatccgccattgtttccggcaacgcaaactaccaaaaaaaataatggaggtcgaaagagtccaagacatttcatcttcttctctactaacagaagcaatcccgttggagttcatcagatcagagaaagaacaaccagcgatcacaacattccgaggtccaacgccggcgattcccgtcgtcgatctaagcgatcccgacgaagaaagcgtgaggcgcgcggtggtgaaagcgagtgaagaatgggggctattccaagtggttaaccacgggattccgacggagctgatacgacgtttacaagacgtcggaagaaaattcttcgagcttccttcgtcggagaaagaatccgtcgctaaaccggaagattcgaaagacattgaaggatacggaacaaagcttcagaaagatccagaaggtaaaaaagcttgggtcgatcatctcttccatcgaatctggccaccgtcatgcgtcaattacagattctggcctaagaatccacctgaatacagggaggtgaatgaagagtatgcagtgcatgtgaagaagctatcggagacgttattagggattctctcggatggattagggttaaagcgtgatgcgttgaaagaaggtctcggcggagagatggcggagtatatgatgaagattaactattatccgccgtgtcctcggccggatttagctttaggtgtaccggctcatacagatctcagtggaatcactcttcttgttcctaacgaagttcctggacttcaagttttcaaagatgatcactggttcgatgcagagtatattccctccgccgtcattgttcacatcggcgatcagattctgaggttgagtaatgggaggtataaaaatgtgttgcataggacgacggtggataaagagaagacgaggatgtcgtggccggttttcttggagcctccccgtgaaaagattgttggacctttaccggaactaaccggagatgataatcctccaaagtttaaaccgtttgctttcaaggattacagttaccgcaagctcaataaacttcctctggattgagaaaaatcaatacgagaagaataatttgtggttgtggaataggaagtggttcgttattgagttgttgttttcccgcggttgtgtctcttgcttattgttattttatgtttaaaataaagattaaaacatctacctacattgtgtgtgatgttgacatgtttttattgtgttgcgatgcctttgcaagttatgtcggaccatttttaggcattggaaagagtaggtttgtattttgtaaatttttaacctgtcacggaaaaaaatcggtgatc

SEQ ID NO: 649 - protein, 353 aa, Arabidopsis thaliana
  peptide (1)..(353): Ceres Seq. ID no. 13490507
  misc_feature (214)..(313): Pfam Name: II Pfam Description: 2OG-Fe
  misc_feature (18)..(353): NCBI GI NO: 15242339 NR Description: flavonol synthase 1 (FLS1) [Arabidopsis thaliana]
  misc_feature (18)..(351): NCBI GI NO: 14916566 NR Description: Flavonol synthase (FLS) (CitFLS)
  misc_feature (18)..(351): NCBI GI NO: 14916564 NR Description: Flavonol synthase (FLS)
  misc_feature (18)..(351): NCBI GI NO: 1706822 NR Description: Flavonol synthase (FLS)
  misc_feature (18)..(351): NCBI GI NO: 29123532 NR Description: flavonol synthase [Allium cepa]
  misc_feature (60)..(353): NCBI GI NO: 15242827 NR Description: flavonol synthase, putative [Arabidopsis thaliana]
  misc_feature (18)..(351): NCBI GI NO: 31978953 NR Description: flavonol synthase [Petroselinum crispum]
  misc_feature (60)..(353): NCBI GI NO: 21554244 NR Description: flavonol synthase [Arabidopsis thaliana]
  misc_feature (18)..(351): NCBI GI NO: 2492613 NR Description: Flavonol synthase (FLS)
  misc_feature (18)..(351): NCBI GI NO: 29420435 NR Description: flavonol synthase
KLHIRHCFRQRKLPKKIMEVERVQDISSSSLLTEAIPLEFIRSEKEQPAITTFRGPTPAIPVVDLSDPDEESVRRAVVKASEEWGLFQVVNHGIPTELIRRLQDVGRKFFELPSSEKESVAKPEDSKDIEGYGTKLQKDPEGKKAWVDHLFHRIWPPSCVNYRFWPKNPPEYREVNEEYAVHVKKLSETLLGILSDGLGLKRDALKEGLGGEMAEYMMKINYYPPCPRPDLALGVPAHTDLSGITLLVPNEVPGLQVFKDDHWFDAEYIPSAVIVHIGDQILRLSNGRYKNVLHRTTVDKEKTRMSWPVFLEPPREKIVGPLPELTGDDNPPKFKPFAFKDYSYRKLNKLPLD

SEQ ID NO: 650 - protein, 336 aa, Arabidopsis thaliana
  peptide (1)..(336): Ceres Seq. ID no. 13490508
  misc_feature (197)..(296): Pfam Name: II Pfam Description: 2OG-Fe
  misc_feature (1)..(336): NCBI GI NO: 15242339 NR Description: flavonol synthase 1 (FLS1) [Arabidopsis thaliana]
  misc_feature (1)..(334): NCBI GI NO: 14916566 NR Description: Flavonol synthase (FLS) (CitFLS)
  misc_feature (1)..(334): NCBI GI NO: 14916564 NR Description: Flavonol synthase (FLS)
  misc_feature (1)..(334): NCBI GI NO: 1706822 NR Description: Flavonol synthase (FLS)
  misc_feature (1)..(334): NCBI GI NO: 29123532 NR Description: flavonol synthase [Allium cepa]
  misc_feature (43)..(336): NCBI GI NO: 15242827 NR Description: flavonol synthase, putative [Arabidopsis thaliana]
  misc_feature (1)..(334): NCBI GI NO: 31978953 NR Description: flavonol synthase [Petroselinum crispum]
  misc_feature (43)..(336): NCBI GI NO: 21554244 NR Description: flavonol synthase [Arabidopsis thaliana]
  misc_feature (1)..(334): NCBI GI NO: 2492613 NR Description: Flavonol synthase (FLS)
  misc_feature (1)..(334): NCBI GI NO: 29420435 NR Description: flavonol synthase
MEVERVQDISSSSLLTEAIPLEFIRSEKEQPAITTFRGPTPAIPVVDLSDPDEESVRRAVVKASEEWGLFQVVNHGIPTELIRRLQDVGRKFFELPSSEKESVAKPEDSKDIEGYGTKLQKDPEGKKAWVDHLFHRIWPPSCVNYRFWPKNPPEYREVNEEYAVHVKKLSETLLGILSDGLGLKRDALKEGLGGEMAEYMMKINYYPPCPRPDLALGVPAHTDLSGITLLVPNEVPGLQVFKDDHWFDAEYIPSAVIVHIGDQILRLSNGRYKNVLHRTTVDKEKTRMSWPVFLEPPREKIVGPLPELTGDDNPPKFKPFAFKDYSYRKLNKLPLD

SEQ ID NO: 651 - DNA, 767 bp, Arabidopsis thaliana
  misc_feature (1)..(767): Ceres Seq. ID no. 12393433
acacaatcacagaacctaatcttcttctccaatcaatctcagagaaaaaaagaaatggcaacaaaccctaaagtctacttcgacatgaccgtcggtggcaaatccgccggtcgtatcgtgatggagctttacgccgacacaacaccagaaaccgccgagaatttcagagcactctgtaccggagagagaggaatcggtaaacaaggtaagccattacactacaaaggatcaagctttcaccgagtgattccgaaattcatgtgtcaaggaggtgatttcacagccgggaatggtaccggaggtgaatctatctatggatcgaagttcaaagacgagaactttatcaagaaacatacaggaccaggtattttgtctatggctaacgctggtgcgaacacgaatggatctcagttttttatttgtactgagaagacttcgtggctcgatgggaaacatgttgtgtttggtcaagttgttgagggattgaatgttgttagagatattgagaaggttggatctgactctggaagaacttctaagcctgttgtcattgctgattgtggtcagatttcttagatctgtctgagattgttgatgatgatgatgatgatcttgaggatccaatggtagctttgtgttgtttctctttgatgttttctggtttatgtttttggattttgatgtttattgctgttgtgaaactttgagtttggctaccattgaataagaagaatgagaataaaatcttgagatccaaatttttgttt

SEQ ID NO: 652 - protein, 191 aa, Arabidopsis thaliana
  peptide (1)..(191): Ceres Seq. ID no. 12393434
  misc_feature (19)..(191): NCBI GI NO: 15227259 NR Description: cytosolic cyclophilin
  misc_feature (22)..(190): NCBI GI NO: 1345921 NR Description: PEPTIDYL-PROLYL CIS-TRANS ISOMERASE
  misc_feature (22)..(190): NCBI GI NO: 68407 NR Description: peptidylprolyl isomerase (EC 5.2.1.8) - rape
  misc_feature (23)..(190): NCBI GI NO: 167138 NR Description: cyclophilin
  misc_feature (22)..(191): NCBI GI NO: 17981611 NR Description: cyclophilin [Glycine max]
  misc_feature (19)..(191): NCBI GI NO: 18076088 NR Description: cyclophilin [Ricinus communis]
  misc_feature (21)..(190): NCBI GI NO: 11270320 NR Description: peptidylprolyl isomerase (EC 5.2.1.8) vcCyP
  misc_feature (21)..(190): NCBI GI NO: 11270316 NR Description: peptidylprolyl isomerase (EC 5.2.1.8)
  misc_feature (21)..(191): NCBI GI NO: 6014890 NR Description: Peptidyl-prolyl cis-trans isomerase
  misc_feature (19)..(191): NCBI GI NO: 21886603 NR Description: peptidylprolyl isomerase (cyclophilin)
TQSQNLIFFSNQSQRKKEMATNPKVYFDMTVGGKSAGRIVMELYADTTPETAENFRALCTGERGIGKQGKPLHYKGSSFHRVIPKFMCQGGDFTAGNGTGGESIYGSKFKDENFIKKHTGPGILSMANAGANTNGSQFFICTEKTSWLDGKHVVFGQVVEGLNVVRDIEKVGSDSGRTSKPVVIADCGQIS

SEQ ID NO: 653 - protein, 173 aa, Arabidopsis thaliana
  peptide (1)..(173): Ceres Seq. ID no. 12393435
  misc_feature (1)..(173): NCBI GI NO: 15227259 NR Description: cytosolic cyclophilin
  misc_feature (4)..(172): NCBI GI NO: 1345921 NR Description: PEPTIDYL-PROLYL CIS-TRANS ISOMERASE
  misc_feature (4)..(172): NCBI GI NO: 68407 NR Description: peptidylprolyl isomerase (EC 5.2.1.8) - rape
  misc_feature (5)..(172): NCBI GI NO: 167138 NR Description: cyclophilin
  misc_feature (4)..(173): NCBI GI NO: 17981611 NR Description: cyclophilin [Glycine max]
  misc_feature (1)..(173): NCBI GI NO: 18076088 NR Description: cyclophilin [Ricinus communis]
  misc_feature (3)..(172): NCBI GI NO: 11270320 NR Description: peptidylprolyl isomerase (EC 5.2.1.8) vcCyP
  misc_feature (3)..(172): NCBI GI NO: 11270316 NR Description: peptidylprolyl isomerase (EC 5.2.1.8)
  misc_feature (3)..(173): NCBI GI NO: 6014890 NR Description: Peptidyl-prolyl cis-trans isomerase
  misc_feature (1)..(173): NCBI GI NO: 21886603 NR Description: peptidylprolyl isomerase (cyclophilin)
MATNPKVYFDMTVGGKSAGRIVMELYADTTPETAENFRALCTGERGIGKQGKPLHYKGSSFHRVIPKFMCQGGDFTAGNGTGGESIYGSKFKDENFIKKHTGPGILSMANAGANTNGSQFFICTEKTSWLDGKHVVFGQVVEGLNVVRDIEKVGSDSGRTSKPVVIADCGQIS

SEQ ID NO: 654 - protein, 163 aa, Arabidopsis thaliana
  peptide (1)..(163): Ceres Seq. ID no. 12393436
  misc_feature (1)..(163): NCBI GI NO: 15227259 NR Description: cytosolic cyclophilin
  misc_feature (1)..(162): NCBI GI NO: 1345921 NR Description: PEPTIDYL-PROLYL CIS-TRANS ISOMERASE
  misc_feature (1)..(162): NCBI GI NO: 68407 NR Description: peptidylprolyl isomerase (EC 5.2.1.8) - rape
  misc_feature (1)..(162): NCBI GI NO: 167138 NR Description: cyclophilin
  misc_feature (1)..(163): NCBI GI NO: 17981611 NR Description: cyclophilin [Glycine max]
  misc_feature (1)..(163): NCBI GI NO: 18076088 NR Description: cyclophilin [Ricinus communis]
  misc_feature (1)..(162): NCBI GI NO: 11270320 NR Description: peptidylprolyl isomerase (EC 5.2.1.8) vcCyP
  misc_feature (1)..(162): NCBI GI NO: 11270316 NR Description: peptidylprolyl isomerase (EC 5.2.1.8)
  misc_feature (1)..(163): NCBI GI NO: 6014890 NR Description: Peptidyl-prolyl cis-trans isomerase
  misc_feature (1)..(163): NCBI GI NO: 21886603 NR Description: peptidylprolyl isomerase (cyclophilin)
MTVGGKSAGRIVMELYADTTPETAENFRALCTGERGIGKQGKPLHYKGSSFHRVIPKFMCQGGDFTAGNGTGGESIYGSKFKDENFIKKHTGPGILSMANAGANTNGSQFFICTEKTSWLDGKHVVFGQVVEGLNVVRDIEKVGSDSGRTSKPVVIADCGQIS

SEQ ID NO: 655 - DNA, 953 bp, Arabidopsis thaliana
  misc_feature (1)..(953): Ceres Seq. ID no. 12680745
ctctctcacacacccatagtcgtcttcctcgatcagtctctctctcaaattgcaaaggtttcttcgaggactttggcatactgcaggttgttggagctgtagtgcttaaaaaccctacctttatactgtttagagcagcagtccctccatgtcaggtcttgtggcgttatgcagagctcgagcttctgcttcgtcttctttattcaacagcgttattcgtccagcatttcgcaatttctctacaggttttgctgatacacagaacaaatcattggtagcacaaatgaaagaagagatgctccacatggacatcaactcaatgataggaagttccatgccactaggtatgatgcgtatcggaacaatcatccacaacatcgagatgaacccagggcaaggcgcaaagatggtccgagctgcaggaaccaacgccaagatcctaaaggagcctgctaaagggaaatgcttgataaagcttccgtcaggggacaccaagtggatcaatgccaaatgtcgtgctacgattggcacagtgtcgaacccgtctcatggaacgaagaagctatataaagcaggacagagtaggtggttagggataaggcccaaagttagaggagtggcgatgaatccgtgtgatcatccacacggtggaggtgaaggaaaaagcaaaagtagtggaagcagaggaaggacatcggttagtccgtggggaaaaccgtgtaaaggcggttacaaatcagctagtgtcaagaagaagaagaagcgtttggcagaagcagcagccaaaatgtgatatgggtgaacaagtttcgattttcttcaaacgtttctttcttttaaaaagcctccaatgttatttggttacgttattgaatctgttttttgagagttttttaggcttcatgaaactagaagatctttgatcagttgagaataaatatggttacgtgttt

SEQ ID NO: 656 - protein, 214 aa, Arabidopsis thaliana; identical to SEQ ID NO: 589
  peptide (1)..(214): Ceres Seq. ID no. 12680746
  misc_feature (57)..(190): Pfam Name: Pfam Description:  Ribosomal Proteins L2, C-terminal domain
  misc_feature (1)..(214): NCBI GI NO: 18406440 NR Description: Expressed protein; protein id: At2g44065
  misc_feature (1)..(214): NCBI GI NO: 21592449 NR Description: unknown [Arabidopsis thaliana]
  misc_feature (46)..(214): NCBI GI NO: 1076398 NR Description: ribosomal protein L2 - Arabidopsis thaliana
  misc_feature (18)..(203): NCBI GI NO: 17644114 NR Description: ribosomal protein L2 [Gossypium arboreum]
  misc_feature (5)..(204): NCBI GI NO: 17644112 NR Description: ribosomal protein L2 [Lycopersicon esculentum]
  misc_feature (29)..(204): NCBI GI NO: 17644110 NR Description: ribosomal protein L2 [Zea mays]
  misc_feature (53)..(207): NCBI GI NO: 6094106 NR Description: MITOCHONDRIAL 60S RIBOSOMAL PROTEIN L2
  misc_feature (53)..(207): NCBI GI NO: 7440638 NR Description: probable ribosomal protein L2
  misc_feature (53)..(197): NCBI GI NO: 17933116 NR Description: ribosomal protein L2 [Dicentra sp. Qiu 95026]
  misc_feature (53)..(192): NCBI GI NO: 17933118 NR Description: ribosomal protein L2 [Platanus occidentalis]

SEQ ID NO: 657 - protein, 169 aa, Arabidopsis thaliana; identical to SEQ ID NO: 590
  peptide (1)..(169): Ceres Seq. ID no. 12680747
  misc_feature (12)..(145): Pfam Name: Pfam Description:  Ribosomal Proteins L2, C-terminal domain
  misc_feature (1)..(169): NCBI GI NO: 18406440 NR Description: Expressed protein; protein id: At2g44065
  misc_feature (1)..(169): NCBI GI NO: 21592449 NR Description: unknown [Arabidopsis thaliana]
  misc_feature (1)..(169): NCBI GI NO: 1076398 NR Description: ribosomal protein L2 - Arabidopsis thaliana
  misc_feature (1)..(158): NCBI GI NO: 17644114 NR Description: ribosomal protein L2 [Gossypium arboreum]
  misc_feature (1)..(159): NCBI GI NO: 17644112 NR Description: ribosomal protein L2 [Lycopersicon esculentum]
  misc_feature (1)..(159): NCBI GI NO: 17644110 NR Description: ribosomal protein L2 [Zea mays]
  misc_feature (8)..(162): NCBI GI NO: 6094106 NR Description: MITOCHONDRIAL 60S RIBOSOMAL PROTEIN L2
  misc_feature (8)..(162): NCBI GI NO: 7440638 NR Description: probable ribosomal protein L2
  misc_feature (8)..(152): NCBI GI NO: 17933116 NR Description: ribosomal protein L2 [Dicentra sp. Qiu 95026]
  misc_feature (8)..(147): NCBI GI NO: 17933118 NR Description: ribosomal protein L2 [Platanus occidentalis]

SEQ ID NO: 658 - protein, 165 aa, Arabidopsis thaliana; identical to SEQ ID NO: 591
  peptide (1)..(165): Ceres Seq. ID no. 12680748
  misc_feature (8)..(141): Pfam Name: Pfam Description:  Ribosomal Proteins L2, C-terminal domain
  misc_feature (1)..(165): NCBI GI NO: 18406440 NR Description: Expressed protein; protein id: At2g44065
  misc_feature (1)..(165): NCBI GI NO: 21592449 NR Description: unknown [Arabidopsis thaliana]
  misc_feature (1)..(165): NCBI GI NO: 1076398 NR Description: ribosomal protein L2 - Arabidopsis thaliana
  misc_feature (1)..(154): NCBI GI NO: 17644114 NR Description: ribosomal protein L2 [Gossypium arboreum]
  misc_feature (1)..(155): NCBI GI NO: 17644112 NR Description: ribosomal protein L2 [Lycopersicon esculentum]
  misc_feature (1)..(155): NCBI GI NO: 17644110 NR Description: ribosomal protein L2 [Zea mays]
  misc_feature (4)..(158): NCBI GI NO: 6094106 NR Description: MITOCHONDRIAL 60S RIBOSOMAL PROTEIN L2
  misc_feature (4)..(158): NCBI GI NO: 7440638 NR Description: probable ribosomal protein L2
  misc_feature (4)..(148): NCBI GI NO: 17933116 NR Description: ribosomal protein L2 [Dicentra sp. Qiu 95026]
  misc_feature (4)..(143): NCBI GI NO: 17933118 NR Description: ribosomal protein L2 [Platanus occidentalis]

SEQ ID NO: 659 - DNA, 641 bp, Arabidopsis thaliana
  misc_feature (1)..(641): Ceres Seq. ID no. 12332271
acgattagaatatgagtagtgcaacgcaaaataacactgccgtttaagacgacggtcccttgacagaatcttcatcaacgctcgatttgacgtctgccgatttccttagctccgacgtaaaccactgatcgtcggtattcagctatattttgatttctcagctccaaaaattcccaacgaaatggagaaaatggccaaaggatggttttcgatgagcggcactagtagcagcggagatcagcagcagcaaccgctgcaaacaggaggaacgtctctgctagctgattggaattcttacgcagcatcgagagattttgaagaagacaccggaactttaggcttcgatatcgaatccgccgttagatctgccaacgacactgtttccggcacctttaatgttgtttcgaaaggagttagagataacctgcagtctgcaacaagtagtatgccttcaggaaaagctttgatgtatttcggtttacttctagcaagtggtgtattcttcatcttcattgccttcaccatgtttcttccagtcatggtgcttatgccacagaagtttgcaatttgttttacccttggatgtggatttatcatcggatctttcttcgctcttcgtggcccgcaaaatcaactcgctc

SEQ ID NO: 660 - protein, 153 aa, Arabidopsis thaliana
  peptide (1)..(153): Ceres Seq. ID no. 12332272
  misc_feature (1)..(152): NCBI GI NO: 15241114 NR Description: putative protein; protein id: At5g56020.1
  misc_feature (4)..(152): NCBI GI NO: 18416771 NR Description: putative protein; protein id: At4g26550.1
  misc_feature (74)..(152): NCBI GI NO: 7486785 NR Description: hypothetical protein M3E9
  misc_feature (1)..(73): NCBI GI NO: 7486785 NR Description: hypothetical protein M3E9
MEKMAKGWFSMSGTSSSGDQQQQPLQTGGTSLLADWNSYAASRDFEEDTGTLGFDIESAVRSANDTVSGTFNVVSKGVRDNLQSATSSMPSGKALMYFGLLLASGVFFIFIAFTMFLPVMVLMPQKFAICFTLGCGFIIGSFFALRGPQNQLA

SEQ ID NO: 661 - protein, 150 aa, Arabidopsis thaliana
  peptide (1)..(150): Ceres Seq. ID no. 12332273
  misc_feature (1)..(149): NCBI GI NO: 15241114 NR Description: putative protein; protein id: At5g56020.1
  misc_feature (1)..(149): NCBI GI NO: 18416771 NR Description: putative protein; protein id: At4g26550.1
  misc_feature (71)..(149): NCBI GI NO: 7486785 NR Description: hypothetical protein M3E9
  misc_feature (1)..(70): NCBI GI NO: 7486785 NR Description: hypothetical protein M3E9
MAKGWFSMSGTSSSGDQQQQPLQTGGTSLLADWNSYAASRDFEEDTGTLGFDIESAVRSANDTVSGTFNVVSKGVRDNLQSATSSMPSGKALMYFGLLLASGVFFIFIAFTMFLPVMVLMPQKFAICFTLGCGFIIGSFFALRGPQNQLA

SEQ ID NO: 662 - protein, 143 aa, Arabidopsis thaliana
  peptide (1)..(143): Ceres Seq. ID no. 12332274
  misc_feature (1)..(142): NCBI GI NO: 15241114 NR Description: putative protein; protein id: At5g56020.1
  misc_feature (1)..(142): NCBI GI NO: 18416771 NR Description: putative protein; protein id: At4g26550.1
  misc_feature (64)..(142): NCBI GI NO: 7486785 NR Description: hypothetical protein M3E9
  misc_feature (1)..(63): NCBI GI NO: 7486785 NR Description: hypothetical protein M3E9
MSGTSSSGDQQQQPLQTGGTSLLADWNSYAASRDFEEDTGTLGFDIESAVRSANDTVSGTFNVVSKGVRDNLQSATSSMPSGKALMYFGLLLASGVFFIFIAFTMFLPVMVLMPQKFAICFTLGCGFIIGSFFALRGPQNQLA

SEQ ID NO: 663 - DNA, 806 bp, Arabidopsis thaliana
  misc_feature (1)..(806): Ceres Seq. ID no. 12323510
atatcgcatctaaagccccccccaaaaaaaaaatcctattacacactcatacgctctctcgtcaaacaaaaaaaaaaaacctaaagaaacttcgacatgaaaggcggcgaatccaaagctgaagcaacgagcactgatcagagactcaaaaccagaggtagaaaggctgggaagaagacgaagaaggatccaaatcaacctaagagacctccaagtgctttcttcgtcttccttgaggatttccgaaaagagtttaacctagcgaatcctaataacaaatccgtcgctactgttggtaaggctgctggagctagatggaaggcaatgactgatgaagataaagctccttacgtcgctaaggctgagagcagaaagactgaatatattaagaatgtgcaacagtacaacttgaaactggctagtggaaccaatagagaagaggatgactctgacaaatccaagtctgaagttgatgaagcagtaagcgaagaggaggcagaagacgacgattgaagcatctaggtcttgctattgacttgactcagatttgagaatgtaaacttgcttaggtttatgaccaaaaacttttaaaaaactcttatttatgctttgtgtttgtgatatttgaacctcatttgctacatcaatgttgttttaggtcagtctgtagggataatatcacttgactgctatatttcccctatttccttatgttttactagtattcatatgttcttcaactttgtatgagttttagtatcagttttatttctacttatgcttatttgttgacttctgtttctacc

SEQ ID NO: 664 - protein, 138 aa, Arabidopsis thaliana
  peptide (1)..(138): Ceres Seq. ID no. 12323511
  misc_feature (35)..(104): Pfam Name: high mobility group Pfam Description: HMG
  misc_feature (1)..(138): NCBI GI NO: 15227862 NR Description: putative HMG protein; protein id: At2g17560
  misc_feature (1)..(138): NCBI GI NO: 13877775 NR Description: putative HMG protein [Arabidopsis thaliana]
  misc_feature (1)..(138): NCBI GI NO: 21592453 NR Description: putative HMG protein [Arabidopsis thaliana]
  misc_feature (1)..(138): NCBI GI NO: 11346367 NR Description: high mobility group protein HMG-gamma
  misc_feature (1)..(127): NCBI GI NO: 15237040 NR Description: HMG delta protein; protein id: At4g35570
  misc_feature (1)..(138): NCBI GI NO: 123379 NR Description: HMG1/2-LIKE PROTEIN (SB11 PROTEIN)
  misc_feature (1)..(138): NCBI GI NO: 1052956 NR Description: high mobility group protein 2 HMG2 [Ipomoea nil]
  misc_feature (1)..(138): NCBI GI NO: 7446212 NR Description: high mobility group protein - potato
  misc_feature (1)..(138): NCBI GI NO: 18394898 NR Description: Expressed protein; protein id: At1g20693
  misc_feature (1)..(138): NCBI GI NO: 541968 NR Description: high mobility group protein HMG-1 - garden pea
MKGGESKAEATSTDQRLKTRGRKAGKKTKKDPNQPKRPPSAFFVFLEDFRKEFNLANPNNKSVATVGKAAGARWKAMTDEDKAPYVAKAESRKTEYIKNVQQYNLKLASGTNREEDDSDKSKSEVDEAVSEEEAEDDD

SEQ ID NO: 665 - DNA, 896 bp, Arabidopsis thaliana
  misc_feature (1)..(896): Ceres Seq. ID no. 12332275
gacattgtttcccgcatacttttcttcttcttcttctctccacccatctgctttaaggaaggaacctcaaaagcttacaaaatagtagaagaagaactttttttgatctccgattcttacctctgcaatcttcagattctagctgattcaaggatcttgtttgtgatagaaattggaggagatgggagcattcatgtcgaggttttggttcatgatgtttcctgcaaaagagtataagattgttgttgttggtttggataatgctggtaaaacgacgacgctttataaacttcatttgggtgaagttgttactactcatcctactgttggtagcaatgttgaagagcttgtctacaagaatattcgctttgaggtatgggatcttggtgggcaagataggctaagaacttcatgggcaacatactatcgtggaacacatgctgtgattgtggttatagatagcacagacagagccagaatctctttcatgaaagatgagctagccaggttacttggtcatgaggatcttcaaaactcggtcatactagtttttgcaaacaaacaggatctgaaagacgcaatgactcctgctgagatcacggatgcacttaaccttcacagtatcaagaaccatgattggcatattcaagcaagttgtgcggttactggagaaggattgtatgatgggctcggttggattgcccaaaaagttaccggtaaagccacgagttaaggggaaaccagaactgaatcagagagagtacgtactattcttctttgtttcttttgtctccttcatatgttctttaacattgtatcctcttgacttttatgtaacaagcttcaactattttggttgctctcattgaaactgtgtccagaattttcatatatgg

SEQ ID NO: 666 - protein, 183 aa, Arabidopsis thaliana
  peptide (1)..(183): Ceres Seq. ID no. 12332276
  misc_feature (4)..(177): Pfam Name: Pfam Description:  ADP-ribosylation factor family
  misc_feature (1)..(183): NCBI GI NO: 15228912 NR Description: ADP-ribosylation factor, putative
  misc_feature (1)..(180): NCBI GI NO: 24660781 NR Description: CG7197-PA [Drosophila melanogaster]
  misc_feature (1)..(177): NCBI GI NO: 6912244 NR Description: ADP-ribosylation factor-like 5 isoform 1
  misc_feature (1)..(177): NCBI GI NO: 16758876 NR Description: ADP-ribosylation factor-like 5 [Rattus norvegicus]
  misc_feature (1)..(177): NCBI GI NO: 33695144 NR Description: RIKEN cDNA 2810410P22 [Mus musculus]
  misc_feature (1)..(180): NCBI GI NO: 7025460 NR Description: ADP ribosylation factor 1 [Toxoplasma gondii]
  misc_feature (1)..(181): NCBI GI NO: 6320064 NR Description: ADP-ribosylation factor 2; Arf2p
  misc_feature (1)..(177): NCBI GI NO: 6320009 NR Description: implicated in signal transduction and intracellular proteintransport to or within the Golgi apparatus
  misc_feature (1)..(181): NCBI GI NO: 34903082 NR Description: unnamed protein product
  misc_feature (1)..(180): NCBI GI NO: 34909214 NR Description: putative ADP-ribosylation factor
MGAFMSRFWFMMFPAKEYKIVVVGLDNAGKTTTLYKLHLGEVVTTHPTVGSNVEELVYKNIRFEVWDLGGQDRLRTSWATYYRGTHAVIVVIDSTDRARISFMKDELARLLGHEDLQNSVILVFANKQDLKDAMTPAEITDALNLHSIKNHDWHIQASCAVTGEGLYDGLGWIAQKVTGKATS

SEQ ID NO: 667 - protein, 179 aa, Arabidopsis thaliana
  peptide (1)..(179): Ceres Seq. ID no. 12332277
  misc_feature (1)..(173): Pfam Name: Pfam Description:  ADP-ribosylation factor family
  misc_feature (1)..(179): NCBI GI NO: 15228912 NR Description: ADP-ribosylation factor, putative
  misc_feature (1)..(176): NCBI GI NO: 24660781 NR Description: CG7197-PA [Drosophila melanogaster]
  misc_feature (1)..(173): NCBI GI NO: 6912244 NR Description: ADP-ribosylation factor-like 5 isoform 1
  misc_feature (1)..(173): NCBI GI NO: 16758876 NR Description: ADP-ribosylation factor-like 5 [Rattus norvegicus]
  misc_feature (1)..(173): NCBI GI NO: 33695144 NR Description: RIKEN cDNA 2810410P22 [Mus musculus]
  misc_feature (1)..(176): NCBI GI NO: 7025460 NR Description: ADP ribosylation factor 1 [Toxoplasma gondii]
  misc_feature (1)..(177): NCBI GI NO: 6320064 NR Description: ADP-ribosylation factor 2; Arf2p
  misc_feature (1)..(173): NCBI GI NO: 6320009 NR Description: implicated in signal transduction and intracellular proteintransport to or within the Golgi apparatus
  misc_feature (1)..(177): NCBI GI NO: 34903082 NR Description: unnamed protein product
  misc_feature (1)..(176): NCBI GI NO: 34909214 NR Description: putative ADP-ribosylation factor
MSRFWFMMFPAKEYKIVVVGLDNAGKTTTLYKLHLGEVVTTHPTVGSNVEELVYKNIRFEVWDLGGQDRLRTSWATYYRGTHAVIVVIDSTDRARISFMKDELARLLGHEDLQNSVILVFANKQDLKDAMTPAEITDALNLHSIKNHDWHIQASCAVTGEGLYDGLGWIAQKVTGKATS

SEQ ID NO: 668 - protein, 173 aa, Arabidopsis thaliana
  peptide (1)..(173): Ceres Seq. ID no. 12332278
  misc_feature (1)..(167): Pfam Name: Pfam Description:  ADP-ribosylation factor family
  misc_feature (1)..(173): NCBI GI NO: 15228912 NR Description: ADP-ribosylation factor, putative
  misc_feature (1)..(170): NCBI GI NO: 24660781 NR Description: CG7197-PA [Drosophila melanogaster]
  misc_feature (1)..(167): NCBI GI NO: 6912244 NR Description: ADP-ribosylation factor-like 5 isoform 1
  misc_feature (1)..(167): NCBI GI NO: 16758876 NR Description: ADP-ribosylation factor-like 5 [Rattus norvegicus]
  misc_feature (1)..(167): NCBI GI NO: 33695144 NR Description: RIKEN cDNA 2810410P22 [Mus musculus]
  misc_feature (1)..(170): NCBI GI NO: 7025460 NR Description: ADP ribosylation factor 1 [Toxoplasma gondii]
  misc_feature (1)..(171): NCBI GI NO: 6320064 NR Description: ADP-ribosylation factor 2; Arf2p
  misc_feature (1)..(167): NCBI GI NO: 6320009 NR Description: implicated in signal transduction and intracellular proteintransport to or within the Golgi apparatus
  misc_feature (1)..(171): NCBI GI NO: 34903082 NR Description: unnamed protein product
  misc_feature (1)..(170): NCBI GI NO: 34909214 NR Description: putative ADP-ribosylation factor
MMFPAKEYKIVVVGLDNAGKTTTLYKLHLGEVVTTHPTVGSNVEELVYKNIRFEVWDLGGQDRLRTSWATYYRGTHAVIVVIDSTDRARISFMKDELARLLGHEDLQNSVILVFANKQDLKDAMTPAEITDALNLHSIKNHDWHIQASCAVTGEGLYDGLGWIAQKVTGKATS

SEQ ID NO: 669 - DNA, 831 bp, Arabidopsis thaliana
  misc_feature (1)..(831): Ceres Seq. ID no. 12562523
ctccgtaaacctgttattctcggagaaacgttgagagagggttttccattctctgtggccgtcaccgtcgccgtgaaatagctctcctctctctatctccgattatataactgcaagctcaaaggaattgtttgttgttaaaatgtttcttacgcgatttgtcgggaggagattcttggcggctgcatcggcgcgatcggagtccactacagcagcagcagctgcctcgacgattcggacgccaacaaatccactcgaagagttctttgagttcgacagaagccaagacgaagataaacctgttgtctatggtcgaggttggaaagcttcagagctgcgtctcaagtcatgggatgatcttcagaagctgtggtacgttcttctcaaagagaaaaacatgttgatgactcagcgtcagatgcttcaggctcagaacatgcagtttcctaaccctgaacgcattccaaaggtgaggagatcaatgtgccgcattaagcatgtgctgaccgagagagcgattgaagaaccagattctagaagatcagccgagatgaagagaatggtaaatggtatgtgatcccattggctcttgttttggcaacctagcagtaagcacgagtcaatccgcagaggtgttgagtttttcggagtaagaaataacgcatagctttcaagactttggaactggtccaatgattgtgactgtagtagtgtcggcagtagaaaaacgtttggttggtatctgtacgcacatttctgtaacttatggttgatgtttctttttgagacacatgttggtcagtgttgattcagagctttgtctttctctcc

SEQ ID NO: 670 - protein, 144 aa, Arabidopsis thaliana
  peptide (1)..(144): Ceres Seq. ID no. 12562524
  misc_feature (1)..(144): NCBI GI NO: 15223019 NR Description: mitochondrial ribosomal protein, putative
  misc_feature (58)..(142): NCBI GI NO: 25407010 NR Description: hypothetical protein
  misc_feature (1)..(57): NCBI GI NO: 25407010 NR Description: hypothetical protein
  misc_feature (12)..(139): NCBI GI NO: 39595870 NR Description: Hypothetical protein CBG12849
  misc_feature (38)..(124): NCBI GI NO: 20810578 NR Description: Similar to mitochondrial ribosomal protein L47
  misc_feature (38)..(124): NCBI GI NO: 20865861 NR Description: similar to CGI-204 [Mus musculus]
  misc_feature (38)..(124): NCBI GI NO: 23273006 NR Description: Unknown (protein for IMAGE:4489172) [Mus musculus]
  misc_feature (13)..(124): NCBI GI NO: 21618497 NR Description: Similar to mitochondrial ribosomal protein L47
  misc_feature (38)..(124): NCBI GI NO: 34856796 NR Description: similar to mitochondrial ribosomal protein L47
  misc_feature (1)..(124): NCBI GI NO: 17505324 NR Description: Putative mitochondrial protein of eukaryotic origin
MFLTRFVGRRFLAAASARSESTTAAAAASTIRTPTNPLEEFFEFDRSQDEDKPVVYGRGWKASELRLKSWDDLQKLWYVLLKEKNMLMTQRQMLQAQNMQFPNPERIPKVRRSMCRIKHVLTERAIEEPDSRRSAEMKRMVNGM

SEQ ID NO: 671 - DNA, 1359 bp, Arabidopsis thaliana
  misc_feature (1)..(1359): Ceres Seq. ID no. 12602450
gtattcctcgtgagcactaacttctcactcattcttcttcttcagctgaatccaaatacccatttccatttttaaccgtggttggattgttttgagagttgaaggaagaagatgacgtctgacggagcaacgtcgacgtcagctgcagctgcagcagcagcgatggcgacgaggaggaaaccgtcgtggagagagagggagaacaatcggagaagagagcggcggagaagagctgttgcggcgaagatttatactggtcttagagctcaaggtaactacaatcttccaaaacattgtgacaacaatgaggttcttaaggctctttgttctgaagctggttgggttgttgaagaagacggaactacttatcgcaagggacacaagcctctacctggtgacatggctggatcatcttctcgagcaactccttactcttcccataaccaaagtcctctttcttccacttttgatagccccatcttatcttaccaagtcagtccttcctcttcttcattcccgagtccttctcgagttggtgatccacacaatatctccacaatcttccctttcctcaggaatggtggtattccttcatcgcttcctccacttagaatctcaaacagtgctcctgtcactccaccagtgtcatccccaacttctagaaactccaaaccattgcctacttgggaatcttttaccaaacaatccatgtccatggctgctaaacagtcaatgacttctttgaactacccgttttatgcggtgtctgcacctgccagtcctactcatcatcgccagttccatgctccggctactatacctgaatgtgatgagtctgactcttccactgttgattctggtcattggataagctttcaaaagtttgcacaacaacagccattctctgcctctatggtgccaacctcgcctaccttcaatctcgtgaaacctgcaccacagcaattgtctccaaacacagcagcaatccaagagattggtcaaagctccgagtttaagtttgagaacagccaagttaagccatgggaaggggagaggatccatgatgtggctatggaggatctagagctcacgcttggaaatggtaaagctcatagttgagatgaagtatacatgaacctgttatgtcatgtcggaaggaaggattggagaatgagaattagtgtgttgttcattcagttcatggttttggttcttgttctagaatcgatattcattgtaccagtgagtttgtttcacaacgcattatttgtagatagaatgtttaagatgtatgtttctattatcattccttttaggtcttgaaaacattacaaatatattacatgattaagtggcttc

SEQ ID NO: 672 - protein, 335 aa, Arabidopsis thaliana
  peptide (1)..(335): Ceres Seq. ID no. 12602451
  misc_feature (1)..(335): NCBI GI NO: 21592457 NR Description: unknown [Arabidopsis thaliana]
  misc_feature (1)..(335): NCBI GI NO: 18394728 NR Description: expressed protein; protein id: At1g19350
  misc_feature (1)..(335): NCBI GI NO: 6651069 NR Description: 107 protein [Arabidopsis thaliana]
  misc_feature (1)..(333): NCBI GI NO: 18410764 NR Description: expressed protein; protein id: At1g75080
  misc_feature (1)..(333): NCBI GI NO: 18086461 NR Description: At1g75080/F9E10_7 [Arabidopsis thaliana]
  misc_feature (1)..(333): NCBI GI NO: 25352558 NR Description: unknown protein F9E10.7
  misc_feature (22)..(333): NCBI GI NO: 15215731 NR Description: AT4g36780/C7A10_580 [Arabidopsis thaliana]
  misc_feature (21)..(280): NCBI GI NO: 14626761 NR Description: mature anther-specific protein LAT61
  misc_feature (9)..(273): NCBI GI NO: 33146833 NR Description: putative mature anther-specific protein LAT61
  misc_feature (200)..(335): NCBI GI NO: 13937167 NR Description: At1g19350/F18O14_4 [Arabidopsis thaliana]
MTSDGATSTSAAAAAAAMATRRKPSWRERENNRRRERRRRAVAAKIYTGLRAQGNYNLPKHCDNNEVLKALCSEAGWVVEEDGTTYRKGHKPLPGDMAGSSSRATPYSSHNQSPLSSTFDSPILSYQVSPSSSSFPSPSRVGDPHNISTIFPFLRNGGIPSSLPPLRISNSAPVTPPVSSPTSRNSKPLPTWESFTKQSMSMAAKQSMTSLNYPFYAVSAPASPTHHRQFHAPATIPECDESDSSTVDSGHWISFQKFAQQQPFSASMVPTSPTFNLVKPAPQQLSPNTAAIQEIGQSSEFKFENSQVKPWEGERIHDVAMEDLELTLGNGKAHS

SEQ ID NO: 673 - protein, 318 aa, Arabidopsis thaliana
  peptide (1)..(318): Ceres Seq. ID no. 12602452
  misc_feature (1)..(318): NCBI GI NO: 21592457 NR Description: unknown [Arabidopsis thaliana]
  misc_feature (1)..(318): NCBI GI NO: 18394728 NR Description: expressed protein; protein id: At1g19350
  misc_feature (1)..(318): NCBI GI NO: 6651069 NR Description: 107 protein [Arabidopsis thaliana]
  misc_feature (1)..(316): NCBI GI NO: 18410764 NR Description: expressed protein; protein id: At1g75080
  misc_feature (1)..(316): NCBI GI NO: 18086461 NR Description: At1g75080/F9E10_7 [Arabidopsis thaliana]
  misc_feature (1)..(316): NCBI GI NO: 25352558 NR Description: unknown protein F9E10.7
  misc_feature (5)..(316): NCBI GI NO: 15215731 NR Description: AT4g36780/C7A10_580 [Arabidopsis thaliana]
  misc_feature (4)..(263): NCBI GI NO: 14626761 NR Description: mature anther-specific protein LAT61
  misc_feature (1)..(256): NCBI GI NO: 33146833 NR Description: putative mature anther-specific protein LAT61
  misc_feature (183)..(318): NCBI GI NO: 13937167 NR Description: At1g19350/F18O14_4 [Arabidopsis thaliana]
MATRRKPSWRERENNRRRERRRRAVAAKIYTGLRAQGNYNLPKHCDNNEVLKALCSEAGWVVEEDGTTYRKGHKPLPGDMAGSSSRATPYSSHNQSPLSSTFDSPILSYQVSPSSSSFPSPSRVGDPHNISTIFPFLRNGGIPSSLPPLRISNSAPVTPPVSSPTSRNSKPLPTWESFTKQSMSMAAKQSMTSLNYPFYAVSAPASPTHHRQFHAPATIPECDESDSSTVDSGHWISFQKFAQQQPFSASMVPTSPTFNLVKPAPQQLSPNTAAIQEIGQSSEFKFENSQVKPWEGERIHDVAMEDLELTLGNGKAHS

SEQ ID NO: 674 - protein, 239 aa, Arabidopsis thaliana
  peptide (1)..(239): Ceres Seq. ID no. 12602453
  misc_feature (1)..(239): NCBI GI NO: 21592457 NR Description: unknown [Arabidopsis thaliana]
  misc_feature (1)..(239): NCBI GI NO: 18394728 NR Description: expressed protein; protein id: At1g19350
  misc_feature (1)..(239): NCBI GI NO: 6651069 NR Description: 107 protein [Arabidopsis thaliana]
  misc_feature (1)..(237): NCBI GI NO: 18410764 NR Description: expressed protein; protein id: At1g75080
  misc_feature (1)..(237): NCBI GI NO: 18086461 NR Description: At1g75080/F9E10_7 [Arabidopsis thaliana]
  misc_feature (1)..(237): NCBI GI NO: 25352558 NR Description: unknown protein F9E10.7
  misc_feature (1)..(237): NCBI GI NO: 15215731 NR Description: AT4g36780/C7A10_580 [Arabidopsis thaliana]
  misc_feature (1)..(184): NCBI GI NO: 14626761 NR Description: mature anther-specific protein LAT61
  misc_feature (1)..(177): NCBI GI NO: 33146833 NR Description: putative mature anther-specific protein LAT61
  misc_feature (104)..(239): NCBI GI NO: 13937167 NR Description: At1g19350/F18O14_4 [Arabidopsis thaliana]
MAGSSSRATPYSSHNQSPLSSTFDSPILSYQVSPSSSSFPSPSRVGDPHNISTIFPFLRNGGIPSSLPPLRISNSAPVTPPVSSPTSRNSKPLPTWESFTKQSMSMAAKQSMTSLNYPFYAVSAPASPTHHRQFHAPATIPECDESDSSTVDSGHWISFQKFAQQQPFSASMVPTSPTFNLVKPAPQQLSPNTAAIQEIGQSSEFKFENSQVKPWEGERIHDVAMEDLELTLGNGKAHS

SEQ ID NO: 675 - DNA, 984 bp, Arabidopsis thaliana
  misc_feature (1)..(984): Ceres Seq. ID no. 12370505
agagctcaagagaagtaaagaaactgcgacaagagaaagaagattgactttggagaagagaggagtaacgatggaagatattcataatctcgatatagagaaaagtgatagatcgatttggttgatgaagtgtcctgtagttgtagacaaggcatggcacaagatagcagcttcgtcgtcttcttcttttgcttcctcggattctcctcccgacatggcaaagattgttcgcgaagttgatcctctacgggacgattctccccccgagttcaaaatgtatatggttggtgctgagtatgggaacatgccaaagtgctacgctttgaacatgttcacagactttgttccgatggggggcttttccgatgttaatcaaggttgtgcagctgctgaaggaaaggttgatcacaaattcgatatgaagccatatggtgaaaccattgaagaatatgctaggctttgtcgtgagagaacgagcaaagccatggttaaaaatcgacagattcaggttattgataatgaccgcggagttcatatgaggcccatgcctggaatgcttggtttagtttcctccaattccaaggaaaagaggaaacctcccccagtcaagcaaaccgaggtgaagaggacgaggagagatcgtggtgagcttgaagctataatgttcaagctatttgaaggccagcctaactggacattgaagcagcttgtacaagagacggaccagccagctcagttcctgaaagaaatactaaacgagctgtgcgtgtacaataagagaggatcgaaccaagggacatatgagcttaaacctgaatacaagaaatctgctgaagatgatacaggtgggcagtgaaatcaaccccttgtgtaattcactattatatacatgtgacatagtcataacattattataaaccctgagtcattattcatcagaagaaaaaaacaaaaaaaaaaaaaaaaaaaaaaaaaaaaaaacaa

SEQ ID NO: 676 - protein, 284 aa, Arabidopsis thaliana
  peptide (1)..(284): Ceres Seq. ID no. 12370506
  misc_feature (27)..(283): Pfam Name: Pfam Description:  Transcription initiation factor IIF
  misc_feature (24)..(284): NCBI GI NO: 15222264 NR Description: transcription initiation factor, putative
  misc_feature (25)..(279): NCBI GI NO: 34909946 NR Description: putative transcription initiation factor
  misc_feature (89)..(279): NCBI GI NO: 15231173 NR Description: transcription initiation factor IIF
  misc_feature (126)..(279): NCBI GI NO: 11285686 NR Description: hypothetical protein T25B15
  misc_feature (89)..(122): NCBI GI NO: 11285686 NR Description: hypothetical protein T25B15
  misc_feature (25)..(274): NCBI GI NO: 19111874 NR Description: transcription initiation factor iif, beta subunit
  misc_feature (29)..(274): NCBI GI NO: 24645751 NR Description: Transcription factor TFIIFbeta CG6538-PA
  misc_feature (29)..(280): NCBI GI NO: 38174399 NR Description: Unknown (protein for MGC:75790)
  misc_feature (128)..(275): NCBI GI NO: 19073998 NR Description: TRANSCRIPTION INITIATION FACTOR TFIIF BETA SUBUNIT
  misc_feature (131)..(280): NCBI GI NO: 31199641 NR Description: ENSANGP00000015059 [Anopheles gambiae]
ELKRSKETATRERRLTLEKRGVTMEDIHNLDIEKSDRSIWLMKCPVVVDKAWHKIAASSSSSFASSDSPPDMAKIVREVDPLRDDSPPEFKMYMVGAEYGNMPKCYALNMFTDFVPMGGFSDVNQGCAAAEGKVDHKFDMKPYGETIEEYARLCRERTSKAMVKNRQIQVIDNDRGVHMRPMPGMLGLVSSNSKEKRKPPPVKQTEVKRTRRDRGELEAIMFKLFEGQPNWTLKQLVQETDQPAQFLKEILNELCVYNKRGSNQGTYELKPEYKKSAEDDTGGQ

SEQ ID NO: 677 - protein, 261 aa, Arabidopsis thaliana
  peptide (1)..(261): Ceres Seq. ID no. 12370507
  misc_feature (4)..(260): Pfam Name: Pfam Description:  Transcription initiation factor IIF
  misc_feature (1)..(261): NCBI GI NO: 15222264 NR Description: transcription initiation factor, putative
  misc_feature (2)..(256): NCBI GI NO: 34909946 NR Description: putative transcription initiation factor
  misc_feature (66)..(256): NCBI GI NO: 15231173 NR Description: transcription initiation factor IIF
  misc_feature (103)..(256): NCBI GI NO: 11285686 NR Description: hypothetical protein T25B15
  misc_feature (66)..(99): NCBI GI NO: 11285686 NR Description: hypothetical protein T25B15
  misc_feature (2)..(251): NCBI GI NO: 19111874 NR Description: transcription initiation factor iif, beta subunit
  misc_feature (6)..(251): NCBI GI NO: 24645751 NR Description: Transcription factor TFIIFbeta CG6538-PA
  misc_feature (6)..(257): NCBI GI NO: 38174399 NR Description: Unknown (protein for MGC:75790)
  misc_feature (105)..(252): NCBI GI NO: 19073998 NR Description: TRANSCRIPTION INITIATION FACTOR TFIIF BETA SUBUNIT
  misc_feature (108)..(257): NCBI GI NO: 31199641 NR Description: ENSANGP00000015059 [Anopheles gambiae]
MEDIHNLDIEKSDRSIWLMKCPVVVDKAWHKIAASSSSSFASSDSPPDMAKIVREVDPLRDDSPPEFKMYMVGAEYGNMPKCYALNMFTDFVPMGGFSDVNQGCAAAEGKVDHKFDMKPYGETIEEYARLCRERTSKAMVKNRQIQVIDNDRGVHMRPMPGMLGLVSSNSKEKRKPPPVKQTEVKRTRRDRGELEAIMFKLFEGQPNWTLKQLVQETDQPAQFLKEILNELCVYNKRGSNQGTYELKPEYKKSAEDDTGGQ

SEQ ID NO: 678 - protein, 243 aa, Arabidopsis thaliana
  peptide (1)..(243): Ceres Seq. ID no. 12370508
  misc_feature (1)..(242): Pfam Name: Pfam Description:  Transcription initiation factor IIF
  misc_feature (1)..(243): NCBI GI NO: 15222264 NR Description: transcription initiation factor, putative
  misc_feature (1)..(238): NCBI GI NO: 34909946 NR Description: putative transcription initiation factor
  misc_feature (48)..(238): NCBI GI NO: 15231173 NR Description: transcription initiation factor IIF
  misc_feature (85)..(238): NCBI GI NO: 11285686 NR Description: hypothetical protein T25B15
  misc_feature (48)..(81): NCBI GI NO: 11285686 NR Description: hypothetical protein T25B15
  misc_feature (1)..(233): NCBI GI NO: 19111874 NR Description: transcription initiation factor iif, beta subunit
  misc_feature (1)..(233): NCBI GI NO: 24645751 NR Description: Transcription factor TFIIFbeta CG6538-PA
  misc_feature (1)..(239): NCBI GI NO: 38174399 NR Description: Unknown (protein for MGC:75790)
  misc_feature (87)..(234): NCBI GI NO: 19073998 NR Description: TRANSCRIPTION INITIATION FACTOR TFIIF BETA SUBUNIT
  misc_feature (90)..(239): NCBI GI NO: 31199641 NR Description: ENSANGP00000015059 [Anopheles gambiae]
MKCPVVVDKAWHKIAASSSSSFASSDSPPDMAKIVREVDPLRDDSPPEFKMYMVGAEYGNMPKCYALNMFTDFVPMGGFSDVNQGCAAAEGKVDHKFDMKPYGETIEEYARLCRERTSKAMVKNRQIQVIDNDRGVHMRPMPGMLGLVSSNSKEKRKPPPVKQTEVKRTRRDRGELEAIMFKLFEGQPNWTLKQLVQETDQPAQFLKEILNELCVYNKRGSNQGTYELKPEYKKSAEDDTGGQ

SEQ ID NO: 679 - DNA, 1122 bp, Arabidopsis thaliana
  misc_feature (1)..(1122): Ceres Seq. ID no. 12394435
caagattgagataagcaaagagttccataaactgaccgctgacattatagcaactactgcgtttggaagtagttatgccgaaggaatcgaattgtgtaggtcacaaacagagcttgagaagtattatattagttctctcactaacgttttcatccccggaactcaataccttcctacgcctaccaaccttaaactatgggagctccataagaaagtgaagaactcgatcaaaagaatcatagattcaaggctaaaatcaaaatgtaagacctatggctatggggacgatcttctaggggtcatgttgactgctgcgaaatctaacgagtatgagagaaagatgagaatggatgagatcatagaggaatgcaagaatttctactatgcagggcaaggaactacttcgattctattgacatggactacgatgttactaagcttgcaccaaggttggcaagagaaactcagagaagaggtttttaatgaatgtggtaaagataaaatcccagatacagacaccttctctaaactcaaattgatgaacatggtgttgatggagtcgcttcgtctgtacggacccgtgattaaaatttcccgagaggcaacacaagatatgaaggtaggacacttggagatcccaaagggcacaagcattatcataccgttactgaagatgcacagagacaaggccatatggggcgaagacgccgaacaattcaatcccttgagattcgaaaacggcatttctcaagccaccattcacccaaacgctctcctcccgttctcaatcggaccaagagcttgcattgccaaaaactttgccatggtcgaagccaagaccgttctcactatgatccttcaacagttccagcttagcctctcccccgagtataagcacacgccagttgatcacttcgatctcttcccgcaatacggcctacccgtaatgcttcaccctctcggatagtagttctgaatggtgaggaagagaaaaccaagaatctcaacggatatttggtcacgttatgttctatatttggccttggtcacaaataaagttcagatgatataattcaatagtggataagtcaaattcaaagtgaagtaaggaataaaaatctg

SEQ ID NO: 680 - protein, 321 aa, Arabidopsis thaliana
  peptide (1)..(321): Ceres Seq. ID no. 12394436
  misc_feature (1)..(321): NCBI GI NO: 15234248 NR Description: cytochrome P450 - like protein
  misc_feature (4)..(320): NCBI GI NO: 15226472 NR Description: cytochrome p450, putative; protein id: At2g46950.1
  misc_feature (1)..(320): NCBI GI NO: 18407219 NR Description: cytochrome P450, putative; protein id: At2g46960
  misc_feature (1)..(320): NCBI GI NO: 30690559 NR Description: cytochrome P450 family [Arabidopsis thaliana]
  misc_feature (1)..(320): NCBI GI NO: 7484896 NR Description: cytochrome P450 homolog F14M4
  misc_feature (1)..(320): NCBI GI NO: 34913346 NR Description: putative cytochrome P450
  misc_feature (1)..(320): NCBI GI NO: 34913354 NR Description: putative cytochrome P450
  misc_feature (1)..(320): NCBI GI NO: 38112707 NR Description: cytochrome P450 [Triticum aestivum]
  misc_feature (1)..(320): NCBI GI NO: 22324446 NR Description: putative cytochrome P450
  misc_feature (1)..(320): NCBI GI NO: 34913350 NR Description: putative cytochrome P450
KIEISKEFHKLTADIIATTAFGSSYAEGIELCRSQTELEKYYISSLTNVFIPGTQYLPTPTNLKLWELHKKVKNSIKRIIDSRLKSKCKTYGYGDDLLGVMLTAAKSNEYERKMRMDEIIEECKNFYYAGQGTTSILLTWTTMLLSLHQGWQEKLREEVFNECGKDKIPDTDTFSKLKLMNMVLMESLRLYGPVIKISREATQDMKVGHLEIPKGTSIIIPLLKMHRDKAIWGEDAEQFNPLRFENGISQATIHPNALLPFSIGPRACIAKNFAMVEAKTVLTMILQQFQLSLSPEYKHTPVDHFDLFPQYGLPVMLHPLG

SEQ ID NO: 681 - protein, 221 aa, Arabidopsis thaliana
  peptide (1)..(221): Ceres Seq. ID no. 12394437
  misc_feature (1)..(221): NCBI GI NO: 15234248 NR Description: cytochrome P450 - like protein
  misc_feature (1)..(220): NCBI GI NO: 15226472 NR Description: cytochrome p450, putative; protein id: At2g46950.1
  misc_feature (1)..(220): NCBI GI NO: 18407219 NR Description: cytochrome P450, putative; protein id: At2g46960
  misc_feature (1)..(220): NCBI GI NO: 30690559 NR Description: cytochrome P450 family [Arabidopsis thaliana]
  misc_feature (1)..(220): NCBI GI NO: 7484896 NR Description: cytochrome P450 homolog F14M4
  misc_feature (1)..(220): NCBI GI NO: 34913346 NR Description: putative cytochrome P450
  misc_feature (1)..(220): NCBI GI NO: 34913354 NR Description: putative cytochrome P450
  misc_feature (1)..(220): NCBI GI NO: 38112707 NR Description: cytochrome P450 [Triticum aestivum]
  misc_feature (1)..(220): NCBI GI NO: 22324446 NR Description: putative cytochrome P450
  misc_feature (1)..(220): NCBI GI NO: 34913350 NR Description: putative cytochrome P450
MLTAAKSNEYERKMRMDEIIEECKNFYYAGQGTTSILLTWTTMLLSLHQGWQEKLREEVFNECGKDKIPDTDTFSKLKLMNMVLMESLRLYGPVIKISREATQDMKVGHLEIPKGTSIIIPLLKMHRDKAIWGEDAEQFNPLRFENGISQATIHPNALLPFSIGPRACIAKNFAMVEAKTVLTMILQQFQLSLSPEYKHTPVDHFDLFPQYGLPVMLHPLG

SEQ ID NO: 682 - protein, 208 aa, Arabidopsis thaliana
  peptide (1)..(208): Ceres Seq. ID no. 12394438
  misc_feature (1)..(208): NCBI GI NO: 15234248 NR Description: cytochrome P450 - like protein
  misc_feature (1)..(207): NCBI GI NO: 15226472 NR Description: cytochrome p450, putative; protein id: At2g46950.1
  misc_feature (1)..(207): NCBI GI NO: 18407219 NR Description: cytochrome P450, putative; protein id: At2g46960
  misc_feature (1)..(207): NCBI GI NO: 30690559 NR Description: cytochrome P450 family [Arabidopsis thaliana]
  misc_feature (1)..(207): NCBI GI NO: 7484896 NR Description: cytochrome P450 homolog F14M4
  misc_feature (1)..(207): NCBI GI NO: 34913346 NR Description: putative cytochrome P450
  misc_feature (1)..(207): NCBI GI NO: 34913354 NR Description: putative cytochrome P450
  misc_feature (1)..(207): NCBI GI NO: 38112707 NR Description: cytochrome P450 [Triticum aestivum]
  misc_feature (1)..(207): NCBI GI NO: 22324446 NR Description: putative cytochrome P450
  misc_feature (1)..(207): NCBI GI NO: 34913350 NR Description: putative cytochrome P450
MRMDEIIEECKNFYYAGQGTTSILLTWTTMLLSLHQGWQEKLREEVFNECGKDKIPDTDTFSKLKLMNMVLMESLRLYGPVIKISREATQDMKVGHLEIPKGTSIIIPLLKMHRDKAIWGEDAEQFNPLRFENGISQATIHPNALLPFSIGPRACIAKNFAMVEAKTVLTMILQQFQLSLSPEYKHTPVDHFDLFPQYGLPVMLHPLG

SEQ ID NO: 683 - DNA, 1045 bp, Arabidopsis thaliana
  misc_feature (1)..(1045): Ceres Seq. ID no. 13488473
aaaaagcttttgaagaacagaggaacaagaagaagaaagatgttcaggaaccagtacgacacagatgtgacaacatggagtcccacaggtcgactattccaagtcgaatacgccatggaagctgtgaaacaaggctccgcagcaataggactcagatctcgctctcatgtcgtcctcgcttgtgtcaacaaagcacaatcagagctctcttctcatcaaaggaagatctttaaagtcgatgatcatattggtgttgctattgctggtctcactgctgatggtcgtgttctctctcgatatatgagatctgagtctattaatcactcttttacttatgagtctcctcttcctgttggtcgtcttgttgttcatcttgctgataaagctcaggtatgtacccaacgatcatggaaacggccttatggtgtgggtttgctggtaggtggattggacgagtcaggagctcacctctactacaactgccctagcggaaactactttgaatatcaagcattcgctatcgggtctcgttcacaagctgcgaaaacctatctggagcgcaaattcgagagcttccaagaatcatcaaaagaagatctgataaaagatgctattatggccataagggaaactttgcaaggggaaacactgaagagctcgctctgcactgtttctgttctaggagtcgatgaaccattccatttcttggaccaggaaagcattcaaaaggtgattgatacgtttgagaaggttcctgaggaagaggaagatgctggtgagggtgaggccgaacccgaagctgctcctggtgctgctggaactggtgaacaaggtggttcaggtgatcaagatgttgcaccaatggaaatttgagcaagagggaatgagttcaaagttggattttctaaccaactttcttgtgtttagctctttgatgtgttccaacttccaagtattgttgttttaactcagctttgtttattttaacagcttgcaacaatgagttattgagtgccactagcttatatttagtcatacttaagtt

SEQ ID NO: 684 - protein, 290 aa, Arabidopsis thaliana
  peptide (1)..(290): Ceres Seq. ID no. 13488474
  misc_feature (42)..(227): Pfam Name: Pfam Description:  Proteasome A-type and B-type
  misc_feature (14)..(290): NCBI GI NO: 15220151 NR Description: 20S proteasome alpha subunit F2 (PAF2)
  misc_feature (24)..(290): NCBI GI NO: 2511586 NR Description: multicatalytic endopeptidase
  misc_feature (14)..(290): NCBI GI NO: 25290066 NR Description: C 3
  misc_feature (14)..(290): NCBI GI NO: 21537234 NR Description: 20S proteasome subunit PAF1 [Arabidopsis thaliana]
  misc_feature (14)..(290): NCBI GI NO: 15239061 NR Description: 20S proteasome alpha subunit F1 (PAF1)
  misc_feature (14)..(290): NCBI GI NO: 22947842 NR Description: 20S proteasome alpha 6 subunit
  misc_feature (14)..(263): NCBI GI NO: 1709758 NR Description: Proteasome subunit alpha type 1
  misc_feature (19)..(175): NCBI GI NO: 14594923 NR Description: putative alpha6 proteasome subunit
  misc_feature (14)..(249): NCBI GI NO: 12229911 NR Description: Proteasome subunit alpha type 1
  misc_feature (19)..(205): NCBI GI NO: 29247195 NR Description: GLP_47_22543_21776 [Giardia lamblia ATCC 50803]
KKLLKNRGTRRRKMFRNQYDTDVTTWSPTGRLFQVEYAMEAVKQGSAAIGLRSRSHVVLACVNKAQSELSSHQRKIFKVDDHIGVAIAGLTADGRVLSRYMRSESINHSFTYESPLPVGRLVVHLADKAQVCTQRSWKRPYGVGLLVGGLDESGAHLYYNCPSGNYFEYQAFAIGSRSQAAKTYLERKFESFQESSKEDLIKDAIMAIRETLQGETLKSSLCTVSVLGVDEPFHFLDQESIQKVIDTFEKVPEEEEDAGEGEAEPEAAPGAAGTGEQGGSGDQDVAPMEI

SEQ ID NO: 685 - protein, 277 aa, Arabidopsis thaliana
  peptide (1)..(277): Ceres Seq. ID no. 13488475
  misc_feature (29)..(214): Pfam Name: Pfam Description:  Proteasome A-type and B-type
  misc_feature (1)..(277): NCBI GI NO: 15220151 NR Description: 20S proteasome alpha subunit F2 (PAF2)
  misc_feature (11)..(277): NCBI GI NO: 2511586 NR Description: multicatalytic endopeptidase
  misc_feature (1)..(277): NCBI GI NO: 25290066 NR Description: C 3
  misc_feature (1)..(277): NCBI GI NO: 21537234 NR Description: 20S proteasome subunit PAF1 [Arabidopsis thaliana]
  misc_feature (1)..(277): NCBI GI NO: 15239061 NR Description: 20S proteasome alpha subunit F1 (PAF1)
  misc_feature (1)..(277): NCBI GI NO: 22947842 NR Description: 20S proteasome alpha 6 subunit
  misc_feature (1)..(250): NCBI GI NO: 1709758 NR Description: Proteasome subunit alpha type 1
  misc_feature (6)..(162): NCBI GI NO: 14594923 NR Description: putative alpha6 proteasome subunit
  misc_feature (1)..(236): NCBI GI NO: 12229911 NR Description: Proteasome subunit alpha type 1
  misc_feature (6)..(192): NCBI GI NO: 29247195 NR Description: GLP_47_22543_21776 [Giardia lamblia ATCC 50803]
MFRNQYDTDVTTWSPTGRLFQVEYAMEAVKQGSAAIGLRSRSHVVLACVNKAQSELSSHQRKIFKVDDHIGVAIAGLTADGRVLSRYMRSESINHSFTYESPLPVGRLVVHLADKAQVCTQRSWKRPYGVGLLVGGLDESGAHLYYNCPSGNYFEYQAFAIGSRSQAAKTYLERKFESFQESSKEDLIKDAIMAIRETLQGETLKSSLCTVSVLGVDEPFHFLDQESIQKVIDTFEKVPEEEEDAGEGEAEPEAAPGAAGTGEQGGSGDQDVAPMEI

SEQ ID NO: 686 - protein, 252 aa, Arabidopsis thaliana
  peptide (1)..(252): Ceres Seq. ID no. 13488476
  misc_feature (4)..(189): Pfam Name: Pfam Description:  Proteasome A-type and B-type
  misc_feature (1)..(252): NCBI GI NO: 15220151 NR Description: 20S proteasome alpha subunit F2 (PAF2)
  misc_feature (1)..(252): NCBI GI NO: 2511586 NR Description: multicatalytic endopeptidase
  misc_feature (1)..(252): NCBI GI NO: 25290066 NR Description: C 3
  misc_feature (1)..(252): NCBI GI NO: 21537234 NR Description: 20S proteasome subunit PAF1 [Arabidopsis thaliana]
  misc_feature (1)..(252): NCBI GI NO: 15239061 NR Description: 20S proteasome alpha subunit F1 (PAF1)
  misc_feature (1)..(252): NCBI GI NO: 22947842 NR Description: 20S proteasome alpha 6 subunit
  misc_feature (1)..(225): NCBI GI NO: 1709758 NR Description: Proteasome subunit alpha type 1
  misc_feature (1)..(137): NCBI GI NO: 14594923 NR Description: putative alpha6 proteasome subunit
  misc_feature (1)..(211): NCBI GI NO: 12229911 NR Description: Proteasome subunit alpha type 1
  misc_feature (1)..(167): NCBI GI NO: 29247195 NR Description: GLP_47_22543_21776 [Giardia lamblia ATCC 50803]
MEAVKQGSAAIGLRSRSHVVLACVNKAQSELSSHQRKIFKVDDHIGVAIAGLTADGRVLSRYMRSESINHSFTYESPLPVGRLVVHLADKAQVCTQRSWKRPYGVGLLVGGLDESGAHLYYNCPSGNYFEYQAFAIGSRSQAAKTYLERKFESFQESSKEDLIKDAIMAIRETLQGETLKSSLCTVSVLGVDEPFHFLDQESIQKVIDTFEKVPEEEEDAGEGEAEPEAAPGAAGTGEQGGSGDQDVAPMEI

SEQ ID NO: 687 - DNA, 1354 bp, Arabidopsis thaliana
  misc_feature (1)..(1354): Ceres Seq. ID no. 13486811
tgggacaagaactgatagagtgggataagagacaaataaggagaatcaaacaagcaatccgatcgatctaccagatcgccatgattcttacaagatgcttacccttgatatggctatctctacttactgtgtgtgctgctgggaggacattgcaccctctccctgttaaaggacccaaaactgtcaagcttcaacttcagacttcacgtccttataacatcgcacacagaggttccaatggagagatcccagaagaaactacagctgcatacttgaaagcaattgaagaaggcacagacttcatagaaacagatatcttatcatccaaagatggtgtgctcatatgtttccatgattgtattctcgacgaaacaaccaatgttgcgagccacaaggagtttgcagatcgtaaaaggacatatgatgtccaaggattcaacattactggctttttcacttttgattttacacttaaagaactaaagcaactacgtataaagcagcgatatgcttttcgggatcagcaatacaacggaatgtaccctatcattacatttgaggaatttcttaccattgctcgggatgctccaagagttgttggaatatatcctgagattaaaaatccagttttaatgaaccagcatgtcaaatggcctggtggtaagaaatttgaggataaagttgtggagacacttaagaagtatgggtatggaggctcgtatttgtccaagaagtggttgaaaaaaccactatttattcagtcatttgccccaacttcactcgtgtacatatcaaacttgacagactcgccgaaagtccttctaatagacgatgttaccatgccaacgcaagacactaaccagacatatgcagagatcacatcagatgcgtatttcgaatacatcaagcaatatgttgtgggtatcggaccatggaaggatacaattgttccggtaaacaacaactatgtgctagcccccacagatttggtcaaaagagctcacgcacacaatctgcaggtgcatccctatacgtacaggaatgaacacgaattcttacactataactttagccaagacccgtataaggagtacgactactggatcaatgagattggagttgatggactcttcactgatttcacaggcagcctccataactttcaagaatggacatctccattacctgatacctccaagtctccacgacagcttcttagtcaaattgcctcattggtcctcccttatgcaaaggcttgaagttccacataaacacctatcagtaatcctattgtttgcaattaattgtattgaataaagttacaatgattattctgaagaagaacacagttgtc

SEQ ID NO: 688 - protein, 418 aa, Arabidopsis thaliana
  peptide (1)..(418): Ceres Seq. ID no. 13486812
  misc_feature (27)..(418): NCBI GI NO: 15221164 NR Description: glycerophosphodiester phosphodiesterase -related
  misc_feature (33)..(395): NCBI GI NO: 15241502 NR Description: glycerophosphodiester phosphodiesterase
  misc_feature (38)..(415): NCBI GI NO: 34909788 NR Description: putative glycerophosphoryl diester phosphodiesterase
  misc_feature (60)..(392): NCBI GI NO: 34394918 NR Description: putative glycerophosphoryl diester phosphodiesterase
  misc_feature (61)..(380): NCBI GI NO: 23126501 NR Description: hypothetical protein [Nostoc punctiforme]
  misc_feature (66)..(380): NCBI GI NO: 16127502 NR Description: glycerophosphoryl diester phosphodiesterase
  misc_feature (70)..(379): NCBI GI NO: 32141147 NR Description: putative glycerophosphoryl diester phosphodiesterase
  misc_feature (56)..(379): NCBI GI NO: 15595544 NR Description: glycerophosphoryl diester phosphodiesterase
  misc_feature (70)..(379): NCBI GI NO: 32997080 NR Description: glycerophosphoryl diester phosphodiesterase
  misc_feature (41)..(379): NCBI GI NO: 23105793 NR Description: hypothetical protein [Azotobacter vinelandii]
GQELIEWDKRQIRRIKQAIRSIYQIAMILTRCLPLIWLSLLTVCAAGRTLHPLPVKGPKTVKLQLQTSRPYNIAHRGSNGEIPEETTAAYLKAIEEGTDFIETDILSSKDGVLICFHDCILDETTNVASHKEFADRKRTYDVQGFNITGFFTFDFTLKELKQLRIKQRYAFRDQQYNGMYPIITFEEFLTIARDAPRVVGIYPEIKNPVLMNQHVKWPGGKKFEDKVVETLKKYGYGGSYLSKKWLKKPLFIQSFAPTSLVYISNLTDSPKVLLIDDVTMPTQDTNQTYAEITSDAYFEYIKQYVVGIGPWKDTIVPVNNNYVLAPTDLVKRAHAHNLQVHPYTYRNEHEFLHYNFSQDPYKEYDYWINEIGVDGLFTDFTGSLHNFQEWTSPLPDTSKSPRQLLSQIASLVLPYAKA

SEQ ID NO: 689 - protein, 392 aa, Arabidopsis thaliana
  peptide (1)..(392): Ceres Seq. ID no. 13486813
  misc_feature (1)..(392): NCBI GI NO: 15221164 NR Description: glycerophosphodiester phosphodiesterase -related
  misc_feature (7)..(369): NCBI GI NO: 15241502 NR Description: glycerophosphodiester phosphodiesterase
  misc_feature (12)..(389): NCBI GI NO: 34909788 NR Description: putative glycerophosphoryl diester phosphodiesterase
  misc_feature (34)..(366): NCBI GI NO: 34394918 NR Description: putative glycerophosphoryl diester phosphodiesterase
  misc_feature (35)..(354): NCBI GI NO: 23126501 NR Description: hypothetical protein [Nostoc punctiforme]
  misc_feature (40)..(354): NCBI GI NO: 16127502 NR Description: glycerophosphoryl diester phosphodiesterase
  misc_feature (44)..(353): NCBI GI NO: 32141147 NR Description: putative glycerophosphoryl diester phosphodiesterase
  misc_feature (30)..(353): NCBI GI NO: 15595544 NR Description: glycerophosphoryl diester phosphodiesterase
  misc_feature (44)..(353): NCBI GI NO: 32997080 NR Description: glycerophosphoryl diester phosphodiesterase
  misc_feature (15)..(353): NCBI GI NO: 23105793 NR Description: hypothetical protein [Azotobacter vinelandii]
MILTRCLPLIWLSLLTVCAAGRTLHPLPVKGPKTVKLQLQTSRPYNIAHRGSNGEIPEETTAAYLKAIEEGTDFIETDILSSKDGVLICFHDCILDETTNVASHKEFADRKRTYDVQGFNITGFFTFDFTLKELKQLRIKQRYAFRDQQYNGMYPIITFEEFLTIARDAPRVVGIYPEIKNPVLMNQHVKWPGGKKFEDKVVETLKKYGYGGSYLSKKWLKKPLFIQSFAPTSLVYISNLTDSPKVLLIDDVTMPTQDTNQTYAEITSDAYFEYIKQYVVGIGPWKDTIVPVNNNYVLAPTDLVKRAHAHNLQVHPYTYRNEHEFLHYNFSQDPYKEYDYWINEIGVDGLFTDFTGSLHNFQEWTSPLPDTSKSPRQLLSQIASLVLPYAKA

SEQ ID NO: 690 - protein, 240 aa, Arabidopsis thaliana
  peptide (1)..(240): Ceres Seq. ID no. 13486814
  misc_feature (1)..(240): NCBI GI NO: 15221164 NR Description: glycerophosphodiester phosphodiesterase -related
  misc_feature (1)..(217): NCBI GI NO: 15241502 NR Description: glycerophosphodiester phosphodiesterase
  misc_feature (1)..(237): NCBI GI NO: 34909788 NR Description: putative glycerophosphoryl diester phosphodiesterase
  misc_feature (1)..(214): NCBI GI NO: 34394918 NR Description: putative glycerophosphoryl diester phosphodiesterase
  misc_feature (1)..(202): NCBI GI NO: 23126501 NR Description: hypothetical protein [Nostoc punctiforme]
  misc_feature (1)..(202): NCBI GI NO: 16127502 NR Description: glycerophosphoryl diester phosphodiesterase
  misc_feature (1)..(201): NCBI GI NO: 32141147 NR Description: putative glycerophosphoryl diester phosphodiesterase
  misc_feature (1)..(201): NCBI GI NO: 15595544 NR Description: glycerophosphoryl diester phosphodiesterase
  misc_feature (1)..(201): NCBI GI NO: 32997080 NR Description: glycerophosphoryl diester phosphodiesterase
  misc_feature (1)..(201): NCBI GI NO: 23105793 NR Description: hypothetical protein [Azotobacter vinelandii]
MYPIITFEEFLTIARDAPRVVGIYPEIKNPVLMNQHVKWPGGKKFEDKVVETLKKYGYGGSYLSKKWLKKPLFIQSFAPTSLVYISNLTDSPKVLLIDDVTMPTQDTNQTYAEITSDAYFEYIKQYVVGIGPWKDTIVPVNNNYVLAPTDLVKRAHAHNLQVHPYTYRNEHEFLHYNFSQDPYKEYDYWINEIGVDGLFTDFTGSLHNFQEWTSPLPDTSKSPRQLLSQIASLVLPYAKA

SEQ ID NO: 691 - DNA, 1045 bp, Arabidopsis thaliana
  misc_feature (1)..(1045): Ceres Seq. ID no. 13487337
aaaaaaccaaaaaaaagaaaggagagaggccgacttggggtataagccagagttcttcttctttttcaagcttcttcttctcatcagtcatcaccggaatctaatttatactcgcaaaactcagcgattcgtttcgtttctgacaagtttccaattctacagcaatggatctcaatctcgatgcacctcactccatgggaacgaccatcatcggcgtcacttacaatggaggtgtcgtcctcggagccgactcacgtaccagcaccggtatgtacgtagcgaatcgagcttctgataagattacacaactgacagataatgtctacgtctgccgctctggatcggctgctgattctcaagttgtatctgactatgtccgctacttccttcaccagcatacaattcagcatggacaacccgcaactgttaaggtttctgccaaccttatcaggatgctcgcatataataacaagaacatgctccaaactggtctcatcgttggaggatgggataaatatgagggtgggaagatctacgggatcccactcggtggaactgtagtcgagcaaccgtttgccattggaggctctggttcgagctatctctacgggttcttcgaccaggcttggaaagataacatgaccaaagaagaagcagagcaacttgttgtgaaggcggtttcactagccatcgcccgtgatggagccagtggtggtgtcgtacggactgtcataatcaactcagagggagtgacgagaaacttttaccctggagataagttgcagctttggcacgaagaattggagccccaaaactcactcttagacattctgaacgctgctggtcctgaaccaatggccatgtgatctgcaaacaacgatcattatcttactctgttgggcaaacattttagatatttcattacagtttccagtgtctttaagactttaaactctgtttgaggttctgttgtaatgaatgacccgatctttctgttttaaacggatatcgtgtttcttatggctatggttttaattcctctgtc

SEQ ID NO: 692 - protein, 233 aa, Arabidopsis thaliana
  peptide (1)..(233): Ceres Seq. ID no. 13487338
  misc_feature (9)..(191): Pfam Name: Pfam Description:  Proteasome A-type and B-type
  misc_feature (1)..(233): NCBI GI NO: 15235889 NR Description: 20S proteasome beta subunit A (PBA1)
  misc_feature (11)..(233): NCBI GI NO: 21592365 NR Description: multicatalytic endopeptidase complex
  misc_feature (4)..(231): NCBI GI NO: 3024440 NR Description: Proteasome subunit beta type 6 precursor
  misc_feature (1)..(231): NCBI GI NO: 8671502 NR Description: beta 1 subunit of 20S proteasome
  misc_feature (2)..(209): NCBI GI NO: 32400975 NR Description: proteasome subunit [Griffithsia japonica]
  misc_feature (5)..(209): NCBI GI NO: 7435894 NR Description: proteasome subunit 1 - slime mold
  misc_feature (11)..(204): NCBI GI NO: 19113087 NR Description: proteasome component precursor
  misc_feature (1)..(209): NCBI GI NO: 5823090 NR Description: proteasome delta [Oncorhynchus mykiss]
  misc_feature (10)..(206): NCBI GI NO: 17380261 NR Description: Proteasome subunit beta type 6 precursor
  misc_feature (10)..(206): NCBI GI NO: 26347247 NR Description: unnamed protein product [Mus musculus]
MDLNLDAPHSMGTTIIGVTYNGGVVLGADSRTSTGMYVANRASDKITQLTDNVYVCRSGSAADSQVVSDYVRYFLHQHTIQHGQPATVKVSANLIRMLAYNNKNMLQTGLIVGGWDKYEGGKIYGIPLGGTVVEQPFAIGGSGSSYLYGFFDQAWKDNMTKEEAEQLVVKAVSLAIARDGASGGVVRTVIINSEGVTRNFYPGDKLQLWHEELEPQNSLLDILNAAGPEPMAM

SEQ ID NO: 693 - protein, 223 aa, Arabidopsis thaliana
  peptide (1)..(223): Ceres Seq. ID no. 13487339
  misc_feature (1)..(181): Pfam Name: Pfam Description:  Proteasome A-type and B-type
  misc_feature (1)..(223): NCBI GI NO: 15235889 NR Description: 20S proteasome beta subunit A (PBA1)
  misc_feature (1)..(223): NCBI GI NO: 21592365 NR Description: multicatalytic endopeptidase complex
  misc_feature (1)..(221): NCBI GI NO: 3024440 NR Description: Proteasome subunit beta type 6 precursor
  misc_feature (1)..(221): NCBI GI NO: 8671502 NR Description: beta 1 subunit of 20S proteasome
  misc_feature (1)..(199): NCBI GI NO: 32400975 NR Description: proteasome subunit [Griffithsia japonica]
  misc_feature (1)..(199): NCBI GI NO: 7435894 NR Description: proteasome subunit 1 - slime mold
  misc_feature (1)..(194): NCBI GI NO: 19113087 NR Description: proteasome component precursor
  misc_feature (1)..(199): NCBI GI NO: 5823090 NR Description: proteasome delta [Oncorhynchus mykiss]
  misc_feature (1)..(196): NCBI GI NO: 17380261 NR Description: Proteasome subunit beta type 6 precursor
  misc_feature (1)..(196): NCBI GI NO: 26347247 NR Description: unnamed protein product [Mus musculus]
MGTTIIGVTYNGGVVLGADSRTSTGMYVANRASDKITQLTDNVYVCRSGSAADSQVVSDYVRYFLHQHTIQHGQPATVKVSANLIRMLAYNNKNMLQTGLIVGGWDKYEGGKIYGIPLGGTVVEQPFAIGGSGSSYLYGFFDQAWKDNMTKEEAEQLVVKAVSLAIARDGASGGVVRTVIINSEGVTRNFYPGDKLQLWHEELEPQNSLLDILNAAGPEPMAM

SEQ ID NO: 694 - protein, 198 aa, Arabidopsis thaliana
  peptide (1)..(198): Ceres Seq. ID no. 13487340
  misc_feature (1)..(156): Pfam Name: Pfam Description:  Proteasome A-type and B-type
  misc_feature (1)..(198): NCBI GI NO: 15235889 NR Description: 20S proteasome beta subunit A (PBA1)
  misc_feature (1)..(198): NCBI GI NO: 21592365 NR Description: multicatalytic endopeptidase complex
  misc_feature (1)..(196): NCBI GI NO: 3024440 NR Description: Proteasome subunit beta type 6 precursor
  misc_feature (1)..(196): NCBI GI NO: 8671502 NR Description: beta 1 subunit of 20S proteasome
  misc_feature (1)..(174): NCBI GI NO: 32400975 NR Description: proteasome subunit [Griffithsia japonica]
  misc_feature (1)..(174): NCBI GI NO: 7435894 NR Description: proteasome subunit 1 - slime mold
  misc_feature (1)..(169): NCBI GI NO: 19113087 NR Description: proteasome component precursor
  misc_feature (1)..(174): NCBI GI NO: 5823090 NR Description: proteasome delta [Oncorhynchus mykiss]
  misc_feature (1)..(171): NCBI GI NO: 17380261 NR Description: Proteasome subunit beta type 6 precursor
  misc_feature (1)..(171): NCBI GI NO: 26347247 NR Description: unnamed protein product [Mus musculus]
MYVANRASDKITQLTDNVYVCRSGSAADSQVVSDYVRYFLHQHTIQHGQPATVKVSANLIRMLAYNNKNMLQTGLIVGGWDKYEGGKIYGIPLGGTVVEQPFAIGGSGSSYLYGFFDQAWKDNMTKEEAEQLVVKAVSLAIARDGASGGVVRTVIINSEGVTRNFYPGDKLQLWHEELEPQNSLLDILNAAGPEPMAM

SEQ ID NO: 695 - DNA, 803 bp, Arabidopsis thaliana
  misc_feature (1)..(803): Ceres Seq. ID no. 12324009
aatttctgccttacatatcaaaagatagaacacacacacaaataaagcaaagaaacagaatatctttgagatctcctctttatttggagaagacaaaacacagaacaagaattagaaagaagggagagaaagcaaaaatggcactaagaatgtgggcttcttctacagcaaacgctctcaagctttcttcttctgtttccaagtctcatctctctcctttctccttctctagatgcttctccacagttttggagggtttgaagtatgcaaattcacatgagtgggttaaacatgaaggctctgttgccaccattggcatcactgcccatgctcaggaccatttaggtgaagtggtgtttgttgaactgccagaggacaatacttcagtgagcaaagagaaaagctttggagcagtggagagtgtgaaggcaacaagtgagatcttatcaccaatctcaggtgaaatcattgaggttaacaagaagctcacagaatcacctggcttgatcaactcaagcccctatgaagatggttggatgatcaaagtgaaaccaagtagccccgcggagttggaatctttgatgggtccaaaggaatacaccaagttctgcgaggaggaagatgctgctcactaggagggtttctctctgtcttttatgttccaagttctatcaattctcatgcttgttttctaaatttgcatacactctatgaccaacttcacaaaataagagttcaagaagatgaaacagagacctaacaaacacattaagattttttctttcatatatcttgttatcccc

SEQ ID NO: 696 - protein, 210 aa, Arabidopsis thaliana
  peptide (1)..(210): Ceres Seq. ID no. 12324010
  misc_feature (86)..(206): Pfam Name: Pfam Description:  Glycine cleavage H-protein
  misc_feature (46)..(210): NCBI GI NO: 15226973 NR Description: glycine decarboxylase complex H-protein
  misc_feature (46)..(210): NCBI GI NO: 15223217 NR Description: glycine cleavage system H protein precursor
  misc_feature (46)..(210): NCBI GI NO: 121080 NR Description: Glycine cleavage system H protein
  misc_feature (46)..(210): NCBI GI NO: 2147453 NR Description: glycine cleavage system protein H precursor
  misc_feature (46)..(210): NCBI GI NO: 2499417 NR Description: Glycine cleavage system H protein
  misc_feature (46)..(210): NCBI GI NO: 2887286 NR Description: H protein [Flaveria anomala]
  misc_feature (46)..(210): NCBI GI NO: 1346118 NR Description: Glycine cleavage system H protein
  misc_feature (46)..(210): NCBI GI NO: 3688309 NR Description: H-Protein precursor [Flaveria pringlei]
  misc_feature (47)..(210): NCBI GI NO: 2119600 NR Description: glycine cleavage system protein H precursor
  misc_feature (46)..(209): NCBI GI NO: 1362140 NR Description: H-protein precursor - Flaveria trinervia
FLPYISKDRTHTQIKQRNRISLRSPLYLEKTKHRTRIRKKGEKAKMALRMWASSTANALKLSSSVSKSHLSPFSFSRCFSTVLEGLKYANSHEWVKHEGSVATIGITAHAQDHLGEVVFVELPEDNTSVSKEKSFGAVESVKATSEILSPISGEIIEVNKKLTESPGLINSSPYEDGWMIKVKPSSPAELESLMGPKEYTKFCEEEDAAH

SEQ ID NO: 697 - protein, 165 aa, Arabidopsis thaliana
  peptide (1)..(165): Ceres Seq. ID no. 12324011
  misc_feature (41)..(161): Pfam Name: Pfam Description:  Glycine cleavage H-protein
  misc_feature (1)..(165): NCBI GI NO: 15226973 NR Description: glycine decarboxylase complex H-protein
  misc_feature (1)..(165): NCBI GI NO: 15223217 NR Description: glycine cleavage system H protein precursor
  misc_feature (1)..(165): NCBI GI NO: 121080 NR Description: Glycine cleavage system H protein
  misc_feature (1)..(165): NCBI GI NO: 2147453 NR Description: glycine cleavage system protein H precursor
  misc_feature (1)..(165): NCBI GI NO: 2499417 NR Description: Glycine cleavage system H protein
  misc_feature (1)..(165): NCBI GI NO: 2887286 NR Description: H protein [Flaveria anomala]
  misc_feature (1)..(165): NCBI GI NO: 1346118 NR Description: Glycine cleavage system H protein
  misc_feature (1)..(165): NCBI GI NO: 3688309 NR Description: H-Protein precursor [Flaveria pringlei]
  misc_feature (2)..(165): NCBI GI NO: 2119600 NR Description: glycine cleavage system protein H precursor
  misc_feature (1)..(164): NCBI GI NO: 1362140 NR Description: H-protein precursor - Flaveria trinervia
MALRMWASSTANALKLSSSVSKSHLSPFSFSRCFSTVLEGLKYANSHEWVKHEGSVATIGITAHAQDHLGEVVFVELPEDNTSVSKEKSFGAVESVKATSEILSPISGEIIEVNKKLTESPGLINSSPYEDGWMIKVKPSSPAELESLMGPKEYTKFCEEEDAAH

SEQ ID NO: 698 - protein, 161 aa, Arabidopsis thaliana
  peptide (1)..(161): Ceres Seq. ID no. 12324012
  misc_feature (37)..(157): Pfam Name: Pfam Description:  Glycine cleavage H-protein
  misc_feature (1)..(161): NCBI GI NO: 15226973 NR Description: glycine decarboxylase complex H-protein
  misc_feature (1)..(161): NCBI GI NO: 15223217 NR Description: glycine cleavage system H protein precursor
  misc_feature (1)..(161): NCBI GI NO: 121080 NR Description: Glycine cleavage system H protein
  misc_feature (1)..(161): NCBI GI NO: 2147453 NR Description: glycine cleavage system protein H precursor
  misc_feature (1)..(161): NCBI GI NO: 2499417 NR Description: Glycine cleavage system H protein
  misc_feature (1)..(161): NCBI GI NO: 2887286 NR Description: H protein [Flaveria anomala]
  misc_feature (1)..(161): NCBI GI NO: 1346118 NR Description: Glycine cleavage system H protein
  misc_feature (1)..(161): NCBI GI NO: 3688309 NR Description: H-Protein precursor [Flaveria pringlei]
  misc_feature (1)..(161): NCBI GI NO: 2119600 NR Description: glycine cleavage system protein H precursor
  misc_feature (1)..(160): NCBI GI NO: 1362140 NR Description: H-protein precursor - Flaveria trinervia
MWASSTANALKLSSSVSKSHLSPFSFSRCFSTVLEGLKYANSHEWVKHEGSVATIGITAHAQDHLGEVVFVELPEDNTSVSKEKSFGAVESVKATSEILSPISGEIIEVNKKLTESPGLINSSPYEDGWMIKVKPSSPAELESLMGPKEYTKFCEEEDAAH

SEQ ID NO: 699 - DNA, 600 bp, Arabidopsis thaliana
  misc_feature (1)..(600): Ceres Seq. ID no. 12396869
acttgacaaatctgagcatttcctttttgcttacagcggaaatatctgaaccaacgcgatgccgtcgacgcagtccttgaccgtcgcagcgaagacgctacgaaatcggatcttctctaggtctggatctacatccgccggtccgagtcggtgggcgacgccaggtcacgaggagcgacctaagggttactttatgaaccgtactcctccggcaccaggacagtcgcgaaaatgggaagattgggagcttccttgttacatcaccagcttccttacaattgttatcctcggcgttggactcaatgccaaacctgatctttcaatcgagacttgggctcatcagaaagctttagagcgtcttgagatggagaagctcgcgaccgctggagattcatctgattaagcatcaccgttggatctccggttgcttgatttggtatgtccttattctccgggagttgaggagtttttttaccgtttaatgatgatgataacgaagactggagagttagggtttcgtttggcccttgaactttgtttcaattctcctttgttttgtcgataatgatgatgttcatgaaataagtgttcttttaactg

SEQ ID NO: 700 - protein, 114 aa, Arabidopsis thaliana
  peptide (1)..(114): Ceres Seq. ID no. 12396870
  misc_feature (1)..(114): NCBI GI NO: 15227917 NR Description: unknown protein; protein id: At2g42310
  misc_feature (1)..(113): NCBI GI NO: 7485503 NR Description: hypothetical protein F15B8
  misc_feature (1)..(113): NCBI GI NO: 18410807 NR Description: Expressed protein; protein id: At3g57785
  misc_feature (1)..(104): NCBI GI NO: 9858777 NR Description: BAC19.9 [Lycopersicon esculentum]
  misc_feature (24)..(96): NCBI GI NO: 29150398 NR Description: hypothetical protein
MPSTQSLTVAAKTLRNRIFSRSGSTSAGPSRWATPGHEERPKGYFMNRTPPAPGQSRKWEDWELPCYITSFLTIVILGVGLNAKPDLSIETWAHQKALERLEMEKLATAGDSSD

SEQ ID NO: 701 - protein, 69 aa, Arabidopsis thaliana
  peptide (1)..(69): Ceres Seq. ID no. 12396871
  misc_feature (1)..(69): NCBI GI NO: 15227917 NR Description: unknown protein; protein id: At2g42310
  misc_feature (1)..(68): NCBI GI NO: 7485503 NR Description: hypothetical protein F15B8
  misc_feature (1)..(68): NCBI GI NO: 18410807 NR Description: Expressed protein; protein id: At3g57785
  misc_feature (1)..(59): NCBI GI NO: 9858777 NR Description: BAC19.9 [Lycopersicon esculentum]
  misc_feature (1)..(51): NCBI GI NO: 29150398 NR Description: hypothetical protein
MNRTPPAPGQSRKWEDWELPCYITSFLTIVILGVGLNAKPDLSIETWAHQKALERLEMEKLATAGDSSD

SEQ ID NO: 702 - DNA, 1399 bp, Arabidopsis thaliana
  misc_feature (1)..(1399): Ceres Seq. ID no. 13647068
aactattcatcatcttcgtttggatttggtttctttctgtttctgacaaaaaccaccggcaaaataaagcgactacgattccattttcaccggcgcttccgtgagacaacatctctccatcttggaactttttctaatggcattattactcctttctcactgctctatcttatcttttcaacctccattatcgtcttcttcttcatttcattcttcacatatccaatctctgagcaaaccagttttcgcttctccttccccaattcgaaattcaatttcttcgtccgtctcttcatcttcttcctccgttagtagctccaattcgattcctcaggtcgtcgtaacacgagaacgaggcaagaacaatcaaatcatcaaagctttggagaaaaatggcatatcatctttagagcttccgttgattcaacatgcgcgaggacctgatttcgatcggcttgcttctgtattaaatgataagagctttgactggatcatcataacatctccagaagcaggttctgtttttctcgaggcgtggaagacagctagctccccagaagtgcaaataggtgtagtaggagctggaacagccagggtatttgaagaggcaatgaaatcggcagatggattgcttcatgttgcctttacaccatcaaaagcaactggtaaagtcttggcttcggagcttccagagaaagttggcaaaaggtcctctgtcttatacccggcttctctaaaagcaggcaatgatattgtggaagggttgtccaaacgtgggtttgaagttgtcaggctgaatacatacacaacagttccggtgcagagtgttgatacggtgctcctgcaacaggcactatctgctcctgttctttctgtagcttctccttctgcagttcgcgcctggctgcatctgattcaaaatgaggagcaatggagcaattacgttgcctgcattggagagacaactgcatcagctgctagaagactaggattgaaaaacgtctactacccagagaaaccaggacttgaagggtgggtcgagagcataatggaagctctaggtgctcacgcagattcaagtaaccctagcagcaggaattgaattatacttgtgccatcctctcatagattttacttatggaggactttgagtttggtcagtgcctgtaatttagaggacagggaaaaagaaagcaaatgatgcttttgagaaaatactgaagcccttgtaagatatctcagatagcttttgtcgtacagtatatactcattaattattatgtgaatgctaagatcataaatgatcaaaaaacatgaacaaaaagcaatgttatgtagatgcaactaatccaaacttattatgtttgtttaataatttaataatataatgataagtcat

SEQ ID NO: 703 - protein, 321 aa, Arabidopsis thaliana
  peptide (1)..(321): Ceres Seq. ID no. 13647069
  misc_feature (74)..(303): Pfam Name: Pfam Description:  Uroporphyrinogen-III synthase HemD
  misc_feature (1)..(321): NCBI GI NO: 18401160 NR Description: expressed protein [Arabidopsis thaliana]
  misc_feature (1)..(321): NCBI GI NO: 18694346 NR Description: uroporphyrinogen III synthase
  misc_feature (1)..(321): NCBI GI NO: 21592861 NR Description: uroporphyrinogen III synthase
  misc_feature (130)..(321): NCBI GI NO: 22045244 NR Description: unknown protein [Arabidopsis thaliana]
  misc_feature (226)..(321): NCBI GI NO: 7487883 NR Description: hypothetical protein At2g26540
  misc_feature (159)..(231): NCBI GI NO: 7487883 NR Description: hypothetical protein At2g26540
  misc_feature (58)..(308): NCBI GI NO: 15805812 NR Description: uroporphyrinogen-III synthase, putative
  misc_feature (63)..(306): NCBI GI NO: 15606833 NR Description: putative protein [Aquifex aeolicus]
MALLLLSHCSILSFQPPLSSSSSFHSSHIQSLSKPVFASPSPIRNSISSSVSSSSSSVSSSNSIPQVVVTRERGKNNQIIKALEKNGISSLELPLIQHARGPDFDRLASVLNDKSFDWIIITSPEAGSVFLEAWKTASSPEVQIGVVGAGTARVFEEAMKSADGLLHVAFTPSKATGKVLASELPEKVGKRSSVLYPASLKAGNDIVEGLSKRGFEVVRLNTYTTVPVQSVDTVLLQQALSAPVLSVASPSAVRAWLHLIQNEEQWSNYVACIGETTASAARRLGLKNVYYPEKPGLEGWVESIMEALGAHADSSNPSSRN

SEQ ID NO: 704 - protein, 163 aa, Arabidopsis thaliana
  peptide (1)..(163): Ceres Seq. ID no. 13647070
  misc_feature (1)..(145): Pfam Name: Pfam Description:  Uroporphyrinogen-III synthase HemD
  misc_feature (1)..(163): NCBI GI NO: 18401160 NR Description: expressed protein [Arabidopsis thaliana]
  misc_feature (1)..(163): NCBI GI NO: 18694346 NR Description: uroporphyrinogen III synthase
  misc_feature (1)..(163): NCBI GI NO: 21592861 NR Description: uroporphyrinogen III synthase
  misc_feature (1)..(163): NCBI GI NO: 22045244 NR Description: unknown protein [Arabidopsis thaliana]
  misc_feature (68)..(163): NCBI GI NO: 7487883 NR Description: hypothetical protein At2g26540
  misc_feature (1)..(73): NCBI GI NO: 7487883 NR Description: hypothetical protein At2g26540
  misc_feature (1)..(150): NCBI GI NO: 15805812 NR Description: uroporphyrinogen-III synthase, putative
  misc_feature (1)..(148): NCBI GI NO: 15606833 NR Description: putative protein [Aquifex aeolicus]
MKSADGLLHVAFTPSKATGKVLASELPEKVGKRSSVLYPASLKAGNDIVEGLSKRGFEVVRLNTYTTVPVQSVDTVLLQQALSAPVLSVASPSAVRAWLHLIQNEEQWSNYVACIGETTASAARRLGLKNVYYPEKPGLEGWVESIMEALGAHADSSNPSSRN

SEQ ID NO: 705 - DNA, 928 bp, Arabidopsis thaliana
  misc_feature (1)..(928): Ceres Seq. ID no. 13646019
tggttttctgttctgtcctaatttctctctggcgaaagctaagaggtttcggttacggtctccatctccgatcaaatcacgaagtttctatcggaaattttcagtgatacataccgtcagagattttctttacgagagaattgtcgccgacatactaaagcagagttttgggtgggaattagtaagatttcgactttagaattgggagatctttccattatgggttctgagcaaaacgacagcacaagcttctctccttcagagccaaagctctgcgtcaaaggatgtggcttcttcggatctccatcgaacatgaacctctgctctaaatgctacagagacatccgagccacggaggaacaaaccgcttccgctaaagccgccgtcgagaaatctctaaaccctaataaacccaaaactcaaccacaacagagccaagaaatcactcaaggcgtcctcggatctggatcgtcttcctcatcaacgagagggggtgattcggctgctgctccgttggatccaccgaaatcgacggctacgagatgcttgagctgtaacaagaaagttggcgtgacgggtttcaagtgtaggtgtggaagcactttctgtggaactcatagatatccagagagtcacgagtgccaattcgatttcaaaggagttgcgagagaagctattgctaaagctaatcctgtggtgaaggctgataaggttgataggatatgaattggtgaagaaactgttgtgttctcttttgtttttttattttcaagtctcgtgatgttggtggtttggctctctgttttctgctcttattatggttttatttgcttttagggtttcttaggaaaggccttagattctgctattatgtggtttcatgttttgcaacattggatttgttgttctgtaataaagtgttggttat

SEQ ID NO: 706 - protein, 168 aa, Arabidopsis thaliana
  peptide (1)..(168): Ceres Seq. ID no. 13646020
  misc_feature (109)..(149): Pfam Name: Pfam Description:  AN1-like Zinc finger
  misc_feature (1)..(168): NCBI GI NO: 8778645 NR Description: F5O11.17 [Arabidopsis thaliana]
  misc_feature (1)..(168): NCBI GI NO: 15221329 NR Description: expressed protein [Arabidopsis thaliana]
  misc_feature (1)..(168): NCBI GI NO: 15234402 NR Description: expressed protein [Arabidopsis thaliana]
  misc_feature (1)..(167): NCBI GI NO: 15235819 NR Description: zinc finger -related protein
  misc_feature (15)..(168): NCBI GI NO: 15225894 NR Description: zinc finger protein -related
  misc_feature (4)..(168): NCBI GI NO: 28269431 NR Description: putative zinc finger protein
  misc_feature (6)..(168): NCBI GI NO: 18403408 NR Description: expressed protein [Arabidopsis thaliana]
  misc_feature (5)..(168): NCBI GI NO: 30908921 NR Description: putative zinc finger transcription factor ZFP33
  misc_feature (6)..(168): NCBI GI NO: 25082726 NR Description: expressed protein [Arabidopsis thaliana]
  misc_feature (12)..(168): NCBI GI NO: 18404102 NR Description: expressed protein [Arabidopsis thaliana]
MGSEQNDSTSFSPSEPKLCVKGCGFFGSPSNMNLCSKCYRDIRATEEQTASAKAAVEKSLNPNKPKTQPQQSQEITQGVLGSGSSSSSTRGGDSAAAPLDPPKSTATRCLSCNKKVGVTGFKCRCGSTFCGTHRYPESHECQFDFKGVAREAIAKANPVVKADKVDRI

SEQ ID NO: 707 - protein, 137 aa, Arabidopsis thaliana
  peptide (1)..(137): Ceres Seq. ID no. 13646021
  misc_feature (78)..(118): Pfam Name: Pfam Description:  AN1-like Zinc finger
  misc_feature (1)..(137): NCBI GI NO: 8778645 NR Description: F5O11.17 [Arabidopsis thaliana]
  misc_feature (1)..(137): NCBI GI NO: 15221329 NR Description: expressed protein [Arabidopsis thaliana]
  misc_feature (1)..(137): NCBI GI NO: 15234402 NR Description: expressed protein [Arabidopsis thaliana]
  misc_feature (1)..(136): NCBI GI NO: 15235819 NR Description: zinc finger -related protein
  misc_feature (1)..(137): NCBI GI NO: 15225894 NR Description: zinc finger protein -related
  misc_feature (1)..(137): NCBI GI NO: 28269431 NR Description: putative zinc finger protein
  misc_feature (1)..(137): NCBI GI NO: 18403408 NR Description: expressed protein [Arabidopsis thaliana]
  misc_feature (1)..(137): NCBI GI NO: 30908921 NR Description: putative zinc finger transcription factor ZFP33
  misc_feature (1)..(137): NCBI GI NO: 25082726 NR Description: expressed protein [Arabidopsis thaliana]
  misc_feature (1)..(137): NCBI GI NO: 18404102 NR Description: expressed protein [Arabidopsis thaliana]
MNLCSKCYRDIRATEEQTASAKAAVEKSLNPNKPKTQPQQSQEITQGVLGSGSSSSSTRGGDSAAAPLDPPKSTATRCLSCNKKVGVTGFKCRCGSTFCGTHRYPESHECQFDFKGVAREAIAKANPVVKADKVDRI

SEQ ID NO: 708 - DNA, 974 bp, Arabidopsis thaliana
  misc_feature (1)..(974): Ceres Seq. ID no. 12333496
aaacacatctctctctctctctctctctttctctctttttatatttttgtgtcccaatctcttcttcatttctgtttggttgccgagaaaacgcaggaaacttttctgcaaaaaaactcggtgaccatatttaaaactttcccacgttaattctctcttctttgttttgtttcagattcattacttttctccaaaaaactttcttcaagatctgctcttttaaataattatggcggaagaacatcgatgcgagacgcctgaaggtcaccgtctctgcgttaacaactgcggtttcttcggaagctcagcgacaatgaatctatgttcaaactgttacggcgatctctgtctcaaacaacaacaacaagcttccatgaaatcaaccgtcgaatcatctctctctccggtgatcgcacctgttctcgaaaactacgcggcggagttagagatcccgacgacgaagaagacagaggagaaaaaaccgattcaaattccgacggagcaaccgtctccgccgcaacggccgaatcgatgcaccgtatgtaggaaacgggtcgggttaaccgggtttatgtgtcggtgcgggacgactttttgtgggagtcataggtatccggaggttcatggttgtacgtttgatttcaaatcggcgggacgtgaagagatcgcgaaagctaatccgttggttattgcggcgaagcttcagaaaatatgaatcggagccgttgaccgatttctatctttaccctgagaaaatttcgattgtctcggtggatctcagccgttcattatgttattgtattacggacacgtgtcgcaagattaaggttgagatggtttcgtaactttttaattattttctttgtttatttccgaagaaattaaagtttttatgattgtgtggcttttgcttgtaaaaaaaaaaagggtttctctttgggaaaaagaaaagaaaatatatgaaattgtgtccc

SEQ ID NO: 709 - protein, 161 aa, Arabidopsis thaliana
  peptide (1)..(161): Ceres Seq. ID no. 12333497
  misc_feature (102)..(142): Pfam Name: Pfam Description:  AN1-like Zinc finger
  misc_feature (1)..(161): NCBI GI NO: 18404102 NR Description: expressed protein; protein id: At2g36320
  misc_feature (1)..(161): NCBI GI NO: 15231686 NR Description: zinc finger - like protein; protein id: At3g52800
  misc_feature (1)..(161): NCBI GI NO: 14596167 NR Description: zinc finger-like protein [Arabidopsis thaliana]
  misc_feature (1)..(161): NCBI GI NO: 15225894 NR Description: putative zinc finger protein
  misc_feature (4)..(161): NCBI GI NO: 35187687 NR Description: zinc-finger protein
  misc_feature (7)..(161): NCBI GI NO: 18403408 NR Description: expressed protein; protein id: At1g51200
  misc_feature (7)..(161): NCBI GI NO: 25082726 NR Description: expressed protein [Arabidopsis thaliana]
  misc_feature (10)..(161): NCBI GI NO: 15234402 NR Description: putative protein; protein id: At4g12040
  misc_feature (4)..(161): NCBI GI NO: 30908921 NR Description: putative zinc finger transcription factor ZFP33
  misc_feature (14)..(160): NCBI GI NO: 15235819 NR Description: similar to zinc finger - like protein
MAEEHRCETPEGHRLCVNNCGFFGSSATMNLCSNCYGDLCLKQQQQASMKSTVESSLSPVIAPVLENYAAELEIPTTKKTEEKKPIQIPTEQPSPPQRPNRCTVCRKRVGLTGFMCRCGTTFCGSHRYPEVHGCTFDFKSAGREEIAKANPLVIAAKLQKI

SEQ ID NO: 710 - protein, 133 aa, Arabidopsis thaliana
  peptide (1)..(133): Ceres Seq. ID no. 12333498
  misc_feature (74)..(114): Pfam Name: Pfam Description:  AN1-like Zinc finger
  misc_feature (1)..(133): NCBI GI NO: 18404102 NR Description: expressed protein; protein id: At2g36320
  misc_feature (1)..(133): NCBI GI NO: 15231686 NR Description: zinc finger - like protein; protein id: At3g52800
  misc_feature (1)..(133): NCBI GI NO: 14596167 NR Description: zinc finger-like protein [Arabidopsis thaliana]
  misc_feature (1)..(133): NCBI GI NO: 15225894 NR Description: putative zinc finger protein
  misc_feature (1)..(133): NCBI GI NO: 35187687 NR Description: zinc-finger protein
  misc_feature (1)..(133): NCBI GI NO: 18403408 NR Description: expressed protein; protein id: At1g51200
  misc_feature (1)..(133): NCBI GI NO: 25082726 NR Description: expressed protein [Arabidopsis thaliana]
  misc_feature (1)..(133): NCBI GI NO: 15234402 NR Description: putative protein; protein id: At4g12040
  misc_feature (1)..(133): NCBI GI NO: 30908921 NR Description: putative zinc finger transcription factor ZFP33
  misc_feature (1)..(132): NCBI GI NO: 15235819 NR Description: similar to zinc finger - like protein
MNLCSNCYGDLCLKQQQQASMKSTVESSLSPVIAPVLENYAAELEIPTTKKTEEKKPIQIPTEQPSPPQRPNRCTVCRKRVGLTGFMCRCGTTFCGSHRYPEVHGCTFDFKSAGREEIAKANPLVIAAKLQKI

SEQ ID NO: 711 - protein, 113 aa, Arabidopsis thaliana
  peptide (1)..(113): Ceres Seq. ID no. 12333499
  misc_feature (54)..(94): Pfam Name: Pfam Description:  AN1-like Zinc finger
  misc_feature (1)..(113): NCBI GI NO: 18404102 NR Description: expressed protein; protein id: At2g36320
  misc_feature (1)..(113): NCBI GI NO: 15231686 NR Description: zinc finger - like protein; protein id: At3g52800
  misc_feature (1)..(113): NCBI GI NO: 14596167 NR Description: zinc finger-like protein [Arabidopsis thaliana]
  misc_feature (1)..(113): NCBI GI NO: 15225894 NR Description: putative zinc finger protein
  misc_feature (1)..(113): NCBI GI NO: 35187687 NR Description: zinc-finger protein
  misc_feature (1)..(113): NCBI GI NO: 18403408 NR Description: expressed protein; protein id: At1g51200
  misc_feature (1)..(113): NCBI GI NO: 25082726 NR Description: expressed protein [Arabidopsis thaliana]
  misc_feature (1)..(113): NCBI GI NO: 15234402 NR Description: putative protein; protein id: At4g12040
  misc_feature (1)..(113): NCBI GI NO: 30908921 NR Description: putative zinc finger transcription factor ZFP33
  misc_feature (1)..(112): NCBI GI NO: 15235819 NR Description: similar to zinc finger - like protein
MKSTVESSLSPVIAPVLENYAAELEIPTTKKTEEKKPIQIPTEQPSPPQRPNRCTVCRKRVGLTGFMCRCGTTFCGSHRYPEVHGCTFDFKSAGREEIAKANPLVIAAKLQKI

SEQ ID NO: 712 - DNA, 881 bp, Arabidopsis thaliana
  misc_feature (1)..(881): Ceres Seq. ID no. 12332332
aagtcgctttgatctaaaaagctcttaaactattcttccagcgaccggaagaaacgaataatcggaatcgaaaaattcgaaaaaggaactgagaagaaacagatctgaagatggagtgtgtatttggtctagttgggaatggattcgctatcgtggcggcggatacatcagcagttcacagtattcttcttcacaagaacaaagaggacaagatcatgactcttgactctcacaagctcgtcgccgctagtggtgagcctggtgaccgggttcagtttacggagtatgttcagaagaatgtgtcactgtatcagtttcgtaatgggattcctttgagtactgctgctgctgctaacttcactcgtggagaacttgccactgctttgagaaagaatccatattcggtgaacatcctgatggctggctatgacaaagaagccggcgcatctctatactacattgactacattgcaaccctccacaaggttgataagggagcatttggatacggctcatacttctctctctctacaatggacagacactaccgcagcgacatgtctgttgaagaagccattgaattggtggacaaatgcatactcgagatcaggtcaaggctggtcattgcaccaccaaactttgttatcaagattgttgacaaggacggagcccgtgagtacggatggcgtatcagcactgctgatgcctaagttgttttcattgtgtttattagtccatttatgttactcggctcacatttatattctctgttgaacttcaagctccctggatattaaagttcctagataatgatgatgatatgcatgtgttgaactttttctttccttattgcgtatatgaagcaaaagatagtgcaatgt

SEQ ID NO: 713 - protein, 199 aa, Arabidopsis thaliana
  peptide (1)..(199): Ceres Seq. ID no. 12332333
  misc_feature (1)..(182): Pfam Name: Pfam Description:  Proteasome A-type and B-type
  misc_feature (1)..(199): NCBI GI NO: 15233580 NR Description: 20S proteasome beta subunit D2
  misc_feature (1)..(198): NCBI GI NO: 15228805 NR Description: 20S proteasome beta subunit D
  misc_feature (1)..(196): NCBI GI NO: 27552546 NR Description: 20S proteasome beta 4 subunit
  misc_feature (1)..(196): NCBI GI NO: 17380213 NR Description: Proteasome subunit beta type 2
  misc_feature (1)..(134): NCBI GI NO: 14594929 NR Description: putative beta4 proteasome subunit
  misc_feature (1)..(189): NCBI GI NO: 29841035 NR Description: similar to NM_017284 proteasome
  misc_feature (1)..(186): NCBI GI NO: 8394079 NR Description: proteasome
  misc_feature (1)..(189): NCBI GI NO: 4506195 NR Description: proteasome beta 2 subunit
  misc_feature (1)..(189): NCBI GI NO: 30585195 NR Description: Homo sapiens proteasome
  misc_feature (14)..(199): NCBI GI NO: 19113087 NR Description: proteasome component precursor
MECVFGLVGNGFAIVAADTSAVHSILLHKNKEDKIMTLDSHKLVAASGEPGDRVQFTEYVQKNVSLYQFRNGIPLSTAAAANFTRGELATALRKNPYSVNILMAGYDKEAGASLYYIDYIATLHKVDKGAFGYGSYFSLSTMDRHYRSDMSVEEAIELVDKCILEIRSRLVIAPPNFVIKIVDKDGAREYGWRISTADA

SEQ ID NO: 714 - protein, 164 aa, Arabidopsis thaliana
  peptide (1)..(164): Ceres Seq. ID no. 12332334
  misc_feature (1)..(147): Pfam Name: Pfam Description:  Proteasome A-type and B-type
  misc_feature (1)..(164): NCBI GI NO: 15233580 NR Description: 20S proteasome beta subunit D2
  misc_feature (1)..(163): NCBI GI NO: 15228805 NR Description: 20S proteasome beta subunit D
  misc_feature (1)..(161): NCBI GI NO: 27552546 NR Description: 20S proteasome beta 4 subunit
  misc_feature (1)..(161): NCBI GI NO: 17380213 NR Description: Proteasome subunit beta type 2
  misc_feature (1)..(99): NCBI GI NO: 14594929 NR Description: putative beta4 proteasome subunit
  misc_feature (1)..(154): NCBI GI NO: 29841035 NR Description: similar to NM_017284 proteasome
  misc_feature (1)..(151): NCBI GI NO: 8394079 NR Description: proteasome
  misc_feature (1)..(154): NCBI GI NO: 4506195 NR Description: proteasome beta 2 subunit
  misc_feature (1)..(154): NCBI GI NO: 30585195 NR Description: Homo sapiens proteasome
  misc_feature (1)..(164): NCBI GI NO: 19113087 NR Description: proteasome component precursor
MTLDSHKLVAASGEPGDRVQFTEYVQKNVSLYQFRNGIPLSTAAAANFTRGELATALRKNPYSVNILMAGYDKEAGASLYYIDYIATLHKVDKGAFGYGSYFSLSTMDRHYRSDMSVEEAIELVDKCILEIRSRLVIAPPNFVIKIVDKDGAREYGWRISTADA

SEQ ID NO: 715 - protein, 115 aa, Arabidopsis thaliana
  peptide (1)..(115): Ceres Seq. ID no. 12332335
MTKKPAHLYTTLTTLQPSTRLIREHLDTAHTSLSLQWTDTTAATCLLKKPLNWWTNAYSRSGQGWSLHHQTLLSRLLTRTEPVSTDGVSALLMPKLFSLCLLVHLCYSAHIYILC

SEQ ID NO: 716 - DNA, 1020 bp, Arabidopsis thaliana
  misc_feature (1)..(1020): Ceres Seq. ID no. 12332327
ataaatagtgaaaacacaaaaccctaagagtcgctcttgctctcagccgtctgtcttacctccagaagtcgacgacaacaatggcaccgaagaagggagttaaagtggcttcaaagaagaagccggagaaagttaccaacccattgtttgagagacgcccaaagcaattcggtattggtggcgctttgcctcctaagaaggatctttctcgttacatcaaatggcctaagtcaatccgtcttcaaaggcagaagcgtatccttaagcagaggttgaaggttcctccagctcttaaccagttcaccaagacccttgataagaatctcgccaccagcctcttcaagattcttctgaagtataggccagaggacaaagccgcaaagaaggaacgccttttgaacaaggctcaagctgaggcagaaggaaagcctgctgaatccaagaagcccattgttgttaagtatggtctcaaccatgtgacttacctcatcgagcagaacaaggcacagcttgtggtcattgcacacgatgttgaccctatcgagttggtggtctggttacctgcactctgcaggaaaatggaagtcccttactgcattgttaagggaaaatctcgtcttggagcggtcgttcaccagaagactgctgctgccttgtgcttgaccactgtcaagaacgaggacaagcttgagttcagcaaaatcctcgaggccatcaaggctaacttcaacgacaagtacgaggagtacaggaagaagtggggaggtggcataatgggatccaagtctcaagccaagaccaaagctaaggagagggttattgctaaggaggctgcccagagaatgaactaggcatcataccttatgttctctgctatgaaacatatgataatggttttgttgtttagcgatattttgaaaccttgttttattttaatttctatgctctttcggatgttaccaccctcttcagaattttatgcagttttgttatcaatttcacatataaacttttatttgc

SEQ ID NO: 717 - protein, 256 aa, Arabidopsis thaliana [sequence omitted]

SEQ ID NO: 718 - DNA, 642 bp, Arabidopsis thaliana
  misc_feature (1)..(642): Ceres Seq. ID no. 12393562
atcattcacaatggcatatgcaactattctcatgatcttctcggtggtggcactaatgtccggcgagagagctcatgcagcagtggactgctcatcgttgatactaaacatggctgattgtttgtcttttgtgactagtggtagtacagttgtcaagccggaaggaacatgttgttcagggcttaagactgtggttaggacaggaccagaatgtctatgtgaggctttcaagaacagtggttctcttggtttaactcttgatctttctaaagctgcttctcttccttctgtttgtaaagttgctgctcctccttctgctcgttgtggcctttctgtctctggagatcctcctgctactgcccctggtttatctcctacggccggagcaggagcacccgcgttgtccagtggtgcaaatgcggcaactccagtttcgtccccgaggagttccgatgcgtccttgctctctgtatcttttgcatttgtcatcttcatggcactcatttcttctttctattgagtcttaaaatttaattgcttcttgttgagttatttttgtttgctatgtagctgaagagtttggtgttactgatcatatttacctttcatgtgtcaattttaatgagaaatctccttttagtt

SEQ ID NO: 719 - protein, 172 aa, Arabidopsis thaliana
  peptide (1)..(172): Ceres Seq. ID no. 12393563
  misc_feature (30)..(108): Pfam Name: Pfam Description:  Protease inhibitor/seed storage/LTP family
  misc_feature (4)..(172): NCBI GI NO: 15225509 NR Description: putative nonspecific lipid-transfer protein precursor
  misc_feature (4)..(172): NCBI GI NO: 27765012 NR Description: At2g13820 [Arabidopsis thaliana]
  misc_feature (3)..(172): NCBI GI NO: 18424785 NR Description: putative protein; protein id: At5g64080
  misc_feature (3)..(172): NCBI GI NO: 21618136 NR Description: nonspecific lipid-transfer protein-like protein
  misc_feature (3)..(166): NCBI GI NO: 10176956 NR Description: contains similarity to nonspecific lipid-transferprotein~gene_id:MHJ24
  misc_feature (4)..(167): NCBI GI NO: 30682659 NR Description: lipid transfer protein family
  misc_feature (29)..(172): NCBI GI NO: 7487610 NR Description: hypothetical protein T3F12
  misc_feature (29)..(172): NCBI GI NO: 30680828 NR Description: protease inhibitor/seed storage/lipid transfer
  misc_feature (27)..(153): NCBI GI NO: 15220327 NR Description: non-specific lipid transfer protein, putative
  misc_feature (11)..(169): NCBI GI NO: 18403453 NR Description: expressed protein; protein id: At3g22600
SFTMAYATILMIFSVVALMSGERAHAAVDCSSLILNMADCLSFVTSGSTVVKPEGTCCSGLKTVVRTGPECLCEAFKNSGSLGLTLDLSKAASLPSVCKVAAPPSARCGLSVSGDPPATAPGLSPTAGAGAPALSSGANAATPVSSPRSSDASLLSVSFAFVIFMALISSFY

SEQ ID NO: 720 - protein, 169 aa, Arabidopsis thaliana
  peptide (1)..(169): Ceres Seq. ID no. 12393564
  misc_feature (27)..(105): Pfam Name: Pfam Description:  Protease inhibitor/seed storage/LTP family
  misc_feature (1)..(169): NCBI GI NO: 15225509 NR Description: putative nonspecific lipid-transfer protein precursor
  misc_feature (1)..(169): NCBI GI NO: 27765012 NR Description: At2g13820 [Arabidopsis thaliana]
  misc_feature (1)..(169): NCBI GI NO: 18424785 NR Description: putative protein; protein id: At5g64080
  misc_feature (1)..(169): NCBI GI NO: 21618136 NR Description: nonspecific lipid-transfer protein-like protein
  misc_feature (1)..(163): NCBI GI NO: 10176956 NR Description: contains similarity to nonspecific lipid-transferprotein~gene_id:MHJ24
  misc_feature (1)..(164): NCBI GI NO: 30682659 NR Description: lipid transfer protein family
  misc_feature (26)..(169): NCBI GI NO: 7487610 NR Description: hypothetical protein T3F12
  misc_feature (26)..(169): NCBI GI NO: 30680828 NR Description: protease inhibitor/seed storage/lipid transfer
  misc_feature (24)..(150): NCBI GI NO: 15220327 NR Description: non-specific lipid transfer protein, putative
  misc_feature (8)..(166): NCBI GI NO: 18403453 NR Description: expressed protein; protein id: At3g22600
MAYATILMIFSVVALMSGERAHAAVDCSSLILNMADCLSFVTSGSTVVKPEGTCCSGLKTVVRTGPECLCEAFKNSGSLGLTLDLSKAASLPSVCKVAAPPSARCGLSVSGDPPATAPGLSPTAGAGAPALSSGANAATPVSSPRSSDASLLSVSFAFVIFMALISSFY

SEQ ID NO: 721 - protein, 162 aa, Arabidopsis thaliana
  peptide (1)..(162): Ceres Seq. ID no. 12393565
  misc_feature (20)..(98): Pfam Name: Pfam Description:  Protease inhibitor/seed storage/LTP family
  misc_feature (1)..(162): NCBI GI NO: 15225509 NR Description: putative nonspecific lipid-transfer protein precursor
  misc_feature (1)..(162): NCBI GI NO: 27765012 NR Description: At2g13820 [Arabidopsis thaliana]
  misc_feature (1)..(162): NCBI GI NO: 18424785 NR Description: putative protein; protein id: At5g64080
  misc_feature (1)..(162): NCBI GI NO: 21618136 NR Description: nonspecific lipid-transfer protein-like protein
  misc_feature (1)..(156): NCBI GI NO: 10176956 NR Description: contains similarity to nonspecific lipid-transferprotein~gene_id:MHJ24
  misc_feature (1)..(157): NCBI GI NO: 30682659 NR Description: lipid transfer protein family
  misc_feature (19)..(162): NCBI GI NO: 7487610 NR Description: hypothetical protein T3F12
  misc_feature (19)..(162): NCBI GI NO: 30680828 NR Description: protease inhibitor/seed storage/lipid transfer
  misc_feature (17)..(143): NCBI GI NO: 15220327 NR Description: non-specific lipid transfer protein, putative
  misc_feature (1)..(159): NCBI GI NO: 18403453 NR Description: expressed protein; protein id: At3g22600
MIFSVVALMSGERAHAAVDCSSLILNMADCLSFVTSGSTVVKPEGTCCSGLKTVVRTGPECLCEAFKNSGSLGLTLDLSKAASLPSVCKVAAPPSARCGLSVSGDPPATAPGLSPTAGAGAPALSSGANAATPVSSPRSSDASLLSVSFAFVIFMALISSFY

SEQ ID NO: 722 - DNA, 887 bp, Arabidopsis thaliana
  misc_feature (1)..(887): Ceres Seq. ID no. 12332865
ataaagaagaagaagctaacgaaaaataatggcggagagatcaaattcagaggaagtgaagcttttgggaatgtgggcgagtccttttagtcggaggattgagattgctcttacgcttaaaggtgtttcgtatgagttcctggagcaagatatcacaaacaagagctctttgttgcttcaattgaatccggttcataagatgattccggttcttgttcataatggtaaaccgatttctgaatcacttgtgattcttgagtatattgatgagacttggagagacaatccgattcttcctcaagatccgtatgagagaactatggctcgattctggtctaaattcgtcgatgaacagatttatgtgacggcgatgaaagttgtggggaagaccggaaaagagagagatgctgtggttgaagcgacgagagatttgttgatgtttttggagaaagagcttgttgggaaagattttctcggtgggaaaagtttagggtttgtggatattgtggcgactttggtggcgttttggctgatgagaacggaggagatcgtcggggtaaaggtggttccggtggagaagttcccggagatacatagatgggttaagaatttgttgggtaatgatgttatcaagaaatgtattcctcctgaagatgagcatcttaagtacattagagctcgtatggagaaactcaatatcaaatctgcttgataaggttttataaaaattctaatgctcacagtatgtctcttttgttcttgtctcagttgctatgttctgtcacttaatgtttgctatattgaaacacgaaaatttgaactttctttcttgttctacctaaagatgttcttaagcaaataatacagaagaaactctcttttgtgct

SEQ ID NO: 723 - protein, 227 aa, Arabidopsis thaliana
  peptide (1)..(227): Ceres Seq. ID no. 12332866
  misc_feature (89)..(199): Pfam Name: Pfam Description:  Glutathione S-transferase, C-terminal domain
  misc_feature (1)..(227): NCBI GI NO: 15227082 NR Description: glutathione transferase, putative
  misc_feature (1)..(227): NCBI GI NO: 14423534 NR Description: putative glutathione S-transferase
  misc_feature (1)..(227): NCBI GI NO: 15227086 NR Description: glutathione transferase, putative
  misc_feature (1)..(227): NCBI GI NO: 15227551 NR Description: glutathione transferase, putative
  misc_feature (1)..(221): NCBI GI NO: 15227550 NR Description: glutathione transferase, putative
  misc_feature (1)..(222): NCBI GI NO: 15227085 NR Description: glutathione transferase
  misc_feature (7)..(227): NCBI GI NO: 15227084 NR Description: glutathione transferase, putative
  misc_feature (1)..(215): NCBI GI NO: 15227087 NR Description: glutathione transferase, putative
  misc_feature (5)..(223): NCBI GI NO: 11385429 NR Description: glutathione S-transferase GST 7 [Glycine max]
  misc_feature (5)..(222): NCBI GI NO: 11385431 NR Description: glutathione S-transferase GST 8 [Glycine max]
MAERSNSEEVKLLGMWASPFSRRIEIALTLKGVSYEFLEQDITNKSSLLLQLNPVHKMIPVLVHNGKPISESLVILEYIDETWRDNPILPQDPYERTMARFWSKFVDEQIYVTAMKVVGKTGKERDAVVEATRDLLMFLEKELVGKDFLGGKSLGFVDIVATLVAFWLMRTEEIVGVKVVPVEKFPEIHRWVKNLLGNDVIKKCIPPEDEHLKYIRARMEKLNIKSA

SEQ ID NO: 724 - protein, 213 aa, Arabidopsis thaliana
  peptide (1)..(213): Ceres Seq. ID no. 12332867
  misc_feature (75)..(185): Pfam Name: Pfam Description:  Glutathione S-transferase, C-terminal domain
  misc_feature (1)..(213): NCBI GI NO: 15227082 NR Description: glutathione transferase, putative
  misc_feature (1)..(213): NCBI GI NO: 14423534 NR Description: putative glutathione S-transferase
  misc_feature (1)..(213): NCBI GI NO: 15227086 NR Description: glutathione transferase, putative
  misc_feature (1)..(213): NCBI GI NO: 15227551 NR Description: glutathione transferase, putative
  misc_feature (1)..(207): NCBI GI NO: 15227550 NR Description: glutathione transferase, putative
  misc_feature (1)..(208): NCBI GI NO: 15227085 NR Description: glutathione transferase
  misc_feature (1)..(213): NCBI GI NO: 15227084 NR Description: glutathione transferase, putative
  misc_feature (1)..(201): NCBI GI NO: 15227087 NR Description: glutathione transferase, putative
  misc_feature (1)..(209): NCBI GI NO: 11385429 NR Description: glutathione S-transferase GST 7 [Glycine max]
  misc_feature (1)..(208): NCBI GI NO: 11385431 NR Description: glutathione S-transferase GST 8 [Glycine max]
MWASPFSRRIEIALTLKGVSYEFLEQDITNKSSLLLQLNPVHKMIPVLVHNGKPISESLVILEYIDETWRDNPILPQDPYERTMARFWSKFVDEQIYVTAMKVVGKTGKERDAVVEATRDLLMFLEKELVGKDFLGGKSLGFVDIVATLVAFWLMRTEEIVGVKVVPVEKFPEIHRWVKNLLGNDVIKKCIPPEDEHLKYIRARMEKLNIKSA

SEQ ID NO: 725 - protein, 170 aa, Arabidopsis thaliana
  peptide (1)..(170): Ceres Seq. ID no. 12332868
  misc_feature (32)..(142): Pfam Name: Pfam Description:  Glutathione S-transferase, C-terminal domain
  misc_feature (1)..(170): NCBI GI NO: 15227082 NR Description: glutathione transferase, putative
  misc_feature (1)..(170): NCBI GI NO: 14423534 NR Description: putative glutathione S-transferase
  misc_feature (1)..(170): NCBI GI NO: 15227086 NR Description: glutathione transferase, putative
  misc_feature (1)..(170): NCBI GI NO: 15227551 NR Description: glutathione transferase, putative
  misc_feature (1)..(164): NCBI GI NO: 15227550 NR Description: glutathione transferase, putative
  misc_feature (1)..(165): NCBI GI NO: 15227085 NR Description: glutathione transferase
  misc_feature (1)..(170): NCBI GI NO: 15227084 NR Description: glutathione transferase, putative
  misc_feature (1)..(158): NCBI GI NO: 15227087 NR Description: glutathione transferase, putative
  misc_feature (1)..(166): NCBI GI NO: 11385429 NR Description: glutathione S-transferase GST 7 [Glycine max]
  misc_feature (1)..(165): NCBI GI NO: 11385431 NR Description: glutathione S-transferase GST 8 [Glycine max]
MIPVLVHNGKPISESLVILEYIDETWRDNPILPQDPYERTMARFWSKFVDEQIYVTAMKVVGKTGKERDAVVEATRDLLMFLEKELVGKDFLGGKSLGFVDIVATLVAFWLMRTEEIVGVKVVPVEKFPEIHRWVKNLLGNDVIKKCIPPEDEHLKYIRARMEKLNIKSA

SEQ ID NO: 726 - DNA, 560 bp, Arabidopsis thaliana
  misc_feature (1)..(560): Ceres Seq. ID no. 12339222
atttgatccgtttatacttgttattggcatttcatcatcgtctgggataaaaaaatgtcgacagttggagagcttgcttgcagctacgctgttatgatcctcgaggacgagggtatcgctatcacggctgacaaaatcgcgaccttggtgaaagctgctggtgttagtattgagtcatactggccaatgctattcgccaagatggctgagaaacgtaacgtgactgatctcatcatgaacgttggtgctggtggtggaggtagtgctccggttgcagctgctgctccagctgctggcggtggtgcggcagctgctcctgctgctgaggagaagaagaaggatgagccagcagaagagagtgacggagatttgggtttcggtttgtttgactaaacgcagtcacttgtctttcttctttgtagttggatattggagactatattttgtcgtatgagttattattacttgtttgatctggctaaaggactattagttggtttatgatgcgtatgttgtataactcaagtttcctagcaaaccaatcggctcgggcttttgtt

SEQ ID NO: 727 - protein, 112 aa, Arabidopsis thaliana
  peptide (1)..(112): Ceres Seq. ID no. 12339223
  misc_feature (22)..(111): Pfam Name: Pfam Description:  60s Acidic ribosomal protein
  misc_feature (1)..(112): NCBI GI NO: 21592477 NR Description: acidic ribosomal protein, putative
  misc_feature (1)..(112): NCBI GI NO: 15223303 NR Description: acidic ribosomal protein, putative
  misc_feature (1)..(112): NCBI GI NO: 15238170 NR Description: 60S acidic ribosomal protein P1-like protein
  misc_feature (1)..(112): NCBI GI NO: 21553441 NR Description: 60S acidic ribosomal protein P1-like protein
  misc_feature (1)..(112): NCBI GI NO: 18411448 NR Description: acidic ribosomal protein p1; protein id: At4g00810
  misc_feature (1)..(112): NCBI GI NO: 6094103 NR Description: 60S acidic ribosomal protein P1
  misc_feature (5)..(112): NCBI GI NO: 7440759 NR Description: acidic ribosomal protein P1a - maize
  misc_feature (5)..(112): NCBI GI NO: 1710590 NR Description: 60S ACIDIC RIBOSOMAL PROTEIN P1 (L12)
  misc_feature (1)..(112): NCBI GI NO: 18253043 NR Description: 60S acidic ribosomal protein P1
  misc_feature (1)..(112): NCBI GI NO: 25150244 NR Description: 60S Ribosomal Protein, Acidic 1
MSTVGELACSYAVMILEDEGIAITADKIATLVKAAGVSIESYWPMLFAKMAEKRNVTDLIMNVGAGGGGSAPVAAAAPAAGGGAAAAPAAEEKKKDEPAEESDGDLGFGLFD

SEQ ID NO: 728 - protein, 99 aa, Arabidopsis thaliana
  peptide (1)..(99): Ceres Seq. ID no. 12339224
  misc_feature (9)..(98): Pfam Name: Pfam Description:  60s Acidic ribosomal protein
  misc_feature (1)..(99): NCBI GI NO: 21592477 NR Description: acidic ribosomal protein, putative
  misc_feature (1)..(99): NCBI GI NO: 15223303 NR Description: acidic ribosomal protein, putative
  misc_feature (1)..(99): NCBI GI NO: 15238170 NR Description: 60S acidic ribosomal protein P1-like protein
  misc_feature (1)..(99): NCBI GI NO: 21553441 NR Description: 60S acidic ribosomal protein P1-like protein
  misc_feature (1)..(99): NCBI GI NO: 18411448 NR Description: acidic ribosomal protein p1; protein id: At4g00810
  misc_feature (1)..(99): NCBI GI NO: 6094103 NR Description: 60S acidic ribosomal protein P1
  misc_feature (1)..(99): NCBI GI NO: 7440759 NR Description: acidic ribosomal protein P1a - maize
  misc_feature (1)..(99): NCBI GI NO: 1710590 NR Description: 60S ACIDIC RIBOSOMAL PROTEIN P1 (L12)
  misc_feature (1)..(99): NCBI GI NO: 18253043 NR Description: 60S acidic ribosomal protein P1
  misc_feature (1)..(99): NCBI GI NO: 25150244 NR Description: 60S Ribosomal Protein, Acidic 1
MILEDEGIAITADKIATLVKAAGVSIESYWPMLFAKMAEKRNVTDLIMNVGAGGGGSAPVAAAAPAAGGGAAAAPAAEEKKKDEPAEESDGDLGFGLFD

SEQ ID NO: 729 - protein, 68 aa, Arabidopsis thaliana
  peptide (1)..(68): Ceres Seq. ID no. 12339226
  misc_feature (1)..(67): Pfam Name: Pfam Description:  60s Acidic ribosomal protein
  misc_feature (1)..(68): NCBI GI NO: 21592477 NR Description: acidic ribosomal protein, putative
  misc_feature (1)..(68): NCBI GI NO: 15223303 NR Description: acidic ribosomal protein, putative
  misc_feature (1)..(68): NCBI GI NO: 15238170 NR Description: 60S acidic ribosomal protein P1-like protein
  misc_feature (1)..(68): NCBI GI NO: 21553441 NR Description: 60S acidic ribosomal protein P1-like protein
  misc_feature (1)..(68): NCBI GI NO: 18411448 NR Description: acidic ribosomal protein p1; protein id: At4g00810
  misc_feature (1)..(68): NCBI GI NO: 6094103 NR Description: 60S acidic ribosomal protein P1
  misc_feature (1)..(68): NCBI GI NO: 7440759 NR Description: acidic ribosomal protein P1a - maize
  misc_feature (1)..(68): NCBI GI NO: 1710590 NR Description: 60S ACIDIC RIBOSOMAL PROTEIN P1 (L12)
  misc_feature (1)..(68): NCBI GI NO: 18253043 NR Description: 60S acidic ribosomal protein P1
  misc_feature (1)..(68): NCBI GI NO: 25150244 NR Description: 60S Ribosomal Protein, Acidic 1
MLFAKMAEKRNVTDLIMNVGAGGGGSAPVAAAAPAAGGGAAAAPAAEEKKKDEPAEESDGDLGFGLFD

SEQ ID NO: 730 - DNA, 1024 bp, Arabidopsis thaliana
  misc_feature (1)..(1024): Ceres Seq. ID no. 13504706
acaactcgattaccaaaaagcagagccatccaaccataaaactcaaaacacacagattccactggcgtgtgctctcctcacttcactcgtccttgaaacttgagcttcaattacaaagaatggctgcttcaagtgctgtcaccgcaaactacgtcctcaagccacctccattcgcactggatgctttggagccgcatatgagcaaacaaactctggagtttcactggggaaaacatcacagagcttacgtggacaacctcaagaaacaggttcttggaaccgagcttgaaggcaagcccttagagcacattatccacagcacttacaacaatggtgatctcctccctgctttcaacaacgctgctcaggcgtggaaccacgagttcttctgggagtcaatgaaaccaggtggtggaggaaaaccatcaggagagcttcttgctttgcttgaaagagatttcacttcttatgagaagttctatgaagagttcaatgctgctgcagccactcagtttggagctggctgggcctggcttgcttattcaaatgaaaaactcaaagtagtgaaaactcccaatgctgtgaatccccttgtgctcggctctttcccattgcttaccattgatgtctgggagcatgcttactaccttgacttccagaaccgaagaccagattacataaagacattcatgaccaatcttgtgtcttgggaagctgtaagtgccagacttgaggccgccaaggctgcttctgcttaagcaaatttctgaacaatttgacttcagtgacagtgagttctgcatcaccgaagtctcttataaaatattggtcgctgtaataaggacacagctctcttgttgtgtatgtgtcacagagttcttcattttgcttgtgtaatgaacaattaaacatgctcttttctgagtgtgtgtgcgttttgtgtgtgtcaagtttttcatcgtctcctttattaaactcaaattggcacctaccatcagtaattcatagtttggcatggcccatt

SEQ ID NO: 731 - protein, 251 aa, Arabidopsis thaliana
  peptide (1)..(251): Ceres Seq. ID no. 13504707
  misc_feature (18)..(251): NCBI GI NO: 7433338 NR Description: superoxide dismutase (EC 1
  misc_feature (26)..(251): NCBI GI NO: 166700 NR Description: Fe-superoxide dismutase
  misc_feature (26)..(251): NCBI GI NO: 99759 NR Description: superoxide dismutase (EC 1
  misc_feature (40)..(251): NCBI GI NO: 15234913 NR Description: iron superoxide dismutase (FSD1)
  misc_feature (40)..(251): NCBI GI NO: 3114705 NR Description: superoxide dismutase [Raphanus sativus]
  misc_feature (46)..(196): NCBI GI NO: 6840824 NR Description: iron-superoxide dismutase precursor
  misc_feature (179)..(251): NCBI GI NO: 6840824 NR Description: iron-superoxide dismutase precursor
  misc_feature (36)..(248): NCBI GI NO: 33413303 NR Description: superoxide dismutase
  misc_feature (36)..(248): NCBI GI NO: 33439120 NR Description: iron superoxide dismutase
  misc_feature (39)..(197): NCBI GI NO: 16974682 NR Description: Fe-superoxide dismutase precursor
NSITKKQSHPTIKLKTHRFHWRVLSSLHSSLKLELQLQRMAASSAVTANYVLKPPPFALDALEPHMSKQTLEFHWGKHHRAYVDNLKKQVLGTELEGKPLEHIIHSTYNNGDLLPAFNNAAQAWNHEFFWESMKPGGGGKPSGELLALLERDFTSYEKFYEEFNAAAATQFGAGWAWLAYSNEKLKVVKTPNAVNPLVLGSFPLLTIDVWEHAYYLDFQNRRPDYIKTFMTNLVSWEAVSARLEAAKAASA

SEQ ID NO: 732 - protein, 212 aa, Arabidopsis thaliana
  peptide (1)..(212): Ceres Seq. ID no. 13504708
  misc_feature (1)..(212): NCBI GI NO: 7433338 NR Description: superoxide dismutase (EC 1
  misc_feature (1)..(212): NCBI GI NO: 166700 NR Description: Fe-superoxide dismutase
  misc_feature (1)..(212): NCBI GI NO: 99759 NR Description: superoxide dismutase (EC 1
  misc_feature (1)..(212): NCBI GI NO: 15234913 NR Description: iron superoxide dismutase (FSD1)
  misc_feature (1)..(212): NCBI GI NO: 3114705 NR Description: superoxide dismutase [Raphanus sativus]
  misc_feature (7)..(157): NCBI GI NO: 6840824 NR Description: iron-superoxide dismutase precursor
  misc_feature (140)..(212): NCBI GI NO: 6840824 NR Description: iron-superoxide dismutase precursor
  misc_feature (1)..(209): NCBI GI NO: 33413303 NR Description: superoxide dismutase
  misc_feature (1)..(209): NCBI GI NO: 33439120 NR Description: iron superoxide dismutase
  misc_feature (1)..(158): NCBI GI NO: 16974682 NR Description: Fe-superoxide dismutase precursor
MAASSAVTANYVLKPPPFALDALEPHMSKQTLEFHWGKHHRAYVDNLKKQVLGTELEGKPLEHIIHSTYNNGDLLPAFNNAAQAWNHEFFWESMKPGGGGKPSGELLALLERDFTSYEKFYEEFNAAAATQFGAGWAWLAYSNEKLKVVKTPNAVNPLVLGSFPLLTIDVWEHAYYLDFQNRRPDYIKTFMTNLVSWEAVSARLEAAKAASA

SEQ ID NO: 733 - protein, 186 aa, Arabidopsis thaliana
  peptide (1)..(186): Ceres Seq. ID no. 13504709
  misc_feature (1)..(186): NCBI GI NO: 7433338 NR Description: superoxide dismutase (EC 1
  misc_feature (1)..(186): NCBI GI NO: 166700 NR Description: Fe-superoxide dismutase
  misc_feature (1)..(186): NCBI GI NO: 99759 NR Description: superoxide dismutase (EC 1
  misc_feature (1)..(186): NCBI GI NO: 15234913 NR Description: iron superoxide dismutase (FSD1)
  misc_feature (1)..(186): NCBI GI NO: 3114705 NR Description: superoxide dismutase [Raphanus sativus]
  misc_feature (1)..(131): NCBI GI NO: 6840824 NR Description: iron-superoxide dismutase precursor
  misc_feature (114)..(186): NCBI GI NO: 6840824 NR Description: iron-superoxide dismutase precursor
  misc_feature (1)..(183): NCBI GI NO: 33413303 NR Description: superoxide dismutase
  misc_feature (1)..(183): NCBI GI NO: 33439120 NR Description: iron superoxide dismutase
  misc_feature (1)..(132): NCBI GI NO: 16974682 NR Description: Fe-superoxide dismutase precursor
MSKQTLEFHWGKHHRAYVDNLKKQVLGTELEGKPLEHIIHSTYNNGDLLPAFNNAAQAWNHEFFWESMKPGGGGKPSGELLALLERDFTSYEKFYEEFNAAAATQFGAGWAWLAYSNEKLKVVKTPNAVNPLVLGSFPLLTIDVWEHAYYLDFQNRRPDYIKTFMTNLVSWEAVSARLEAAKAASA

SEQ ID NO: 734 - DNA, 925 bp, Arabidopsis thaliana
  misc_feature (1)..(925): Ceres Seq. ID no. 12384577
aaaaacattagttacagtcggaatttcgaaaaaccctaattcagctaaaggttgatcgttgatctaaaagctcgagtgatgaagggaaattggtcgatcgtacgaaaggttcttcatcgccagttctccactctccgttcctcgacaccatcgtcgcgattatctacttccatccgaccgcttgttctggccccaaactcgatatcgtcgctaatcgctagaaactcattgtttactgcctccaacattggtccatccatcgattttaacttctccaacacttcgcttcctcatcggagaagcctctgctcggaagctggaggtgaaaatggtgttgttctagtgaaatcagaggaagagttcatcaatgcaatgagcaaagctcaagatggatctttaccatcggtcttctatttcactgccgcctggtgtggaccatgcaggtttatctctcctgtaatcgtggagcttagtaaacaatatcccgatgtaactacgtataaagtcgacattgatgagggcgggatttcgaacactatcagcaagttgaatatcacggctgtgccaacactgcatttcttcaaaggaggctcgaagcaaggcgaggttgtgggtgcagatgtcacgaagctgaagaatctcatggaacagctctacaagtgaagacctaatccgtcctagtaaagaacgtgttgaatagttgcaagatagtttaagactgaaaatttgaaatcaatctaaaaataatgaatgcgctgaaccagtttcgtctttgttcccccctcgttgttcaggattgtaattgcccttttgttttgtttgttttctccatttcctttgggcttagtttcctgagatttgtttgtgtccgtcggtgacaacttcaaaaaatatcgacaagtcataactttttatcaaaattttg

SEQ ID NO: 735 - protein, 194 aa, Arabidopsis thaliana
  peptide (1)..(194): Ceres Seq. ID no. 12384578
  misc_feature (1)..(194): NCBI GI NO: 15226875 NR Description: thioredoxin, putative; protein id: At2g35010.1
  misc_feature (46)..(194): NCBI GI NO: 18397764 NR Description: expressed protein; protein id: At1g31020
  misc_feature (46)..(194): NCBI GI NO: 9755396 NR Description: F17F8.6 [Arabidopsis thaliana]
  misc_feature (99)..(194): NCBI GI NO: 26453152 NR Description: putative thioredoxin [Arabidopsis thaliana]
  misc_feature (80)..(191): NCBI GI NO: 27763683 NR Description: thioredoxin o [Chlamydomonas reinhardtii]
  misc_feature (83)..(187): NCBI GI NO: 3915131 NR Description: Thioredoxin H-type
  misc_feature (83)..(185): NCBI GI NO: 23978434 NR Description: thioredoxin h [Cucurbita maxima]
  misc_feature (72)..(191): NCBI GI NO: 18041548 NR Description: tetratricoredoxin [Nicotiana tabacum]
  misc_feature (83)..(186): NCBI GI NO: 14485509 NR Description: thioredoxin h [Pisum sativum]
  misc_feature (86)..(186): NCBI GI NO: 6321648 NR Description: thioredoxin; Trx2p [Saccharomyces cerevisiae]
MKGNWSIVRKVLHRQFSTLRSSTPSSRLSTSIRPLVLAPNSISSLIARNSLFTASNIGPSIDFNFSNTSLPHRRSLCSEAGGENGVVLVKSEEEFINAMSKAQDGSLPSVFYFTAAWCGPCRFISPVIVELSKQYPDVTTYKVDIDEGGISNTISKLNITAVPTLHFFKGGSKQGEVVGADVTKLKNLMEQLYK

SEQ ID NO: 736 - DNA, 1155 bp, Arabidopsis thaliana
  misc_feature (1)..(1155): Ceres Seq. ID no. 12377359
atggtgatgagaaagctacagttaccgttgagccagacgcagaaggttaggtttgagagagcaatcgagcggcttcaatcactgtcgtcgtcggctaactctgacgcttctgttatcgtcaccgactctattcccgtcaaccatgacgatgccttcctcaagggacatggaacttccgaggtcgatggtgagttgctcgcgacggtctgtggagtagtggagcgtgtggataagcttgtctatgtacgcaccttgcgagccaggtacaagcctgaagttggggatattgtggtaggccgtgtcattgaggttgctcaaaaacgttggagagtggagctcaacttcaatcaggatggagtactgatgctttcttccatgaacatgcctgatggtattcagaggcgaagaacctctgtggatgaactcaatatgcggaatatctttgtagagcatgatgtcgtatgtgctgaagtacgcaactttcagcatgatggtagcttgcagttacaagccagaagtcagaagtatggcaagctcgagaagggacaacttctgaaggtcgatccttacttggttaagagaagcaaacatcactttcattacgtagaaagtcttgggattgatttgattattggctgcaatggtttcatatgggttggagaacatgtcgaagtgagagatcctatggcaatagatgatcagaaagatgaggaaatgatctcatcctcctccacaggaaaagagcaaagccatattccactcgagactcgacaaaccatatgcagaatcgggaatgcgatacgtgtcttgtctaatctaggcttcaccgtgacactagaagtaatcatggagactgttaacctcagtaactcaaagaatattgacatacatgatatgcttggatcagagtttcacgttgtggtagcagagaatgaagctgaaagaagacgtacaaagaggaaaaagtgaaaactacccctttttgtcactgatgtatcagagacttgtaacgtgtattagatcattcggtcttgtttgttactcagcttctattgaaagttcgaattttaatctgattgagatatgtagtatgatggatgtgtttgatactattaactgtacatcagattagattagtcgagttatgtcttttgg

SEQ ID NO: 737 - protein, 322 aa, Arabidopsis thaliana
  peptide (1)..(322): Ceres Seq. ID no. 12377360
  misc_feature (1)..(322): NCBI GI NO: 15218790 NR Description: hypothetical protein; protein id: At1g03360.1
  misc_feature (38)..(292): NCBI GI NO: 20378673 NR Description: exonuclease [Phytophthora sojae]
  misc_feature (39)..(278): NCBI GI NO: 19113896 NR Description: conserved hypothetical protein
  misc_feature (28)..(227): NCBI GI NO: 21450259 NR Description: hypothetical protein MGC30456 [Mus musculus]
  misc_feature (39)..(224): NCBI GI NO: 19923403 NR Description: homolog of Yeast RRP4
  misc_feature (21)..(271): NCBI GI NO: 21428348 NR Description: GM02257p [Drosophila melanogaster]
  misc_feature (21)..(271): NCBI GI NO: 24762324 NR Description: CG3931-PA [Drosophila melanogaster]
  misc_feature (27)..(303): NCBI GI NO: 39584168 NR Description: Hypothetical protein CBG05449
  misc_feature (27)..(294): NCBI GI NO: 17544090 NR Description: Ribosomal RNA processing like (34.1 kD)
  misc_feature (25)..(246): NCBI GI NO: 6321860 NR Description: Ribosomal RNA Processing; Rrp4p
MVMRKLQLPLSQTQKVRFERAIERLQSLSSSANSDASVIVTDSIPVNHDDAFLKGHGTSEVDGELLATVCGVVERVDKLVYVRTLRARYKPEVGDIVVGRVIEVAQKRWRVELNFNQDGVLMLSSMNMPDGIQRRRTSVDELNMRNIFVEHDVVCAEVRNFQHDGSLQLQARSQKYGKLEKGQLLKVDPYLVKRSKHHFHYVESLGIDLIIGCNGFIWVGEHVEVRDPMAIDDQKDEEMISSSSTGKEQSHIPLETRQTICRIGNAIRVLSNLGFTVTLEVIMETVNLSNSKNIDIHDMLGSEFHVVVAENEAERRRTKRKK

SEQ ID NO: 738 - protein, 320 aa, Arabidopsis thaliana
  peptide (1)..(320): Ceres Seq. ID no. 12377361
  misc_feature (1)..(320): NCBI GI NO: 15218790 NR Description: hypothetical protein; protein id: At1g03360.1
  misc_feature (36)..(290): NCBI GI NO: 20378673 NR Description: exonuclease [Phytophthora sojae]
  misc_feature (37)..(276): NCBI GI NO: 19113896 NR Description: conserved hypothetical protein
  misc_feature (26)..(225): NCBI GI NO: 21450259 NR Description: hypothetical protein MGC30456 [Mus musculus]
  misc_feature (37)..(222): NCBI GI NO: 19923403 NR Description: homolog of Yeast RRP4
  misc_feature (19)..(269): NCBI GI NO: 21428348 NR Description: GM02257p [Drosophila melanogaster]
  misc_feature (19)..(269): NCBI GI NO: 24762324 NR Description: CG3931-PA [Drosophila melanogaster]
  misc_feature (25)..(301): NCBI GI NO: 39584168 NR Description: Hypothetical protein CBG05449
  misc_feature (25)..(292): NCBI GI NO: 17544090 NR Description: Ribosomal RNA processing like (34.1 kD)
  misc_feature (23)..(244): NCBI GI NO: 6321860 NR Description: Ribosomal RNA Processing; Rrp4p
MRKLQLPLSQTQKVRFERAIERLQSLSSSANSDASVIVTDSIPVNHDDAFLKGHGTSEVDGELLATVCGVVERVDKLVYVRTLRARYKPEVGDIVVGRVIEVAQKRWRVELNFNQDGVLMLSSMNMPDGIQRRRTSVDELNMRNIFVEHDVVCAEVRNFQHDGSLQLQARSQKYGKLEKGQLLKVDPYLVKRSKHHFHYVESLGIDLIIGCNGFIWVGEHVEVRDPMAIDDQKDEEMISSSSTGKEQSHIPLETRQTICRIGNAIRVLSNLGFTVTLEVIMETVNLSNSKNIDIHDMLGSEFHVVVAENEAERRRTKRKK

SEQ ID NO: 739 - protein, 201 aa, Arabidopsis thaliana
  peptide (1)..(201): Ceres Seq. ID no. 12377362
  misc_feature (1)..(201): NCBI GI NO: 15218790 NR Description: hypothetical protein; protein id: At1g03360.1
  misc_feature (1)..(171): NCBI GI NO: 20378673 NR Description: exonuclease [Phytophthora sojae]
  misc_feature (1)..(157): NCBI GI NO: 19113896 NR Description: conserved hypothetical protein
  misc_feature (1)..(106): NCBI GI NO: 21450259 NR Description: hypothetical protein MGC30456 [Mus musculus]
  misc_feature (1)..(103): NCBI GI NO: 19923403 NR Description: homolog of Yeast RRP4
  misc_feature (1)..(150): NCBI GI NO: 21428348 NR Description: GM02257p [Drosophila melanogaster]
  misc_feature (1)..(150): NCBI GI NO: 24762324 NR Description: CG3931-PA [Drosophila melanogaster]
  misc_feature (1)..(182): NCBI GI NO: 39584168 NR Description: Hypothetical protein CBG05449
  misc_feature (1)..(173): NCBI GI NO: 17544090 NR Description: Ribosomal RNA processing like (34.1 kD)
  misc_feature (1)..(125): NCBI GI NO: 6321860 NR Description: Ribosomal RNA Processing; Rrp4p
MLSSMNMPDGIQRRRTSVDELNMRNIFVEHDVVCAEVRNFQHDGSLQLQARSQKYGKLEKGQLLKVDPYLVKRSKHHFHYVESLGIDLIIGCNGFIWVGEHVEVRDPMAIDDQKDEEMISSSSTGKEQSHIPLETRQTICRIGNAIRVLSNLGFTVTLEVIMETVNLSNSKNIDIHDMLGSEFHVVVAENEAERRRTKRKK

SEQ ID NO: 740 - DNA, 1284 bp, Arabidopsis thaliana
  misc_feature (1)..(1284): Ceres Seq. ID no. 13618547
actaattaaattctctataaaacataagagagtctaaacactgtggtagaaaaaaatatagacttttagatatgtgtagtaaaataacattagtgttaactttattttccagttatttcatatcaacagatgctgtgaatggatcatttcctgcgcttttggcttttggagattcaattctcgatactggcaacaacaattttctcctgacttttatgaaaggaaatatctggccatatggaaggagtttcagcatgagaagggcgacaggaagatttggaaatggaagagttttctctgatatagttgctgaaggtttagggatcaagaagattttaccagcttatcgtaagttgttcaattctccaagtgaccttagaactggtgtttgcttcgcatcaggtggtgcaggagttgaccctgttacatccaaattgctgagagttttaacgccaaaggatcaagtaaacgatttcaaagggtacataagaaagctaaaggccacagcaggtccttcaagagcaagtagtatagtttcaaatgcagtgattcttgtttctcaaggaaataatgatattggaatctcatattttggaactccaactgctgctttccgaggattaactcccaatagatataccactaaactagctggttggaacaaacagtttatgaaagaattatacgatcaaggagcgagaaaattcgcggtaatgggagtgataccgttgggatgtttgcctatgacaagaatcttccttggtgggttcgtcatcacgtgtaacttcttcgcgaatagagtcgcagaacagtacaacggaaaattgaggagcggaactaaaagttggggacgtgaagcaggttttaggggtgcaaaatttgtctatgtcgacatgtacaacactcttatggatgttattaaaaattatagaagatacggattttctaatgagaaaaatgggtgttgttgtatgattacggctataataccatgccccaacccagataaatacgtcttctacgacttcgttcatccatccgagaaagcttacagaacaatttctaaaaagcttgtccaggatatcaagaatggccttgcctgatttattatatatacaatgctttattttaattttaataacagccatcgttaataatagaaatgagaagacaaaaatcatacatggcgatctctctgtttttcttatgttaaagaatgtataatccagtttatgtattgttcactttatataatcccagaacaacaaaggagtttgtttacaa

SEQ ID NO: 741 - protein, 343 aa, Arabidopsis thaliana
  peptide (1)..(343): Ceres Seq. ID no. 13618548
  misc_feature (29)..(334): Pfam Name: Pfam Description:  GDSL-like Lipase/Acylhydrolase
  misc_feature (1)..(343): NCBI GI NO: 15222902 NR Description: family II extracellular lipase 4 (EXL4)
  misc_feature (1)..(343): NCBI GI NO: 15054388 NR Description: family II lipase EXL4 [Arabidopsis thaliana]
  misc_feature (21)..(343): NCBI GI NO: 25404994 NR Description: protein T4O12.13 [imported] - Arabidopsis thaliana
  misc_feature (1)..(343): NCBI GI NO: 8778809 NR Description: T4O12.14 [Arabidopsis thaliana]
  misc_feature (7)..(343): NCBI GI NO: 18410967 NR Description: family II extracellular lipase 5 (EXL5)
  misc_feature (8)..(343): NCBI GI NO: 15222904 NR Description: family II extracellular lipase 6 (EXL6)
  misc_feature (8)..(327): NCBI GI NO: 25404995 NR Description: protein T4O12.15 [imported] - Arabidopsis thaliana
  misc_feature (3)..(343): NCBI GI NO: 15242657 NR Description: lipase, putative [Arabidopsis thaliana]
  misc_feature (1)..(343): NCBI GI NO: 15219505 NR Description: GDSL-motif lipase/hydrolase protein
  misc_feature (1)..(343): NCBI GI NO: 15220775 NR Description: lipase, putative [Arabidopsis thaliana]
MCSKITLVLTLFSSYFISTDAVNGSFPALLAFGDSILDTGNNNFLLTFMKGNIWPYGRSFSMRRATGRFGNGRVFSDIVAEGLGIKKILPAYRKLFNSPSDLRTGVCFASGGAGVDPVTSKLLRVLTPKDQVNDFKGYIRKLKATAGPSRASSIVSNAVILVSQGNNDIGISYFGTPTAAFRGLTPNRYTTKLAGWNKQFMKELYDQGARKFAVMGVIPLGCLPMTRIFLGGFVITCNFFANRVAEQYNGKLRSGTKSWGREAGFRGAKFVYVDMYNTLMDVIKNYRRYGFSNEKNGCCCMITAIIPCPNPDKYVFYDFVHPSEKAYRTISKKLVQDIKNGLA

SEQ ID NO: 742 - protein, 295 aa, Arabidopsis thaliana
  peptide (1)..(295): Ceres Seq. ID no. 13618549
  misc_feature (1)..(286): Pfam Name: Pfam Description:  GDSL-like Lipase/Acylhydrolase
  misc_feature (1)..(295): NCBI GI NO: 15222902 NR Description: family II extracellular lipase 4 (EXL4)
  misc_feature (1)..(295): NCBI GI NO: 15054388 NR Description: family II lipase EXL4 [Arabidopsis thaliana]
  misc_feature (1)..(295): NCBI GI NO: 25404994 NR Description: protein T4O12.13 [imported] - Arabidopsis thaliana
  misc_feature (1)..(295): NCBI GI NO: 8778809 NR Description: T4O12.14 [Arabidopsis thaliana]
  misc_feature (1)..(295): NCBI GI NO: 18410967 NR Description: family II extracellular lipase 5 (EXL5)
  misc_feature (1)..(295): NCBI GI NO: 15222904 NR Description: family II extracellular lipase 6 (EXL6)
  misc_feature (1)..(279): NCBI GI NO: 25404995 NR Description: protein T4O12.15 [imported] - Arabidopsis thaliana
  misc_feature (1)..(295): NCBI GI NO: 15242657 NR Description: lipase, putative [Arabidopsis thaliana]
  misc_feature (1)..(295): NCBI GI NO: 15219505 NR Description: GDSL-motif lipase/hydrolase protein
  misc_feature (1)..(295): NCBI GI NO: 15220775 NR Description: lipase, putative [Arabidopsis thaliana]
MKGNIWPYGRSFSMRRATGRFGNGRVFSDIVAEGLGIKKILPAYRKLFNSPSDLRTGVCFASGGAGVDPVTSKLLRVLTPKDQVNDFKGYIRKLKATAGPSRASSIVSNAVILVSQGNNDIGISYFGTPTAAFRGLTPNRYTTKLAGWNKQFMKELYDQGARKFAVMGVIPLGCLPMTRIFLGGFVITCNFFANRVAEQYNGKLRSGTKSWGREAGFRGAKFVYVDMYNTLMDVIKNYRRYGFSNEKNGCCCMITAIIPCPNPDKYVFYDFVHPSEKAYRTISKKLVQDIKNGLA

SEQ ID NO: 743 - protein, 282 aa, Arabidopsis thaliana
  peptide (1)..(282): Ceres Seq. ID no. 13618550
  misc_feature (1)..(273): Pfam Name: Pfam Description:  GDSL-like Lipase/Acylhydrolase
  misc_feature (1)..(282): NCBI GI NO: 15222902 NR Description: family II extracellular lipase 4 (EXL4)
  misc_feature (1)..(282): NCBI GI NO: 15054388 NR Description: family II lipase EXL4 [Arabidopsis thaliana]
  misc_feature (1)..(282): NCBI GI NO: 25404994 NR Description: protein T4O12.13 [imported] - Arabidopsis thaliana
  misc_feature (1)..(282): NCBI GI NO: 8778809 NR Description: T4O12.14 [Arabidopsis thaliana]
  misc_feature (1)..(282): NCBI GI NO: 18410967 NR Description: family II extracellular lipase 5 (EXL5)
  misc_feature (1)..(282): NCBI GI NO: 15222904 NR Description: family II extracellular lipase 6 (EXL6)
  misc_feature (1)..(266): NCBI GI NO: 25404995 NR Description: protein T4O12.15 [imported] - Arabidopsis thaliana
  misc_feature (1)..(282): NCBI GI NO: 15242657 NR Description: lipase, putative [Arabidopsis thaliana]
  misc_feature (1)..(282): NCBI GI NO: 15219505 NR Description: GDSL-motif lipase/hydrolase protein
  misc_feature (1)..(282): NCBI GI NO: 15220775 NR Description: lipase, putative [Arabidopsis thaliana]
MRRATGRFGNGRVFSDIVAEGLGIKKILPAYRKLFNSPSDLRTGVCFASGGAGVDPVTSKLLRVLTPKDQVNDFKGYIRKLKATAGPSRASSIVSNAVILVSQGNNDIGISYFGTPTAAFRGLTPNRYTTKLAGWNKQFMKELYDQGARKFAVMGVIPLGCLPMTRIFLGGFVITCNFFANRVAEQYNGKLRSGTKSWGREAGFRGAKFVYVDMYNTLMDVIKNYRRYGFSNEKNGCCCMITAIIPCPNPDKYVFYDFVHPSEKAYRTISKKLVQDIKNGLA

SEQ ID NO: 744 - DNA, 528 bp, Arabidopsis thaliana
  misc_feature (1)..(528): Ceres Seq. ID no. 12580481
acgttggtattatctctggtttcacattttcttaaccctctttggtgaatgcgtcattgaaacgccattatccgccgtgctaatctgatctcctcccccgtcggaaaaaatggccactggtggaaaagtctccttcaaagtcactctgacttcggatcctaagcttcctttcaaagttttcagcgtaccagaaggagctccgttcacggcggttctgaaattcgcagcagaagagttcaaggttcctccacaaaccagcgccatcatcactaatgatgggatcgggatcaatcctcaacagagtgcaggaaacgtttttctgaagcacggatctgaactaagattgatcccgcgtgatagagttggagctgtgtttgtgatggatccatagatgatgtgtaagcaatgattaaaaactcagttccaaaaaaaacataataatatactgaaatgcttatgtatcaacttcgttgaataaatatgtaatcgtcacatccttttacggattgaagtgagttgaatttggtc

SEQ ID NO: 745 - protein, 93 aa, Arabidopsis thaliana
  peptide (1)..(93): Ceres Seq. ID no. 12580482
  misc_feature (5)..(80): Pfam Name: UPF0185 Pfam Description: Uncharacterised protein family
  misc_feature (1)..(93): NCBI GI NO: 15217447 NR Description: unknown protein; protein id: At1g77710
  misc_feature (2)..(88): NCBI GI NO: 34905822 NR Description: P0483G10.15
  misc_feature (1)..(88): NCBI GI NO: 20140686 NR Description: Hypothetical protein pr46A
  misc_feature (1)..(87): NCBI GI NO: 40889046 NR Description: Chain A
  misc_feature (1)..(86): NCBI GI NO: 39589640 NR Description: Hypothetical protein CBG12253
  misc_feature (4)..(86): NCBI GI NO: 17557033 NR Description: Eukaryotic protein similar to human bone marrow protein BM-002
  misc_feature (6)..(87): NCBI GI NO: 7705300 NR Description: hypothetical protein BM-002 [Homo sapiens]
  misc_feature (6)..(86): NCBI GI NO: 37595394 NR Description: hypothetical protein BM-002 [Danio rerio]
  misc_feature (6)..(86): NCBI GI NO: 28277496 NR Description: Similar to RIKEN cDNA 1810045K17 gene
  misc_feature (6)..(80): NCBI GI NO: 1235522 NR Description: ORF is homologous to hypothetical 9
MATGGKVSFKVTLTSDPKLPFKVFSVPEGAPFTAVLKFAAEEFKVPPQTSAIITNDGIGINPQQSAGNVFLKHGSELRLIPRDRVGAVFVMDP

SEQ ID NO: 746 - DNA, 1180 bp, Arabidopsis thaliana
  misc_feature (1)..(1180): Ceres Seq. ID no. 13504734
tgacgtcaaactctctctatacacagagttaaattgagtttgtgtctcgtaacttatcctgtgagcgaaaatggtgaaagcaactaaggcagagaagaagatcgcctacgataccaagctatgtcagcttatcgatgagtacacccagatcttggtcgttgcggccgataacgtcggatcaactcagcttcagaacatcagaaagggtcttcgtggagactccgtcgtgcttatggggaagaacactatgatgaagcgttccgttaggattcactctgagaacaccggaaacactgcaatcctgaatctgcttcctctccttcagggaaacgttggtttgatctttaccaaaggtgacctcaaggaagtgagcgaggaggttgctaagtacaaggttggtgcccctgctcgtgtgggtttggtggctccaattgatgtggttgtccaacctggcaacactggtctcgacccatcccaaacatctttcttccaggtgcttaacatcccaaccaagattaacaagggtaccgtcgaaatcatcaccccagttgagcttatcaagcaaggtgacaaggtcgggtcttctgaggctgcgcttctagccaagcttggcatcaggccgttctcatatggtcttgttgtccagtctgtctatgacaatggctcagtcttcagcccagaggttcttgatcttactgaagaccaacttgtggagaagtttgcttctggtatctccatggtcacttccttggctcttgctgtgtcgtaccctacccttgctgctgcaccgcatatgttcatcaatgcgtacaagaatgccttggctattgctgttgccactgagtacaccttccctcaagcagagaaggtcaaggaatacttgaaggatccaagcaagtttgctgttgcttcagtagctgcggtgtctgctgatgcaggtggtggtgccccagctgctgctaaggtagaggagaaggaagagtccgacgaagaagactatggaggtgatttcggtttgttcgatgaagagtagattttgtcggttaagatcttacctttttgtcgtggattataagtgttgctttgtttttagtatgttggacctcaattttcttggttttagccaatccagttttatgttactactgtcttttattttttggaaagatttcgttttcct

SEQ ID NO: 747 - protein, 320 aa, Arabidopsis thaliana
  peptide (1)..(320): Ceres Seq. ID no. 13504735
  misc_feature (5)..(109): Pfam Name: Pfam Description:  Ribosomal protein L10
  misc_feature (1)..(320): NCBI GI NO: 15232603 NR Description: 60S acidic ribosomal protein P0 (RPP0B)
  misc_feature (1)..(320): NCBI GI NO: 21554645 NR Description: putative 60S acidic ribosomal protein P0
  misc_feature (1)..(320): NCBI GI NO: 15229706 NR Description: 60S acidic ribosomal protein P0 (RPP0C)
  misc_feature (1)..(320): NCBI GI NO: 21593316 NR Description: 60S acidic ribosomal protein P0-C
  misc_feature (5)..(318): NCBI GI NO: 6984134 NR Description: 60S acidic ribosomal protein PO [Euphorbia esula]
  misc_feature (2)..(315): NCBI GI NO: 15225613 NR Description: 60S acidic ribosomal protein P0 (RPP0A)
  misc_feature (3)..(318): NCBI GI NO: 1710587 NR Description: 60S ACIDIC RIBOSOMAL PROTEIN P0
  misc_feature (2)..(318): NCBI GI NO: 730580 NR Description: 60S ACIDIC RIBOSOMAL PROTEIN P0
  misc_feature (3)..(319): NCBI GI NO: 1710585 NR Description: 60S ACIDIC RIBOSOMAL PROTEIN P0
  misc_feature (2)..(319): NCBI GI NO: 6094102 NR Description: 60S ACIDIC RIBOSOMAL PROTEIN P0
MVKATKAEKKIAYDTKLCQLIDEYTQILVVAADNVGSTQLQNIRKGLRGDSVVLMGKNTMMKRSVRIHSENTGNTAILNLLPLLQGNVGLIFTKGDLKEVSEEVAKYKVGAPARVGLVAPIDVVVQPGNTGLDPSQTSFFQVLNIPTKINKGTVEIITPVELIKQGDKVGSSEAALLAKLGIRPFSYGLVVQSVYDNGSVFSPEVLDLTEDQLVEKFASGISMVTSLALAVSYPTLAAAPHMFINAYKNALAIAVATEYTFPQAEKVKEYLKDPSKFAVASVAAVSADAGGGAPAAAKVEEKEESDEEDYGGDFGLFDEE

SEQ ID NO: 748 - protein, 266 aa, Arabidopsis thaliana
  peptide (1)..(266): Ceres Seq. ID no. 13504736
  misc_feature (1)..(55): Pfam Name: Pfam Description:  Ribosomal protein L10
  misc_feature (1)..(266): NCBI GI NO: 15232603 NR Description: 60S acidic ribosomal protein P0 (RPP0B)
  misc_feature (1)..(266): NCBI GI NO: 21554645 NR Description: putative 60S acidic ribosomal protein P0
  misc_feature (1)..(266): NCBI GI NO: 15229706 NR Description: 60S acidic ribosomal protein P0 (RPP0C)
  misc_feature (1)..(266): NCBI GI NO: 21593316 NR Description: 60S acidic ribosomal protein P0-C
  misc_feature (1)..(264): NCBI GI NO: 6984134 NR Description: 60S acidic ribosomal protein PO [Euphorbia esula]
  misc_feature (1)..(261): NCBI GI NO: 15225613 NR Description: 60S acidic ribosomal protein P0 (RPP0A)
  misc_feature (1)..(264): NCBI GI NO: 1710587 NR Description: 60S ACIDIC RIBOSOMAL PROTEIN P0
  misc_feature (1)..(264): NCBI GI NO: 730580 NR Description: 60S ACIDIC RIBOSOMAL PROTEIN P0
  misc_feature (1)..(265): NCBI GI NO: 1710585 NR Description: 60S ACIDIC RIBOSOMAL PROTEIN P0
  misc_feature (1)..(265): NCBI GI NO: 6094102 NR Description: 60S ACIDIC RIBOSOMAL PROTEIN P0
MGKNTMMKRSVRIHSENTGNTAILNLLPLLQGNVGLIFTKGDLKEVSEEVAKYKVGAPARVGLVAPIDVVVQPGNTGLDPSQTSFFQVLNIPTKINKGTVEIITPVELIKQGDKVGSSEAALLAKLGIRPFSYGLVVQSVYDNGSVFSPEVLDLTEDQLVEKFASGISMVTSLALAVSYPTLAAAPHMFINAYKNALAIAVATEYTFPQAEKVKEYLKDPSKFAVASVAAVSADAGGGAPAAAKVEEKEESDEEDYGGDFGLFDEE

SEQ ID NO: 749 - protein, 261 aa, Arabidopsis thaliana
  peptide (1)..(261): Ceres Seq. ID no. 13504737
  misc_feature (176)..(258): Pfam Name: Pfam Description:  60s Acidic ribosomal protein
  misc_feature (1)..(261): NCBI GI NO: 15232603 NR Description: 60S acidic ribosomal protein P0 (RPP0B)
  misc_feature (1)..(261): NCBI GI NO: 21554645 NR Description: putative 60S acidic ribosomal protein P0
  misc_feature (1)..(261): NCBI GI NO: 15229706 NR Description: 60S acidic ribosomal protein P0 (RPP0C)
  misc_feature (1)..(261): NCBI GI NO: 21593316 NR Description: 60S acidic ribosomal protein P0-C
  misc_feature (1)..(259): NCBI GI NO: 6984134 NR Description: 60S acidic ribosomal protein PO [Euphorbia esula]
  misc_feature (1)..(256): NCBI GI NO: 15225613 NR Description: 60S acidic ribosomal protein P0 (RPP0A)
  misc_feature (1)..(259): NCBI GI NO: 1710587 NR Description: 60S ACIDIC RIBOSOMAL PROTEIN P0
  misc_feature (1)..(259): NCBI GI NO: 730580 NR Description: 60S ACIDIC RIBOSOMAL PROTEIN P0
  misc_feature (1)..(260): NCBI GI NO: 1710585 NR Description: 60S ACIDIC RIBOSOMAL PROTEIN P0
  misc_feature (1)..(260): NCBI GI NO: 6094102 NR Description: 60S ACIDIC RIBOSOMAL PROTEIN P0
MMKRSVRIHSENTGNTAILNLLPLLQGNVGLIFTKGDLKEVSEEVAKYKVGAPARVGLVAPIDVVVQPGNTGLDPSQTSFFQVLNIPTKINKGTVEIITPVELIKQGDKVGSSEAALLAKLGIRPFSYGLVVQSVYDNGSVFSPEVLDLTEDQLVEKFASGISMVTSLALAVSYPTLAAAPHMFINAYKNALAIAVATEYTFPQAEKVKEYLKDPSKFAVASVAAVSADAGGGAPAAAKVEEKEESDEEDYGGDFGLFDEE

SEQ ID NO: 750 - DNA, 770 bp, Arabidopsis thaliana
  misc_feature (1)..(770): Ceres Seq. ID no. 12339783
tagcgcaaggcgtttgttgaaaagcttgatgaggtgcaagattggctttacatggatggagaagatgctaatgccacagagtttgagaagcggcttgactcacttaaagccatcggcagtcccatatctttccgatcagaggagcttacagcacgaccagtagcaattgaatatgctaggaaatacctaactgaactcaaagagatcataaaagaatgggagacgaacaaaacttggcttccaaaagaaaaaatcgacgaggtctcaaaggaagcagagaaagtaaaaagctggttagataagaatgtggctgagcaagaaaagacttctctgtggagcaaaccggtgttcacgtccactgaagtgtacgctaaagtatttactctacaagacaaggtcacaaaggtgaataagatcccaaagccaaagccaaagatagagaaagtaaccaagacggagaacacaacaaaggaggaggaacaatcaaaatcctctgatgaagctgccaaagaagaagaaagtcacgacgagctttgattaaggatatataataaatagagttttcgttaatttttgtgtttttaagagggaaaataggattaaaagtaggcagctgagatgagcaaaaggattttattcctttctcctcaacttcttcacatcaccattagaaacggaatcttctgtgtttttgtttttcattatatcaagttttggtctctctatttctataactgaatcttcaatatatttagtagaagtttataatc

SEQ ID NO: 751 - protein, 161 aa, Arabidopsis thaliana
  peptide (1)..(161): Ceres Seq. ID no. 12339784
  misc_feature (1)..(161): NCBI GI NO: 18414718 NR Description: HSP like protein; protein id: At4g16660
  misc_feature (1)..(161): NCBI GI NO: 25407544 NR Description: HSP like protein [imported] - Arabidopsis thaliana
  misc_feature (1)..(161): NCBI GI NO: 15293149 NR Description: putative HSP protein [Arabidopsis thaliana]
  misc_feature (1)..(120): NCBI GI NO: 7488120 NR Description: probable heat shock protein 110 - Arabidopsis thaliana
  misc_feature (1)..(159): NCBI GI NO: 2495362 NR Description: 97 KDA HEAT SHOCK PROTEIN (HEAT SHOCK PROTEIN 110)
  misc_feature (1)..(160): NCBI GI NO: 1649012 NR Description: egg receptor for sperm
  misc_feature (1)..(160): NCBI GI NO: 6226870 NR Description: 97 KDA HEAT SHOCK PROTEIN (EGG SPERM RECEPTOR)
  misc_feature (1)..(140): NCBI GI NO: 28856138 NR Description: Similar to heat shock protein 4 [Danio rerio]
  misc_feature (1)..(160): NCBI GI NO: 26344529 NR Description: unnamed protein product [Mus musculus]
  misc_feature (1)..(140): NCBI GI NO: 30525062 NR Description: heat shock protein 4 [Cyprinus carpio]
MDGEDANATEFEKRLDSLKAIGSPISFRSEELTARPVAIEYARKYLTELKEIIKEWETNKTWLPKEKIDEVSKEAEKVKSWLDKNVAEQEKTSLWSKPVFTSTEVYAKVFTLQDKVTKVNKIPKPKPKIEKVTKTENTTKEEEQSKSSDEAAKEEESHDEL

SEQ ID NO: 752 - DNA, 1250 bp, Arabidopsis thaliana
  misc_feature (1)..(1250): Ceres Seq. ID no. 13490630
aacaagaacacagtaacgcaatcacagactccacagtccaaggagttttgcatactcaccaagccacaatcatttctctcttctctatctctctggttttgaatcggcgacgactgagtcaactcggtgttgttactggtttcgtcgtatgtgttgtaactgattaagttgatggatccgagtgggatgatgaacgaaggaggaccgtttaatctagcggagatctggcagtttccgttgaacggagtttcaaccgccggagattcttctagaagaagcttcgttggaccgaatcagttcggtgatgctgatctaaccacagctgctaacggtgatccagcgcgtatgagtcacgcgttgtctcaggcggttattgaaggtatctccggcgcttggaaacggagggaagatgagtctaagtcggcgaagatcgtctccaccattggcgctagtgaaggtgagaacaaaagacagaagatagatgaagtgtgtgatgggaaagcagaagcagaatcgctaggaacagagacggaacaaaagaagcaacagatggaaccaacgaaagattatattcatgttcgagctagaagaggtcaagctactgatagtcacagtttagctgaaagagcgagaagagagaaaataagtgagcggatgaaaatcttgcaagatcttgttccgggatgtaacaaggttattggaaaagcacttgttctagatgagataattaactatatacaatcattgcaacgtcaagttgagttcttatcgatgaagcttgaagcagtcaactcaagaatgaaccctggtatcgaggtttttccacccaaagagtttggtcagcaagcgtttgaaaatccggagatacagttcgggtcgcagtctacgagggaatacagtagaggagcatcaccagagtggttgcacatgcagataggatcaggtggtttcgaaagaacgtcttgataaagaaacaacacttggtcatcatcttactacaaataagatctaaaagctctaatatcccgagaagaaaaagcatacatacatataaatctcattctcattataggtttaaatatatggatgtgaatatacacatcatattgttgttctgaagaaagcaaaatagaaaagaagatatagttagtttcgacatcaagaaaaaacaagctgggaagggtttaaagtagaagaaacctcttgtaaaagaaaaaacgtttgttgttataaaattgtatctcattctt

SEQ ID NO: 753 - protein, 264 aa, Arabidopsis thaliana
  peptide (1)..(264): Ceres Seq. ID no. 13490631
  misc_feature (143)..(193): Pfam Name: Pfam Description:  Helix-loop-helix DNA-binding domain
  misc_feature (1)..(264): NCBI GI NO: 18406408 NR Description: bHLH protein [Arabidopsis thaliana]
  misc_feature (1)..(264): NCBI GI NO: 21592490 NR Description: unknown [Arabidopsis thaliana]
  misc_feature (7)..(247): NCBI GI NO: 25404871 NR Description: protein T30E16.21
  misc_feature (222)..(264): NCBI GI NO: 25404871 NR Description: protein T30E16.21
  misc_feature (1)..(247): NCBI GI NO: 25453562 NR Description: helix-loop-helix protein homolog
  misc_feature (1)..(247): NCBI GI NO: 30696324 NR Description: bHLH protein [Arabidopsis thaliana]
  misc_feature (1)..(264): NCBI GI NO: 33339703 NR Description: MYC1 [Catharanthus roseus]
  misc_feature (12)..(264): NCBI GI NO: 29150361 NR Description: hypothetical protein
  misc_feature (13)..(264): NCBI GI NO: 15241896 NR Description: bHLH protein family [Arabidopsis thaliana]
  misc_feature (93)..(238): NCBI GI NO: 15239013 NR Description: bHLH protein family [Arabidopsis thaliana]
MDPSGMMNEGGPFNLAEIWQFPLNGVSTAGDSSRRSFVGPNQFGDADLTTAANGDPARMSHALSQAVIEGISGAWKRREDESKSAKIVSTIGASEGENKRQKIDEVCDGKAEAESLGTETEQKKQQMEPTKDYIHVRARRGQATDSHSLAERARREKISERMKILQDLVPGCNKVIGKALVLDEIINYIQSLQRQVEFLSMKLEAVNSRMNPGIEVFPPKEFGQQAFENPEIQFGSQSTREYSRGASPEWLHMQIGSGGFERTS

SEQ ID NO: 754 - protein, 259 aa, Arabidopsis thaliana
  peptide (1)..(259): Ceres Seq. ID no. 13490632
  misc_feature (138)..(188): Pfam Name: Pfam Description:  Helix-loop-helix DNA-binding domain
  misc_feature (1)..(259): NCBI GI NO: 18406408 NR Description: bHLH protein [Arabidopsis thaliana]
  misc_feature (1)..(259): NCBI GI NO: 21592490 NR Description: unknown [Arabidopsis thaliana]
  misc_feature (2)..(242): NCBI GI NO: 25404871 NR Description: protein T30E16.21
  misc_feature (217)..(259): NCBI GI NO: 25404871 NR Description: protein T30E16.21
  misc_feature (1)..(242): NCBI GI NO: 25453562 NR Description: helix-loop-helix protein homolog
  misc_feature (1)..(242): NCBI GI NO: 30696324 NR Description: bHLH protein [Arabidopsis thaliana]
  misc_feature (1)..(259): NCBI GI NO: 33339703 NR Description: MYC1 [Catharanthus roseus]
  misc_feature (7)..(259): NCBI GI NO: 29150361 NR Description: hypothetical protein
  misc_feature (8)..(259): NCBI GI NO: 15241896 NR Description: bHLH protein family [Arabidopsis thaliana]
  misc_feature (88)..(233): NCBI GI NO: 15239013 NR Description: bHLH protein family [Arabidopsis thaliana]
MMNEGGPFNLAEIWQFPLNGVSTAGDSSRRSFVGPNQFGDADLTTAANGDPARMSHALSQAVIEGISGAWKRREDESKSAKIVSTIGASEGENKRQKIDEVCDGKAEAESLGTETEQKKQQMEPTKDYIHVRARRGQATDSHSLAERARREKISERMKILQDLVPGCNKVIGKALVLDEIINYIQSLQRQVEFLSMKLEAVNSRMNPGIEVFPPKEFGQQAFENPEIQFGSQSTREYSRGASPEWLHMQIGSGGFERTS

SEQ ID NO: 755 - protein, 258 aa, Arabidopsis thaliana
  peptide (1)..(258): Ceres Seq. ID no. 13490633
  misc_feature (137)..(187): Pfam Name: Pfam Description:  Helix-loop-helix DNA-binding domain
  misc_feature (1)..(258): NCBI GI NO: 18406408 NR Description: bHLH protein [Arabidopsis thaliana]
  misc_feature (1)..(258): NCBI GI NO: 21592490 NR Description: unknown [Arabidopsis thaliana]
  misc_feature (1)..(241): NCBI GI NO: 25404871 NR Description: protein T30E16.21
  misc_feature (216)..(258): NCBI GI NO: 25404871 NR Description: protein T30E16.21
  misc_feature (1)..(241): NCBI GI NO: 25453562 NR Description: helix-loop-helix protein homolog
  misc_feature (1)..(241): NCBI GI NO: 30696324 NR Description: bHLH protein [Arabidopsis thaliana]
  misc_feature (1)..(258): NCBI GI NO: 33339703 NR Description: MYC1 [Catharanthus roseus]
  misc_feature (6)..(258): NCBI GI NO: 29150361 NR Description: hypothetical protein
  misc_feature (7)..(258): NCBI GI NO: 15241896 NR Description: bHLH protein family [Arabidopsis thaliana]
  misc_feature (87)..(232): NCBI GI NO: 15239013 NR Description: bHLH protein family [Arabidopsis thaliana]
MNEGGPFNLAEIWQFPLNGVSTAGDSSRRSFVGPNQFGDADLTTAANGDPARMSHALSQAVIEGISGAWKRREDESKSAKIVSTIGASEGENKRQKIDEVCDGKAEAESLGTETEQKKQQMEPTKDYIHVRARRGQATDSHSLAERARREKISERMKILQDLVPGCNKVIGKALVLDEIINYIQSLQRQVEFLSMKLEAVNSRMNPGIEVFPPKEFGQQAFENPEIQFGSQSTREYSRGASPEWLHMQIGSGGFERTS

SEQ ID NO: 756 - DNA, 1090 bp, Arabidopsis thaliana
  misc_feature (1)..(1090): Ceres Seq. ID no. 13490166
cttcacaatcctcataatcactttcgaaattacatttacgctttcttgcaatcaaattttccgatcttaagttcagaagacgatgtcagaggtggaaatagagaacgctgctacgatcgaaggaaacaccgctgcggatgcgccggtgacggatgcggccgttgagaagaagcctgcagcgaaaggacgaaagacgaagaatgttaaggaagtgaaggagaagaagactgttgctgccgctccgaagaagagaactgtttcatctcatcctacttacgaagagatgattaaggatgcgattgttacgttgaaagagagaactggatctagccaatacgcgattcagaagttcatcgaggagaagcgtaaggagcttcctccaacattcagaaagctgttgcttctcaatctgaagagactcgttgcttctgggaagcttgtgaaggtcaaagcctcgtttaaactcccatcggcgtcggctaaagcatcatcccctaaggcggcagcggagaaatctgctcctgcgaagaagaaaccggcgactgtggcggttaccaaggcgaagagaaaggtcgctgcggcttccaaggctaagaaaacaatcgccgttaaacctaagactgctgctgctaagaaagtgaccgcgaaggctaaggctaagcccgttcctcgtgccactgctgctgcaactaagaggaaagctgttgatgcgaagcccaaggctaaggctagaccagccaaggcagccaaaacggccaaggttacatctccggctaagaaagctgttgctgccacgaagaaagttgctacggtggccacaaagaagaagactccggttaagaaggttgtgaagccaaagacggttaagtctccagcaaagagggcttcttctagggttaagaagtgaagttagggtttgtaggtagaagaatggttaacgatagtttagacttgtataattcaatcatctttatgcgactttgtttgcttttcttctttcagtgttcttgttattcacagttcctttggactaccccttaaatcatatatagatttcatcaatgaagcaaactcgagtttctttgcagct

SEQ ID NO: 757 - protein, 274 aa, Arabidopsis thaliana
  peptide (1)..(274): Ceres Seq. ID no. 13490167
  misc_feature (61)..(130): Pfam Name: Pfam Description:  linker histone H1 and H5 family
  misc_feature (1)..(274): NCBI GI NO: 15222199 NR Description: histone H1, putative [Arabidopsis thaliana]
  misc_feature (33)..(274): NCBI GI NO: 16314 NR Description: histone H1-1 [Arabidopsis thaliana]
  misc_feature (4)..(274): NCBI GI NO: 15224536 NR Description: histone H1 [Arabidopsis thaliana]
  misc_feature (25)..(271): NCBI GI NO: 1084419 NR Description: histone H1 - common tobacco
  misc_feature (22)..(269): NCBI GI NO: 121953 NR Description: HISTONE H1
  misc_feature (10)..(274): NCBI GI NO: 29469895 NR Description: histone H1 subtype 5 [Pisum sativum]
  misc_feature (25)..(271): NCBI GI NO: 6681423 NR Description: histone H1 [Nicotiana tabacum]
  misc_feature (10)..(274): NCBI GI NO: 28301619 NR Description: histone H1 [Pisum sativum]
  misc_feature (12)..(274): NCBI GI NO: 13540393 NR Description: histone H1 [Pisum sativum]
  misc_feature (1)..(271): NCBI GI NO: 2623960 NR Description: histone H1 [Apium graveolens]
MSEVEIENAATIEGNTAADAPVTDAAVEKKPAAKGRKTKNVKEVKEKKTVAAAPKKRTVSSHPTYEEMIKDAIVTLKERTGSSQYAIQKFIEEKRKELPPTFRKLLLLNLKRLVASGKLVKVKASFKLPSASAKASSPKAAAEKSAPAKKKPATVAVTKAKRKVAAASKAKKTIAVKPKTAAAKKVTAKAKAKPVPRATAAATKRKAVDAKPKAKARPAKAAKTAKVTSPAKKAVAATKKVATVATKKKTPVKKVVKPKTVKSPAKRASSRVKK

SEQ ID NO: 758 - protein, 207 aa, Arabidopsis thaliana
  peptide (1)..(207): Ceres Seq. ID no. 13490168
  misc_feature (1)..(63): Pfam Name: Pfam Description:  linker histone H1 and H5 family
  misc_feature (1)..(207): NCBI GI NO: 15222199 NR Description: histone H1, putative [Arabidopsis thaliana]
  misc_feature (1)..(207): NCBI GI NO: 16314 NR Description: histone H1-1 [Arabidopsis thaliana]
  misc_feature (1)..(207): NCBI GI NO: 15224536 NR Description: histone H1 [Arabidopsis thaliana]
  misc_feature (1)..(204): NCBI GI NO: 1084419 NR Description: histone H1 - common tobacco
  misc_feature (1)..(202): NCBI GI NO: 121953 NR Description: HISTONE H1
  misc_feature (1)..(207): NCBI GI NO: 29469895 NR Description: histone H1 subtype 5 [Pisum sativum]
  misc_feature (1)..(204): NCBI GI NO: 6681423 NR Description: histone H1 [Nicotiana tabacum]
  misc_feature (1)..(207): NCBI GI NO: 28301619 NR Description: histone H1 [Pisum sativum]
  misc_feature (1)..(207): NCBI GI NO: 13540393 NR Description: histone H1 [Pisum sativum]
  misc_feature (1)..(204): NCBI GI NO: 2623960 NR Description: histone H1 [Apium graveolens]
MIKDAIVTLKERTGSSQYAIQKFIEEKRKELPPTFRKLLLLNLKRLVASGKLVKVKASFKLPSASAKASSPKAAAEKSAPAKKKPATVAVTKAKRKVAAASKAKKTIAVKPKTAAAKKVTAKAKAKPVPRATAAATKRKAVDAKPKAKARPAKAAKTAKVTSPAKKAVAATKKVATVATKKKTPVKKVVKPKTVKSPAKRASSRVKK

SEQ ID NO: 759 - DNA, 1291 bp, Arabidopsis thaliana
  misc_feature (1)..(1291): Ceres Seq. ID no. 12337912
acatcttaaaaagtaaaaacacattcatctatccaacaaaaaaaaaaaaaaaaggagaaatggaaggaatcgatcatagaatggtgagtgtcaatggcataactatgcacattgccgagaaaggtcccaaagaaggacctgtggtgcttctcctccatggattccctgatctctggtacacgtggcgtcaccagattagtgggttatcatctctaggttaccgcgctgtagctccagacctccgaggctacggagactctgattcgccagagtctttctccgagtacacgtgtcttaacgtcgttggggacctcgtagctcttctggacagtgttgctggaaatcaagagaaggtgtttctggtcggtcatgattggggagccattatcggatggtttctctgtttgtttcgacctgaaaagattaacggctttgtgtgtttgagtgtgccgtatagatcaagaaaccctaaagtcaagcccgttcaagggttcaaggctgtatttggagatgattactacatttgtagatttcaggaaccggggaagattgaaggagagattgcaagtgcagatccaagaatatttctgaggaacctcttcacagggaggacactcggtccgccgattttacctaaggataatccctttggggaaaaacctaaccctaatagcgaaaacattgaattgcctgaatggttttctaagaaagatctcgatttctatgtctccaaattcgagaaggcaggatttaccggtggattgaactactacagagccatggatctgaattgggagctcactgcaccatggaccggagctaagattcaagttccagtgaagttcatgacaggtgacttcgacatggtttacaccacaccagggatgaaagagtacattcacggtggtggatttgctgcagatgttccaactcttcaagagatagtggtgattgaagatgctggtcacttcgttaaccaagagaaacctcaagaggtcactgctcacatcaatgacttcttcaccaagcttcgggacaacaacaaaagcttttagagttctcgtttggttctattatgttggctctcaaaacaagttggttcttgcatgtgttgtttcgacaagattttgaataagacttggcattatgaagctcaacgtgtgtaggaacaatcgattctggcgaaaatagttagaaggctggattgaagatttcaaaagaaaaccaattttttttatagatttcacaatgattttataagcaaactaaatgaaccagaaataaccaagtg

SEQ ID NO: 760 - protein, 350 aa, Arabidopsis thaliana
  peptide (1)..(350): Ceres Seq. ID no. 12337913
  misc_feature (73)..(338): Pfam Name: Pfam Description:  alpha/beta hydrolase fold
  misc_feature (20)..(350): NCBI GI NO: 15230018 NR Description: putative epoxide hydrolase; protein id: At3g05600
  misc_feature (1)..(342): NCBI GI NO: 7488671 NR Description: epoxide hydrolase homolog - soybean
  misc_feature (1)..(342): NCBI GI NO: 2764806 NR Description: epoxide hydrolase [Glycine max]
  misc_feature (20)..(344): NCBI GI NO: 18411917 NR Description: coded for by A
  misc_feature (23)..(342): NCBI GI NO: 15225781 NR Description: epoxide hydrolase (ATsEH); protein id: At2g26740
  misc_feature (20)..(342): NCBI GI NO: 7489254 NR Description: probable epoxide hydrolase (EC 3
  misc_feature (20)..(342): NCBI GI NO: 407942 NR Description: epoxide hydrolase
  misc_feature (20)..(342): NCBI GI NO: 7489255 NR Description: probable epoxide hydrolase (EC 3
  misc_feature (23)..(342): NCBI GI NO: 22208300 NR Description: soluble epoxide hydrolase [Brassica napus]
  misc_feature (20)..(342): NCBI GI NO: 27960680 NR Description: soluble epoxide hydrolase [Euphorbia lagascae]
ILKSKNTFIYPTKKKKKGEMEGIDHRMVSVNGITMHIAEKGPKEGPVVLLLHGFPDLWYTWRHQISGLSSLGYRAVAPDLRGYGDSDSPESFSEYTCLNVVGDLVALLDSVAGNQEKVFLVGHDWGAIIGWFLCLFRPEKINGFVCLSVPYRSRNPKVKPVQGFKAVFGDDYYICRFQEPGKIEGEIASADPRIFLRNLFTGRTLGPPILPKDNPFGEKPNPNSENIELPEWFSKKDLDFYVSKFEKAGFTGGLNYYRAMDLNWELTAPWTGAKIQVPVKFMTGDFDMVYTTPGMKEYIHGGGFAADVPTLQEIVVIEDAGHFVNQEKPQEVTAHINDFFTKLRDNNKSF

SEQ ID NO: 761 - protein, 331 aa, Arabidopsis thaliana
  peptide (1)..(331): Ceres Seq. ID no. 12337914
  misc_feature (54)..(319): Pfam Name: Pfam Description:  alpha/beta hydrolase fold
  misc_feature (1)..(331): NCBI GI NO: 15230018 NR Description: putative epoxide hydrolase; protein id: At3g05600
  misc_feature (1)..(323): NCBI GI NO: 7488671 NR Description: epoxide hydrolase homolog - soybean
  misc_feature (1)..(323): NCBI GI NO: 2764806 NR Description: epoxide hydrolase [Glycine max]
  misc_feature (1)..(325): NCBI GI NO: 18411917 NR Description: coded for by A
  misc_feature (4)..(323): NCBI GI NO: 15225781 NR Description: epoxide hydrolase (ATsEH); protein id: At2g26740
  misc_feature (1)..(323): NCBI GI NO: 7489254 NR Description: probable epoxide hydrolase (EC 3
  misc_feature (1)..(323): NCBI GI NO: 407942 NR Description: epoxide hydrolase
  misc_feature (1)..(323): NCBI GI NO: 7489255 NR Description: probable epoxide hydrolase (EC 3
  misc_feature (4)..(323): NCBI GI NO: 22208300 NR Description: soluble epoxide hydrolase [Brassica napus]
  misc_feature (1)..(323): NCBI GI NO: 27960680 NR Description: soluble epoxide hydrolase [Euphorbia lagascae]
MEGIDHRMVSVNGITMHIAEKGPKEGPVVLLLHGFPDLWYTWRHQISGLSSLGYRAVAPDLRGYGDSDSPESFSEYTCLNVVGDLVALLDSVAGNQEKVFLVGHDWGAIIGWFLCLFRPEKINGFVCLSVPYRSRNPKVKPVQGFKAVFGDDYYICRFQEPGKIEGEIASADPRIFLRNLFTGRTLGPPILPKDNPFGEKPNPNSENIELPEWFSKKDLDFYVSKFEKAGFTGGLNYYRAMDLNWELTAPWTGAKIQVPVKFMTGDFDMVYTTPGMKEYIHGGGFAADVPTLQEIVVIEDAGHFVNQEKPQEVTAHINDFFTKLRDNNKSF

SEQ ID NO: 762 - protein, 324 aa, Arabidopsis thaliana
  peptide (1)..(324): Ceres Seq. ID no. 12337915
  misc_feature (47)..(312): Pfam Name: Pfam Description:  alpha/beta hydrolase fold
  misc_feature (1)..(324): NCBI GI NO: 15230018 NR Description: putative epoxide hydrolase; protein id: At3g05600
  misc_feature (1)..(316): NCBI GI NO: 7488671 NR Description: epoxide hydrolase homolog - soybean
  misc_feature (1)..(316): NCBI GI NO: 2764806 NR Description: epoxide hydrolase [Glycine max]
  misc_feature (1)..(318): NCBI GI NO: 18411917 NR Description: coded for by A
  misc_feature (1)..(316): NCBI GI NO: 15225781 NR Description: epoxide hydrolase (ATsEH); protein id: At2g26740
  misc_feature (1)..(316): NCBI GI NO: 7489254 NR Description: probable epoxide hydrolase (EC 3
  misc_feature (1)..(316): NCBI GI NO: 407942 NR Description: epoxide hydrolase
  misc_feature (1)..(316): NCBI GI NO: 7489255 NR Description: probable epoxide hydrolase (EC 3
  misc_feature (1)..(316): NCBI GI NO: 22208300 NR Description: soluble epoxide hydrolase [Brassica napus]
  misc_feature (1)..(316): NCBI GI NO: 27960680 NR Description: soluble epoxide hydrolase [Euphorbia lagascae]
MVSVNGITMHIAEKGPKEGPVVLLLHGFPDLWYTWRHQISGLSSLGYRAVAPDLRGYGDSDSPESFSEYTCLNVVGDLVALLDSVAGNQEKVFLVGHDWGAIIGWFLCLFRPEKINGFVCLSVPYRSRNPKVKPVQGFKAVFGDDYYICRFQEPGKIEGEIASADPRIFLRNLFTGRTLGPPILPKDNPFGEKPNPNSENIELPEWFSKKDLDFYVSKFEKAGFTGGLNYYRAMDLNWELTAPWTGAKIQVPVKFMTGDFDMVYTTPGMKEYIHGGGFAADVPTLQEIVVIEDAGHFVNQEKPQEVTAHINDFFTKLRDNNKSF

SEQ ID NO: 763 - DNA, 1918 bp, Arabidopsis thaliana
  misc_feature (1)..(1918): Ceres Seq. ID no. 13487554
acactgtgagattcaagtgtaaagtgctctctccccaatggctaatcaccaccgacttttacgcggcggcggatctccggccataatcggtggcagaatcacactcacagctttcgcttccactatcgcactcttcctcttcactctctccttcttcttcgcttcagattctaacgattctcctgatctccttcttcccggtgttgagtactctaatggagtcggatctagaagatccatgttggatatcaaatcggatccgcttaagccacggttgattcagatccggaaacaagctgatgatcatcggtcattagcattagcttatgcttcttacgcgagaaagcttaagctcgagaattcgaaactcgtcaggatcttcgctgatctttcgaggaattacacggatctgattaacaaaccgacgtatcgagctttgtatgattctgatggagcctcgattgaagaatctgtgcttaggcaatttgagaaagaagttaaggaacggattaaaatgactcgtcaagtgattgctgaagctaaagagtcttttgataatcagttgaagattcagaagctgaaagatacgattttcgctgttaacgaacagttaactaatgctaagaagcaaggtgcgttttcgagtttgatcgctgcgaaatcgattccgaaaggattgcattgtcttgctatgaggctgatggaagagaggattgctcaccctgagaagtatactgatgaagggaaagatagaccgcgggagctcgaggatccgaatctttaccattacgctatattttcggataatgtgattgcggcttcggtggttgtgaactctgctgtgaagaatgctaaggagccgtggaagcatgtttttcacgttgtgactgataagatgaatcttggagctatgcaggttatgtttaaactgaaggagtataaaggagctcatgtagaagttaaagctgttgaggattatacgtttttgaactcttcgtatgtgcctgtgttgaagcagttagaatctgcgaatcttcagaagttttatttcgagaataagctcgagaatgcgacgaaagataccacgaatatgaagttcaggaaccccaagtatttatctatattgaatcacttgaggttttatttacccgagatgtacccgaaactacataggatactgtttttggacgatgatgtggttgtgcagaaggatttaacgggtctgtgggagattgatatggatgggaaagtgaatggagctgtagagacttgttttgggtcgtttcatcggtacgctcaatacatgaatttctcacatcctttgatcaaagagaagtttaatcccaaagcatgtgcgtgggcgtatggaatgaacttctttgatcttgatgcttggagaagagagaagtgcacagaagaatatcactactggcaaaatctgaacgagaacagggctctatggaaactggggacgttaccaccgggactgatcaccttttactcaaccacaaagccgctggacaaatcatggcatgtgcttgggctgggttacaatccgagcattagcatggatgagatccgcaacgctgcagtggtacacttcaacggtaacatgaagccatggcttgacatagctatgaaccagtttcgaccactttggaccaaacacgtcgactatgacctcgagtttgttcaggcttgcaattttggcctctgaactatgaaaattttctttatcatcaaaatctgaaagcatatgttgtttgttacttcagctctacgaagttttaaccttagtttttgtttgtgtttatttatatatttttgggggtttagtagaacacttgtattttgttcatagctatctttgttctatggcaacctataatcaaagcttaattataaagtcacattatgc

SEQ ID NO: 764 - protein, 559 aa, Arabidopsis thaliana
  peptide (1)..(559): Ceres Seq. ID no. 13487555
  misc_feature (1)..(559): NCBI GI NO: 15230806 NR Description: glycosyltransferase family 8
  misc_feature (9)..(559): NCBI GI NO: 18396159 NR Description: glycosyltransferase family 8
  misc_feature (111)..(556): NCBI GI NO: 15233046 NR Description: glycosyltransferase family 8
  misc_feature (97)..(555): NCBI GI NO: 7271113 NR Description: 68 kDa protein [Cicer arietinum]
  misc_feature (152)..(556): NCBI GI NO: 10177914 NR Description: emb|CAB71043
  misc_feature (152)..(556): NCBI GI NO: 18422837 NR Description: glycosyltransferase family 8
  misc_feature (152)..(556): NCBI GI NO: 38423965 NR Description: putative glycosyltransferase
  misc_feature (56)..(556): NCBI GI NO: 7485958 NR Description: hypothetical protein F22I13
  misc_feature (56)..(556): NCBI GI NO: 30691875 NR Description: glycosyltransferase family 8
  misc_feature (149)..(555): NCBI GI NO: 37533460 NR Description: hypothetical protein
MANHHRLLRGGGSPAIIGGRITLTAFASTIALFLFTLSFFFASDSNDSPDLLLPGVEYSNGVGSRRSMLDIKSDPLKPRLIQIRKQADDHRSLALAYASYARKLKLENSKLVRIFADLSRNYTDLINKPTYRALYDSDGASIEESVLRQFEKEVKERIKMTRQVIAEAKESFDNQLKIQKLKDTIFAVNEQLTNAKKQGAFSSLIAAKSIPKGLHCLAMRLMEERIAHPEKYTDEGKDRPRELEDPNLYHYAIFSDNVIAASVVVNSAVKNAKEPWKHVFHVVTDKMNLGAMQVMFKLKEYKGAHVEVKAVEDYTFLNSSYVPVLKQLESANLQKFYFENKLENATKDTTNMKFRNPKYLSILNHLRFYLPEMYPKLHRILFLDDDVVVQKDLTGLWEIDMDGKVNGAVETCFGSFHRYAQYMNFSHPLIKEKFNPKACAWAYGMNFFDLDAWRREKCTEEYHYWQNLNENRALWKLGTLPPGLITFYSTTKPLDKSWHVLGLGYNPSISMDEIRNAAVVHFNGNMKPWLDIAMNQFRPLWTKHVDYDLEFVQACNFGL

SEQ ID NO: 765 - protein, 492 aa, Arabidopsis thaliana
  peptide (1)..(492): Ceres Seq. ID no. 13487556
  misc_feature (1)..(492): NCBI GI NO: 15230806 NR Description: glycosyltransferase family 8
  misc_feature (1)..(492): NCBI GI NO: 18396159 NR Description: glycosyltransferase family 8
  misc_feature (44)..(489): NCBI GI NO: 15233046 NR Description: glycosyltransferase family 8
  misc_feature (30)..(488): NCBI GI NO: 7271113 NR Description: 68 kDa protein [Cicer arietinum]
  misc_feature (85)..(489): NCBI GI NO: 10177914 NR Description: emb|CAB71043
  misc_feature (85)..(489): NCBI GI NO: 18422837 NR Description: glycosyltransferase family 8
  misc_feature (85)..(489): NCBI GI NO: 38423965 NR Description: putative glycosyltransferase
  misc_feature (1)..(489): NCBI GI NO: 7485958 NR Description: hypothetical protein F22I13
  misc_feature (1)..(489): NCBI GI NO: 30691875 NR Description: glycosyltransferase family 8
  misc_feature (82)..(488): NCBI GI NO: 37533460 NR Description: hypothetical protein
MLDIKSDPLKPRLIQIRKQADDHRSLALAYASYARKLKLENSKLVRIFADLSRNYTDLINKPTYRALYDSDGASIEESVLRQFEKEVKERIKMTRQVIAEAKESFDNQLKIQKLKDTIFAVNEQLTNAKKQGAFSSLIAAKSIPKGLHCLAMRLMEERIAHPEKYTDEGKDRPRELEDPNLYHYAIFSDNVIAASVVVNSAVKNAKEPWKHVFHVVTDKMNLGAMQVMFKLKEYKGAHVEVKAVEDYTFLNSSYVPVLKQLESANLQKFYFENKLENATKDTTNMKFRNPKYLSILNHLRFYLPEMYPKLHRILFLDDDVVVQKDLTGLWEIDMDGKVNGAVETCFGSFHRYAQYMNFSHPLIKEKFNPKACAWAYGMNFFDLDAWRREKCTEEYHYWQNLNENRALWKLGTLPPGLITFYSTTKPLDKSWHVLGLGYNPSISMDEIRNAAVVHFNGNMKPWLDIAMNQFRPLWTKHVDYDLEFVQACNFGL

SEQ ID NO: 766 - protein, 400 aa, Arabidopsis thaliana
  peptide (1)..(400): Ceres Seq. ID no. 13487557
  misc_feature (1)..(400): NCBI GI NO: 15230806 NR Description: glycosyltransferase family 8
  misc_feature (1)..(400): NCBI GI NO: 18396159 NR Description: glycosyltransferase family 8
  misc_feature (1)..(397): NCBI GI NO: 15233046 NR Description: glycosyltransferase family 8
  misc_feature (1)..(396): NCBI GI NO: 7271113 NR Description: 68 kDa protein [Cicer arietinum]
  misc_feature (1)..(397): NCBI GI NO: 10177914 NR Description: emb|CAB71043
  misc_feature (1)..(397): NCBI GI NO: 18422837 NR Description: glycosyltransferase family 8
  misc_feature (1)..(397): NCBI GI NO: 38423965 NR Description: putative glycosyltransferase
  misc_feature (1)..(397): NCBI GI NO: 7485958 NR Description: hypothetical protein F22I13
  misc_feature (1)..(397): NCBI GI NO: 30691875 NR Description: glycosyltransferase family 8
  misc_feature (1)..(396): NCBI GI NO: 37533460 NR Description: hypothetical protein
MTRQVIAEAKESFDNQLKIQKLKDTIFAVNEQLTNAKKQGAFSSLIAAKSIPKGLHCLAMRLMEERIAHPEKYTDEGKDRPRELEDPNLYHYAIFSDNVIAASVVVNSAVKNAKEPWKHVFHVVTDKMNLGAMQVMFKLKEYKGAHVEVKAVEDYTFLNSSYVPVLKQLESANLQKFYFENKLENATKDTTNMKFRNPKYLSILNHLRFYLPEMYPKLHRILFLDDDVVVQKDLTGLWEIDMDGKVNGAVETCFGSFHRYAQYMNFSHPLIKEKFNPKACAWAYGMNFFDLDAWRREKCTEEYHYWQNLNENRALWKLGTLPPGLITFYSTTKPLDKSWHVLGLGYNPSISMDEIRNAAVVHFNGNMKPWLDIAMNQFRPLWTKHVDYDLEFVQACNFGL

SEQ ID NO: 767 - DNA, 1525 bp, Arabidopsis thaliana
  misc_feature (1)..(1525): Ceres Seq. ID no. 12481850
aattctttgtaataaatatcttcaattcgtaaatgtcttggcctttgtcgttttcaaacttcaacatcagcatcacgtgattggctaatacaaataaaattttctctttattttattattttgccacaagccgtgaaaagatggagaaaatgaatgtccgttttatgattgtgttgatggtaatgtctctggttctgggtttttcgtcggcagttgatttcagatggaggaaaactgcaggattctcagatagattcaccagagctgtttcttcagtcgtgttcccagttcatggcaacgtttatcctcttgggtactataatgtaaccatcaacataggacaaccaccaagaccttattatcttgatcttgatactggtagtgatctcacttggctccaatgtgatgctccttgtgttcgttgcttggaggcgcctcatccactgtatcagcctagtagtgatcttattccttgcaatgatccactgtgtaaggctttgcatttgaatagtaatcagagatgtgagactccagagcaatgtgactatgaggttgagtatgctgatggaggatcttctctcggtgttcttgttagagatgtcttctctatgaactatacacagggtctccggctcactccccgtcttgctctaggttgtggatacgatcaaatcccaggggcttcgagtcatcatcctctagatggagtattagggcttggtagggggaaagtaagcattctgtcacagcttcatagccaaggttatgtaaagaatgttatcggtcattgcctaagcagtttaggtggaggaattctcttttttggcgacgatctttatgattcttcaagagtctcatggacaccaatgtctcgtgaatactcaaaacactactctcctgcaatgggaggggaacttctattcgggggaagaacaacaggattgaagaatctattaacagtatttgacagtggaagttcttacacatacttcaattccaaggcataccaagccgtaacatatttgctaaagagagaactaagcggaaaaccgttgaaagaagcacgggatgaccacacgctgcctctatgctggcaaggacgtagaccattcatgagcattgaagaagtcaagaagtatttcaagcctctagctcttagcttcaaaacaggctggagatcaaaaactctgtttgagatacccccagaagcttatctaatcatttctatgaaggggaatgtatgtttgggaatcttgaatggcacagaaataggtctccagaacctaaacctcatcggcgatatatcgatgcaagatcagatgataatctacgataacgagaaacaatcaatcgggtggatgccagtggattgcgatgaacttgcttcactaaaagcagctcaagtatatgaatactgagaatgttatatatagttgggacaagcaagagctcatagttgtaattagatatttgtatgtactgattggatcaaatcctatgacaattgagttacatgatgatactt

SEQ ID NO: 768 - protein, 425 aa, Arabidopsis thaliana
  peptide (1)..(425): Ceres Seq. ID no. 12481851
  misc_feature (42)..(363): Pfam Name: Pfam Description:  Eukaryotic aspartyl protease
  misc_feature (1)..(425): NCBI GI NO: 18418224 NR Description: nucellin -like protein; protein id: At4g33490
  misc_feature (13)..(425): NCBI GI NO: 26452545 NR Description: putative nucellin [Arabidopsis thaliana]
  misc_feature (42)..(363): NCBI GI NO: 7484812 NR Description: aspartic proteinase homolog F17M5
  misc_feature (345)..(425): NCBI GI NO: 7484812 NR Description: aspartic proteinase homolog F17M5
  misc_feature (1)..(25): NCBI GI NO: 7484812 NR Description: aspartic proteinase homolog F17M5
  misc_feature (31)..(414): NCBI GI NO: 15219354 NR Description: nucellin, putative; protein id: At1g44130.1
  misc_feature (1)..(417): NCBI GI NO: 30699261 NR Description: nucellin protein, putative [Arabidopsis thaliana]
  misc_feature (1)..(414): NCBI GI NO: 30699263 NR Description: nucellin protein, putative [Arabidopsis thaliana]
  misc_feature (1)..(414): NCBI GI NO: 25350204 NR Description: nucellin-like protein, 27671-25467
  misc_feature (66)..(415): NCBI GI NO: 21805926 NR Description: nucellin-like aspartic protease [Zea mays]
MEKMNVRFMIVLMVMSLVLGFSSAVDFRWRKTAGFSDRFTRAVSSVVFPVHGNVYPLGYYNVTINIGQPPRPYYLDLDTGSDLTWLQCDAPCVRCLEAPHPLYQPSSDLIPCNDPLCKALHLNSNQRCETPEQCDYEVEYADGGSSLGVLVRDVFSMNYTQGLRLTPRLALGCGYDQIPGASSHHPLDGVLGLGRGKVSILSQLHSQGYVKNVIGHCLSSLGGGILFFGDDLYDSSRVSWTPMSREYSKHYSPAMGGELLFGGRTTGLKNLLTVFDSGSSYTYFNSKAYQAVTYLLKRELSGKPLKEARDDHTLPLCWQGRRPFMSIEEVKKYFKPLALSFKTGWRSKTLFEIPPEAYLIISMKGNVCLGILNGTEIGLQNLNLIGDISMQDQMIIYDNEKQSIGWMPVDCDELASLKAAQVYEY

SEQ ID NO: 769 - protein, 422 aa, Arabidopsis thaliana
  peptide (1)..(422): Ceres Seq. ID no. 12481852
  misc_feature (39)..(360): Pfam Name: Pfam Description:  Eukaryotic aspartyl protease
  misc_feature (1)..(422): NCBI GI NO: 18418224 NR Description: nucellin -like protein; protein id: At4g33490
  misc_feature (10)..(422): NCBI GI NO: 26452545 NR Description: putative nucellin [Arabidopsis thaliana]
  misc_feature (39)..(360): NCBI GI NO: 7484812 NR Description: aspartic proteinase homolog F17M5
  misc_feature (342)..(422): NCBI GI NO: 7484812 NR Description: aspartic proteinase homolog F17M5
  misc_feature (1)..(22): NCBI GI NO: 7484812 NR Description: aspartic proteinase homolog F17M5
  misc_feature (28)..(411): NCBI GI NO: 15219354 NR Description: nucellin, putative; protein id: At1g44130.1
  misc_feature (1)..(414): NCBI GI NO: 30699261 NR Description: nucellin protein, putative [Arabidopsis thaliana]
  misc_feature (1)..(411): NCBI GI NO: 30699263 NR Description: nucellin protein, putative [Arabidopsis thaliana]
  misc_feature (1)..(411): NCBI GI NO: 25350204 NR Description: nucellin-like protein, 27671-25467
  misc_feature (63)..(412): NCBI GI NO: 21805926 NR Description: nucellin-like aspartic protease [Zea mays]
MNVRFMIVLMVMSLVLGFSSAVDFRWRKTAGFSDRFTRAVSSVVFPVHGNVYPLGYYNVTINIGQPPRPYYLDLDTGSDLTWLQCDAPCVRCLEAPHPLYQPSSDLIPCNDPLCKALHLNSNQRCETPEQCDYEVEYADGGSSLGVLVRDVFSMNYTQGLRLTPRLALGCGYDQIPGASSHHPLDGVLGLGRGKVSILSQLHSQGYVKNVIGHCLSSLGGGILFFGDDLYDSSRVSWTPMSREYSKHYSPAMGGELLFGGRTTGLKNLLTVFDSGSSYTYFNSKAYQAVTYLLKRELSGKPLKEARDDHTLPLCWQGRRPFMSIEEVKKYFKPLALSFKTGWRSKTLFEIPPEAYLIISMKGNVCLGILNGTEIGLQNLNLIGDISMQDQMIIYDNEKQSIGWMPVDCDELASLKAAQVYEY

SEQ ID NO: 770 - protein, 417 aa, Arabidopsis thaliana
  peptide (1)..(417): Ceres Seq. ID no. 12481853
  misc_feature (34)..(355): Pfam Name: Pfam Description:  Eukaryotic aspartyl protease
  misc_feature (1)..(417): NCBI GI NO: 18418224 NR Description: nucellin -like protein; protein id: At4g33490
  misc_feature (5)..(417): NCBI GI NO: 26452545 NR Description: putative nucellin [Arabidopsis thaliana]
  misc_feature (34)..(355): NCBI GI NO: 7484812 NR Description: aspartic proteinase homolog F17M5
  misc_feature (337)..(417): NCBI GI NO: 7484812 NR Description: aspartic proteinase homolog F17M5
  misc_feature (1)..(17): NCBI GI NO: 7484812 NR Description: aspartic proteinase homolog F17M5
  misc_feature (23)..(406): NCBI GI NO: 15219354 NR Description: nucellin, putative; protein id: At1g44130.1
  misc_feature (1)..(409): NCBI GI NO: 30699261 NR Description: nucellin protein, putative [Arabidopsis thaliana]
  misc_feature (1)..(406): NCBI GI NO: 30699263 NR Description: nucellin protein, putative [Arabidopsis thaliana]
  misc_feature (1)..(406): NCBI GI NO: 25350204 NR Description: nucellin-like protein, 27671-25467
  misc_feature (58)..(407): NCBI GI NO: 21805926 NR Description: nucellin-like aspartic protease [Zea mays]
MIVLMVMSLVLGFSSAVDFRWRKTAGFSDRFTRAVSSVVFPVHGNVYPLGYYNVTINIGQPPRPYYLDLDTGSDLTWLQCDAPCVRCLEAPHPLYQPSSDLIPCNDPLCKALHLNSNQRCETPEQCDYEVEYADGGSSLGVLVRDVFSMNYTQGLRLTPRLALGCGYDQIPGASSHHPLDGVLGLGRGKVSILSQLHSQGYVKNVIGHCLSSLGGGILFFGDDLYDSSRVSWTPMSREYSKHYSPAMGGELLFGGRTTGLKNLLTVFDSGSSYTYFNSKAYQAVTYLLKRELSGKPLKEARDDHTLPLCWQGRRPFMSIEEVKKYFKPLALSFKTGWRSKTLFEIPPEAYLIISMKGNVCLGILNGTEIGLQNLNLIGDISMQDQMIIYDNEKQSIGWMPVDCDELASLKAAQVYEY

SEQ ID NO: 771 - DNA, 1873 bp, Arabidopsis thaliana
  misc_feature (1)..(1873): Ceres Seq. ID no. 12370436
acatcaaaaccgcctccatttctcattctctctctctctaaaaaaccaaatccagagtcagagaaaatctgtgatggctctttccaacgcctcctctctctccaccagatctatctacggcggtgatctttctcaccgtccaagcaaccgtcaatcatccttcacatttcatccggccgtcaacaccaagcctaaatccgctaacctcgtcacggcggtacacgcggctgagccagctagaaacgctgtttcagtcaaggaatccgttgcgtcttcttcgtctggtgcattgaaatggactccagagagctggaaactgaagaaggctctgcaacttcctgattatcctaacgccaatgagcttgagtctgtgcttaaaacgatagaggcttttcctccgattgttttcgccggagaagctaggaatcttgaagagagattggctgatgctgctgttggtaaagcttttcttctccaaggaggtgattgtgctgagagtttcaaggagttcaatgctactaatatcagagacaccttcagggttctgcttcagatgagtattgttcttacattcggtggccaggttccggtcattaaggttgggaggatggctggtcaatttgcaaagcctagatctgatgcatttgaggagaaggatggagtgaaattaccaagctacaagggagataacatcaatggtgatacttttgatgagaaatccaggattcctgatcctaataggatgattcgagcttacactcaatctgcagctactttgaatcttcttagagcctttgccactggaggttacgctgctattcaaagagttactcaatggaaccttgattttgttgaacaaagtgagcaagctgacaggtaccaggaattagctaatagggttgatgaggccttggggttcatgtctgcatgtggacttggcacggatcatccacttatgactacaactgatttctacacatcccatgagtgtttgcttctgccttatgaacagtcccttacaaggttggattcaacttctggtctctactatgattgttctgcacacatggtctggtgcggagagcgtaccagacaattggatggcgctcatgtcgagtttctcagggggattgctaatcctctgggcattaaggtgagcaacaaaatggatcccaatgagctggttaagctagtagaaatcctgaatcctaataacaagcctggaagaatcactgtaattgtgagaatgggtgctgagaacatgagagttaagcttccccacctgatcagagcagtccgcagatcaggccagattgtgacatgggtctgcgatccaatgcatggaaacaccatcaaagcaccttgcggtcttaaaacacgtgcctttgactcaatactggctgaagtccgagcattccttgatgtgcacgagcaagaaggaagccacgcgggcggtatccatctcgagatgacaggtcagaacgtgacagaatgcattggagggtcccgcactgtgacctacgatgacctcagttctcgctaccacacacactgtgacccaaggctgaacgcgtcacagtctcttgaacttgccttcattgttgcagaacggctcaggaagagaagaacgggtagccagcgtgtgtcttgagtccggttcttcccttttatacactttttgattccaaacaactcttttctctttgtcctgtgactgtgagttggtgtctttatgacctaagttaaaagccccaaaagcctctctaggaggagtaaacctgtttctgctgtggacagaccatgtcatgtcattgttctttatgttaactttaatgtcaaaccgtgtcacttacactagtgtatatttcttttc

SEQ ID NO: 772 - protein, 549 aa, Arabidopsis thaliana
  peptide (1)..(549): Ceres Seq. ID no. 12370437
  misc_feature (98)..(535): Pfam Name: Pfam Description:  Class-II DAHP synthetase family
  misc_feature (25)..(549): NCBI GI NO: 15236093 NR Description: 2-dehydro-3-deoxyphosphoheptonate aldolase
  misc_feature (25)..(549): NCBI GI NO: 166688 NR Description: 3-deoxy-D-arabino-heptulosonate y-phosphate synthase
  misc_feature (25)..(549): NCBI GI NO: 99742 NR Description: 2-dehydro-3-deoxy-phosphoheptonate aldolase (EC 4
  misc_feature (25)..(547): NCBI GI NO: 2546988 NR Description: 2-dehydro-3-deoxyphosphoheptonate aldolase
  misc_feature (25)..(548): NCBI GI NO: 584779 NR Description: Phospho-2-dehydro-3-deoxyheptonate aldolase 2
  misc_feature (25)..(548): NCBI GI NO: 584776 NR Description: Phospho-2-dehydro-3-deoxyheptonate aldolase 1
  misc_feature (25)..(547): NCBI GI NO: 15219878 NR Description: 3-deoxy-D-arabino-heptulosonate 7-phosphate
  misc_feature (25)..(547): NCBI GI NO: 2398679 NR Description: 3-deoxy-D-arabino-heptulosonate 7-phosphate synthase
  misc_feature (25)..(548): NCBI GI NO: 114193 NR Description: Phospho-2-dehydro-3-deoxyheptonate aldolase 1
  misc_feature (3)..(548): NCBI GI NO: 7488957 NR Description: probable 2-dehydro-3-deoxy-phosphoheptonate aldolase
HQNRLHFSFSLSLKNQIQSQRKSVMALSNASSLSTRSIYGGDLSHRPSNRQSSFTFHPAVNTKPKSANLVTAVHAAEPARNAVSVKESVASSSSGALKWTPESWKLKKALQLPDYPNANELESVLKTIEAFPPIVFAGEARNLEERLADAAVGKAFLLQGGDCAESFKEFNATNIRDTFRVLLQMSIVLTFGGQVPVIKVGRMAGQFAKPRSDAFEEKDGVKLPSYKGDNINGDTFDEKSRIPDPNRMIRAYTQSAATLNLLRAFATGGYAAIQRVTQWNLDFVEQSEQADRYQELANRVDEALGFMSACGLGTDHPLMTTTDFYTSHECLLLPYEQSLTRLDSTSGLYYDCSAHMVWCGERTRQLDGAHVEFLRGIANPLGIKVSNKMDPNELVKLVEILNPNNKPGRITVIVRMGAENMRVKLPHLIRAVRRSGQIVTWVCDPMHGNTIKAPCGLKTRAFDSILAEVRAFLDVHEQEGSHAGGIHLEMTGQNVTECIGGSRTVTYDDLSSRYHTHCDPRLNASQSLELAFIVAERLRKRRTGSQRVS

SEQ ID NO: 773 - protein, 525 aa, Arabidopsis thaliana
  peptide (1)..(525): Ceres Seq. ID no. 12370438
  misc_feature (74)..(511): Pfam Name: Pfam Description:  Class-II DAHP synthetase family
  misc_feature (1)..(525): NCBI GI NO: 15236093 NR Description: 2-dehydro-3-deoxyphosphoheptonate aldolase
  misc_feature (1)..(525): NCBI GI NO: 166688 NR Description: 3-deoxy-D-arabino-heptulosonate y-phosphate synthase
  misc_feature (1)..(525): NCBI GI NO: 99742 NR Description: 2-dehydro-3-deoxy-phosphoheptonate aldolase (EC 4
  misc_feature (1)..(523): NCBI GI NO: 2546988 NR Description: 2-dehydro-3-deoxyphosphoheptonate aldolase
  misc_feature (1)..(524): NCBI GI NO: 584779 NR Description: Phospho-2-dehydro-3-deoxyheptonate aldolase 2
  misc_feature (1)..(524): NCBI GI NO: 584776 NR Description: Phospho-2-dehydro-3-deoxyheptonate aldolase 1
  misc_feature (1)..(523): NCBI GI NO: 15219878 NR Description: 3-deoxy-D-arabino-heptulosonate 7-phosphate
  misc_feature (1)..(523): NCBI GI NO: 2398679 NR Description: 3-deoxy-D-arabino-heptulosonate 7-phosphate synthase
  misc_feature (1)..(524): NCBI GI NO: 114193 NR Description: Phospho-2-dehydro-3-deoxyheptonate aldolase 1
  misc_feature (1)..(524): NCBI GI NO: 7488957 NR Description: probable 2-dehydro-3-deoxy-phosphoheptonate aldolase
MALSNASSLSTRSIYGGDLSHRPSNRQSSFTFHPAVNTKPKSANLVTAVHAAEPARNAVSVKESVASSSSGALKWTPESWKLKKALQLPDYPNANELESVLKTIEAFPPIVFAGEARNLEERLADAAVGKAFLLQGGDCAESFKEFNATNIRDTFRVLLQMSIVLTFGGQVPVIKVGRMAGQFAKPRSDAFEEKDGVKLPSYKGDNINGDTFDEKSRIPDPNRMIRAYTQSAATLNLLRAFATGGYAAIQRVTQWNLDFVEQSEQADRYQELANRVDEALGFMSACGLGTDHPLMTTTDFYTSHECLLLPYEQSLTRLDSTSGLYYDCSAHMVWCGERTRQLDGAHVEFLRGIANPLGIKVSNKMDPNELVKLVEILNPNNKPGRITVIVRMGAENMRVKLPHLIRAVRRSGQIVTWVCDPMHGNTIKAPCGLKTRAFDSILAEVRAFLDVHEQEGSHAGGIHLEMTGQNVTECIGGSRTVTYDDLSSRYHTHCDPRLNASQSLELAFIVAERLRKRRTGSQRVS

SEQ ID NO: 774 - protein, 365 aa, Arabidopsis thaliana
  peptide (1)..(365): Ceres Seq. ID no. 12370439
  misc_feature (1)..(351): Pfam Name: Pfam Description:  Class-II DAHP synthetase family
  misc_feature (1)..(365): NCBI GI NO: 15236093 NR Description: 2-dehydro-3-deoxyphosphoheptonate aldolase
  misc_feature (1)..(365): NCBI GI NO: 166688 NR Description: 3-deoxy-D-arabino-heptulosonate y-phosphate synthase
  misc_feature (1)..(365): NCBI GI NO: 99742 NR Description: 2-dehydro-3-deoxy-phosphoheptonate aldolase (EC 4
  misc_feature (1)..(363): NCBI GI NO: 2546988 NR Description: 2-dehydro-3-deoxyphosphoheptonate aldolase
  misc_feature (1)..(364): NCBI GI NO: 584779 NR Description: Phospho-2-dehydro-3-deoxyheptonate aldolase 2
  misc_feature (1)..(364): NCBI GI NO: 584776 NR Description: Phospho-2-dehydro-3-deoxyheptonate aldolase 1
  misc_feature (1)..(363): NCBI GI NO: 15219878 NR Description: 3-deoxy-D-arabino-heptulosonate 7-phosphate
  misc_feature (1)..(363): NCBI GI NO: 2398679 NR Description: 3-deoxy-D-arabino-heptulosonate 7-phosphate synthase
  misc_feature (1)..(364): NCBI GI NO: 114193 NR Description: Phospho-2-dehydro-3-deoxyheptonate aldolase 1
  misc_feature (1)..(364): NCBI GI NO: 7488957 NR Description: probable 2-dehydro-3-deoxy-phosphoheptonate aldolase
MSIVLTFGGQVPVIKVGRMAGQFAKPRSDAFEEKDGVKLPSYKGDNINGDTFDEKSRIPDPNRMIRAYTQSAATLNLLRAFATGGYAAIQRVTQWNLDFVEQSEQADRYQELANRVDEALGFMSACGLGTDHPLMTTTDFYTSHECLLLPYEQSLTRLDSTSGLYYDCSAHMVWCGERTRQLDGAHVEFLRGIANPLGIKVSNKMDPNELVKLVEILNPNNKPGRITVIVRMGAENMRVKLPHLIRAVRRSGQIVTWVCDPMHGNTIKAPCGLKTRAFDSILAEVRAFLDVHEQEGSHAGGIHLEMTGQNVTECIGGSRTVTYDDLSSRYHTHCDPRLNASQSLELAFIVAERLRKRRTGSQRVS

SEQ ID NO: 775 - DNA, 1235 bp, Arabidopsis thaliana
  misc_feature (1)..(1235): Ceres Seq. ID no. 12328499
aatttagggttttcattttacccatttcctctctttgtacgaacaaagtgcttcgagtttttgttaacctttttctctgatctaatggcgatggaagatcaatcggcggcgagatctatcggaaaagttagttggtttagcgatggaaaaggctacggtttcattactcccgatgatggcggcgaagagctttttgttcatcaatcctcaattgtctccgatggattccgtagcttgactcttggtgaatcggttgaatacgaaatcgcgcttggaagcgacggaaagactaaggccattgaagttactgctcccggcggcggttcacttaataagaaggaaaacagctcccgtggatccggaggtaattgttttaattgcggtgaggttggtcatatggctaaggattgtgacggtggaagtggtgggaaaagctttggaggtggtggtggtcgtagatctggcggcgaaggtgaatgttacatgtgtggtgatgtgggacacttcgctagggattgtaggcaaagcggtggtggaaacagcggcggaggaggaggaggtggtcgtccgtgttacagttgcggtgaggttggtcatttggcaaaggattgtcgtggtggttctggtggaaacagatacggaggaggtggtggtcgtggatctggcggtgatggatgctacatgtgtggtggtgtgggacatttcgctagggattgtaggcaaaacggcggtggaaacgttggaggtggtggaagcacttgttatacctgtggcggagttggccacattgcgaaagtttgcaccagcaagataccttctggtggtggtggtggtggtcgtgcttgttacgaatgtggaggaactggccatttggctcgtgactgtgatcggagaggaagtggaagcagcggaggtggcggtggcagtaacaagtgcttcatctgcggcaaggaaggtcactttgcgagggaatgtacttcggttgcttaacaaaaagatgcaaagaagaagagtaatgttcataaacctcttttgttttctattaaaatctacctaatgctcctttttggtgactataatgtgattgctaaagtcgtttaggatgtttaagaatggttgttttgggagtttttgatctctctatattactcttttgactggtttatgcaacctgttcgttcactgcttttgttgatgccataagtttgagatcttgaatgatatgtgtgcttgcg

SEQ ID NO: 776 - protein, 329 aa, Arabidopsis thaliana
  peptide (1)..(329): Ceres Seq. ID no. 12328500
  misc_feature (38)..(105): Pfam Name: Pfam Description:  'Cold-shock' DNA-binding domain
  misc_feature (29)..(329): NCBI GI NO: 18398546 NR Description: putative glycine-rich
  misc_feature (31)..(329): NCBI GI NO: 7442089 NR Description: glycine-rich protein T13L16
  misc_feature (29)..(329): NCBI GI NO: 15233440 NR Description: glycine-rich protein; protein id: At4g36020
  misc_feature (41)..(270): NCBI GI NO: 21322752 NR Description: cold shock protein-1 [Triticum aestivum]
  misc_feature (31)..(243): NCBI GI NO: 121631 NR Description: Glycine-rich protein 2
  misc_feature (41)..(239): NCBI GI NO: 40363759 NR Description: putative glycine-rich protein [Triticum aestivum]
  misc_feature (29)..(243): NCBI GI NO: 15234010 NR Description: glycine-rich protein 2
  misc_feature (108)..(327): NCBI GI NO: 729704 NR Description: DNA-binding protein HEXBP
  misc_feature (35)..(239): NCBI GI NO: 29467522 NR Description: P0582D05.12
  misc_feature (114)..(325): NCBI GI NO: 729704 NR Description: DNA-binding protein HEXBP
NLGFSFYPFPLFVRTKCFEFLLTFFSDLMAMEDQSAARSIGKVSWFSDGKGYGFITPDDGGEELFVHQSSIVSDGFRSLTLGESVEYEIALGSDGKTKAIEVTAPGGGSLNKKENSSRGSGGNCFNCGEVGHMAKDCDGGSGGKSFGGGGGRRSGGEGECYMCGDVGHFARDCRQSGGGNSGGGGGGGRPCYSCGEVGHLAKDCRGGSGGNRYGGGGGRGSGGDGCYMCGGVGHFARDCRQNGGGNVGGGGSTCYTCGGVGHIAKVCTSKIPSGGGGGGRACYECGGTGHLARDCDRRGSGSSGGGGGSNKCFICGKEGHFARECTSVA

SEQ ID NO: 777 - protein, 301 aa, Arabidopsis thaliana
  peptide (1)..(301): Ceres Seq. ID no. 12328501
  misc_feature (10)..(77): Pfam Name: Pfam Description:  'Cold-shock' DNA-binding domain
  misc_feature (1)..(301): NCBI GI NO: 18398546 NR Description: putative glycine-rich
  misc_feature (3)..(301): NCBI GI NO: 7442089 NR Description: glycine-rich protein T13L16
  misc_feature (1)..(301): NCBI GI NO: 15233440 NR Description: glycine-rich protein; protein id: At4g36020
  misc_feature (13)..(242): NCBI GI NO: 21322752 NR Description: cold shock protein-1 [Triticum aestivum]
  misc_feature (3)..(215): NCBI GI NO: 121631 NR Description: Glycine-rich protein 2
  misc_feature (13)..(211): NCBI GI NO: 40363759 NR Description: putative glycine-rich protein [Triticum aestivum]
  misc_feature (1)..(215): NCBI GI NO: 15234010 NR Description: glycine-rich protein 2
  misc_feature (80)..(299): NCBI GI NO: 729704 NR Description: DNA-binding protein HEXBP
  misc_feature (7)..(211): NCBI GI NO: 29467522 NR Description: P0582D05.12
  misc_feature (86)..(297): NCBI GI NO: 729704 NR Description: DNA-binding protein HEXBP
MAMEDQSAARSIGKVSWFSDGKGYGFITPDDGGEELFVHQSSIVSDGFRSLTLGESVEYEIALGSDGKTKAIEVTAPGGGSLNKKENSSRGSGGNCFNCGEVGHMAKDCDGGSGGKSFGGGGGRRSGGEGECYMCGDVGHFARDCRQSGGGNSGGGGGGGRPCYSCGEVGHLAKDCRGGSGGNRYGGGGGRGSGGDGCYMCGGVGHFARDCRQNGGGNVGGGGSTCYTCGGVGHIAKVCTSKIPSGGGGGGRACYECGGTGHLARDCDRRGSGSSGGGGGSNKCFICGKEGHFARECTSVA

SEQ ID NO: 778 - protein, 299 aa, Arabidopsis thaliana
  peptide (1)..(299): Ceres Seq. ID no. 12328502
  misc_feature (8)..(75): Pfam Name: Pfam Description:  'Cold-shock' DNA-binding domain
  misc_feature (1)..(299): NCBI GI NO: 18398546 NR Description: putative glycine-rich
  misc_feature (1)..(299): NCBI GI NO: 7442089 NR Description: glycine-rich protein T13L16
  misc_feature (1)..(299): NCBI GI NO: 15233440 NR Description: glycine-rich protein; protein id: At4g36020
  misc_feature (11)..(240): NCBI GI NO: 21322752 NR Description: cold shock protein-1 [Triticum aestivum]
  misc_feature (1)..(213): NCBI GI NO: 121631 NR Description: Glycine-rich protein 2
  misc_feature (11)..(209): NCBI GI NO: 40363759 NR Description: putative glycine-rich protein [Triticum aestivum]
  misc_feature (1)..(213): NCBI GI NO: 15234010 NR Description: glycine-rich protein 2
  misc_feature (78)..(297): NCBI GI NO: 729704 NR Description: DNA-binding protein HEXBP
  misc_feature (5)..(209): NCBI GI NO: 29467522 NR Description: P0582D05.12
  misc_feature (84)..(295): NCBI GI NO: 729704 NR Description: DNA-binding protein HEXBP
MEDQSAARSIGKVSWFSDGKGYGFITPDDGGEELFVHQSSIVSDGFRSLTLGESVEYEIALGSDGKTKAIEVTAPGGGSLNKKENSSRGSGGNCFNCGEVGHMAKDCDGGSGGKSFGGGGGRRSGGEGECYMCGDVGHFARDCRQSGGGNSGGGGGGGRPCYSCGEVGHLAKDCRGGSGGNRYGGGGGRGSGGDGCYMCGGVGHFARDCRQNGGGNVGGGGSTCYTCGGVGHIAKVCTSKIPSGGGGGGRACYECGGTGHLARDCDRRGSGSSGGGGGSNKCFICGKEGHFARECTSVA

SEQ ID NO: 779 - DNA, 1335 bp, Arabidopsis thaliana
  misc_feature (1)..(1335): Ceres Seq. ID no. 13490502
acatcttccttgtttcttctctctctctctctcccctcaaacttaaattcacattttaatacttgttacttcaactataataataataataatctttcttcattatatattttcctctcctctcagatcttctctctcaccatcttctcttgagatcaagattgagtattcttgtctcaagaatcgatactcgagagctcttatggaccaaaatggtcataacgacgaagcagaaacagtttcatgcggcaacggcaactgcaaaagcaagatcgtgcctggagatgatcacggtggagatgagagtagtggtaccaagagaaggaagaagagaaaaacgcaacaaaagacaatgaaacgacgtgaattaatgtcgtattgtgagctaccggagtacatgaaagacaacgaatacatattgaattattacagagctgattggtccattagagatgctttcttcagcgtatttagtttccacaatgagtccctcaatgtttggacacatttgattggttttatcttctttgtggcactaaccgtcgccaatattattcatcacgacggattcttccccgtggatgcaaagagtccagggaatgtaacaagatggcccttcttcgttttcttaggaggctcaatgttctgcctactcgcaagcagcatttgtcacctcttctgttgccactcaaaagagcttaatgtcttccttctccgaatagactatgccggtatcaccgccatgatcatcacttccttcttcccaccaatcttctacatcttccagtgcactcctcggtggtacttcatctacctcgcaggcatcacatccatgggaatcttcacaatcatcacacttttcaccccatcactttccgctcccaagtaccgagctttccgcgctttgctctttgcctccatggggctgtttgggattgtcccagctgcccacgcgctagtggtcaattggggaaacccgcaaaggaacgtgacgctcgtgtacgagttgcttatggcagtgttctatcttgttggaacaggattctacgtagggagagtgccagaaaggcttaaaccgggatggtttgatcgtgtgggacatagtcatcagatcttccatgtgttcgttttgttgggtgctttgtctcactatgcagctgctctcttgttcttggactggcgtgaccacgttggttgttaaaccatatatttgtaattcttttaaatataatattattaatttgttgtatcgtggtgaacaaaattgtaataacccatttgttttaaattgaattgtaattcaacttgtgttaattgttatgtttgttgaatacg

SEQ ID NO: 780 - protein, 332 aa, Arabidopsis thaliana
  peptide (1)..(332): Ceres Seq. ID no. 13490503
  misc_feature (90)..(321): Pfam Name: Hly-III / UPF0073 Pfam Description: Uncharacterised protein family
  misc_feature (1)..(332): NCBI GI NO: 15241302 NR Description: expressed protein [Arabidopsis thaliana]
  misc_feature (134)..(332): NCBI GI NO: 15235657 NR Description: expressed protein [Arabidopsis thaliana]
  misc_feature (29)..(114): NCBI GI NO: 15235657 NR Description: expressed protein [Arabidopsis thaliana]
  misc_feature (134)..(321): NCBI GI NO: 15233813 NR Description: expressed protein [Arabidopsis thaliana]
  misc_feature (29)..(114): NCBI GI NO: 15233813 NR Description: expressed protein [Arabidopsis thaliana]
  misc_feature (48)..(326): NCBI GI NO: 25309925 NR Description: hypothetical protein At2g24150
  misc_feature (134)..(327): NCBI GI NO: 18377749 NR Description: unknown protein [Arabidopsis thaliana]
  misc_feature (134)..(327): NCBI GI NO: 30688829 NR Description: expressed protein [Arabidopsis thaliana]
  misc_feature (134)..(278): NCBI GI NO: 20330770 NR Description: Hypothetical protein
  misc_feature (43)..(114): NCBI GI NO: 20330770 NR Description: Hypothetical protein
MDQNGHNDEAETVSCGNGNCKSKIVPGDDHGGDESSGTKRRKKRKTQQKTMKRRELMSYCELPEYMKDNEYILNYYRADWSIRDAFFSVFSFHNESLNVWTHLIGFIFFVALTVANIIHHDGFFPVDAKSPGNVTRWPFFVFLGGSMFCLLASSICHLFCCHSKELNVFLLRIDYAGITAMIITSFFPPIFYIFQCTPRWYFIYLAGITSMGIFTIITLFTPSLSAPKYRAFRALLFASMGLFGIVPAAHALVVNWGNPQRNVTLVYELLMAVFYLVGTGFYVGRVPERLKPGWFDRVGHSHQIFHVFVLLGALSHYAAALLFLDWRDHVGC

SEQ ID NO: 781 - protein, 282 aa, Arabidopsis thaliana
  peptide (1)..(282): Ceres Seq. ID no. 13490504
  misc_feature (40)..(271): Pfam Name: Hly-III / UPF0073 Pfam Description: Uncharacterised protein family
  misc_feature (1)..(282): NCBI GI NO: 15241302 NR Description: expressed protein [Arabidopsis thaliana]
  misc_feature (84)..(282): NCBI GI NO: 15235657 NR Description: expressed protein [Arabidopsis thaliana]
  misc_feature (1)..(64): NCBI GI NO: 15235657 NR Description: expressed protein [Arabidopsis thaliana]
  misc_feature (84)..(271): NCBI GI NO: 15233813 NR Description: expressed protein [Arabidopsis thaliana]
  misc_feature (1)..(64): NCBI GI NO: 15233813 NR Description: expressed protein [Arabidopsis thaliana]
  misc_feature (1)..(276): NCBI GI NO: 25309925 NR Description: hypothetical protein At2g24150
  misc_feature (84)..(277): NCBI GI NO: 18377749 NR Description: unknown protein [Arabidopsis thaliana]
  misc_feature (84)..(277): NCBI GI NO: 30688829 NR Description: expressed protein [Arabidopsis thaliana]
  misc_feature (84)..(228): NCBI GI NO: 20330770 NR Description: Hypothetical protein
  misc_feature (1)..(64): NCBI GI NO: 20330770 NR Description: Hypothetical protein
MKRRELMSYCELPEYMKDNEYILNYYRADWSIRDAFFSVFSFHNESLNVWTHLIGFIFFVALTVANIIHHDGFFPVDAKSPGNVTRWPFFVFLGGSMFCLLASSICHLFCCHSKELNVFLLRIDYAGITAMIITSFFPPIFYIFQCTPRWYFIYLAGITSMGIFTIITLFTPSLSAPKYRAFRALLFASMGLFGIVPAAHALVVNWGNPQRNVTLVYELLMAVFYLVGTGFYVGRVPERLKPGWFDRVGHSHQIFHVFVLLGALSHYAAALLFLDWRDHVGC

SEQ ID NO: 782 - protein, 276 aa, Arabidopsis thaliana
  peptide (1)..(276): Ceres Seq. ID no. 13490505
  misc_feature (34)..(265): Pfam Name: Hly-III / UPF0073 Pfam Description: Uncharacterised protein family
  misc_feature (1)..(276): NCBI GI NO: 15241302 NR Description: expressed protein [Arabidopsis thaliana]
  misc_feature (78)..(276): NCBI GI NO: 15235657 NR Description: expressed protein [Arabidopsis thaliana]
  misc_feature (1)..(58): NCBI GI NO: 15235657 NR Description: expressed protein [Arabidopsis thaliana]
  misc_feature (78)..(265): NCBI GI NO: 15233813 NR Description: expressed protein [Arabidopsis thaliana]
  misc_feature (1)..(58): NCBI GI NO: 15233813 NR Description: expressed protein [Arabidopsis thaliana]
  misc_feature (1)..(270): NCBI GI NO: 25309925 NR Description: hypothetical protein At2g24150
  misc_feature (78)..(271): NCBI GI NO: 18377749 NR Description: unknown protein [Arabidopsis thaliana]
  misc_feature (78)..(271): NCBI GI NO: 30688829 NR Description: expressed protein [Arabidopsis thaliana]
  misc_feature (78)..(222): NCBI GI NO: 20330770 NR Description: Hypothetical protein
  misc_feature (1)..(58): NCBI GI NO: 20330770 NR Description: Hypothetical protein
MSYCELPEYMKDNEYILNYYRADWSIRDAFFSVFSFHNESLNVWTHLIGFIFFVALTVANIIHHDGFFPVDAKSPGNVTRWPFFVFLGGSMFCLLASSICHLFCCHSKELNVFLLRIDYAGITAMIITSFFPPIFYIFQCTPRWYFIYLAGITSMGIFTIITLFTPSLSAPKYRAFRALLFASMGLFGIVPAAHALVVNWGNPQRNVTLVYELLMAVFYLVGTGFYVGRVPERLKPGWFDRVGHSHQIFHVFVLLGALSHYAAALLFLDWRDHVGC

SEQ ID NO: 783 - DNA, 1217 bp, Arabidopsis thaliana
  misc_feature (1)..(1217): Ceres Seq. ID no. 12338444
attatatccaaaacaaaatctctttaactctctctattttgctcaatcttaatcgtccaatcaaaacactccgactaaaaatggctgcatctaacggcgagaaaagcttgatcgtgagcttcggtgaaatgctcatcgatttcgtcccaaccgtctccggtgtatccctcgccgatgctcctggcttcatcaaagcccctggtggtgcacctgccaacgttgccatcgccatttcccgtcttggcggtcgtgccgctttcgttggaaaactcggtgacgacgagttcggtcacatgctcgccggaatcttgaaacagaacggtgtctctgctgaaggtatcaatttcgacaccggagccaggactgcacttgcgttcgtgacactaagatctgatggagaacgtgagttcatgttctaccggaaccctagtgccgatatgctcctccgtcccgacgagctcaatcttgatgtcatcagatctgctaaggtgttccactacggatccataagcttgatcgttgagccatgtcgatctgctcacttgaaagccatggaggtggctaaggaagctggtgcgttgctttcatatgatccgaacttgaggcttcctttgtggccctcgaaggaggaggctcagaagcagattcttagcatctgggacaaagctgaagtgatcaaagtcagcgatgaagagcttatgttcttgactggatctgataaggttgatgatgagactgctttgtctctgtggcactctaatctgaaacttctcttggtcactctaggtgaaaagggttgtagttactacaccaagagcttccgtggatctgttgatcccttccatgtggatgcagtagatacaactggtgctggtgattcatttgttggtgcattgctttgcaagattgttgatgaccgtgctgtgcttgaggacgaagctcgtctgagagaagtgcttaggtttgcgaatgcttgtggagccatcacaacaacaaagaaaggagctattccagctctccctacagagtctgaagttcagagcctcctgaaaggaaactgatttcacaatgtctggatttttaggatttcaagttttaccttttcttggctttgttttttattttcccctgcttttggctctgtgttcttgtagaaccgttctattctgttatgaatctcgttttattccaattgcaaggttttttgtcgtttgagc

SEQ ID NO: 784 - protein, 352 aa, Arabidopsis thaliana
  peptide (1)..(352): Ceres Seq. ID no. 12338445
  misc_feature (34)..(342): Pfam Name: Pfam Description:  pfkB family carbohydrate kinase
  misc_feature (27)..(352): NCBI GI NO: 21592495 NR Description: fructokinase-like protein [Arabidopsis thaliana]
  misc_feature (27)..(352): NCBI GI NO: 15231692 NR Description: fructokinase-like protein; protein id: At3g59480
  misc_feature (29)..(350): NCBI GI NO: 15224669 NR Description: putative fructokinase; protein id: At2g31390
  misc_feature (29)..(350): NCBI GI NO: 14423528 NR Description: putative fructokinase [Arabidopsis thaliana]
  misc_feature (27)..(350): NCBI GI NO: 15221364 NR Description: fructokinase, putative; protein id: At1g06020.1
  misc_feature (29)..(351): NCBI GI NO: 1915974 NR Description: fructokinase [Lycopersicon esculentum]
  misc_feature (29)..(351): NCBI GI NO: 32765547 NR Description: fructokinase 2 [Lycopersicon hirsutum]
  misc_feature (27)..(350): NCBI GI NO: 15221365 NR Description: fructokinase, putative; protein id: At1g06030
  misc_feature (30)..(352): NCBI GI NO: 7434223 NR Description: fructokinase (EC 2.7.1.4) - beet
  misc_feature (29)..(351): NCBI GI NO: 585973 NR Description: FRUCTOKINASE
YIQNKISLTLSILLNLNRPIKTLRLKMAASNGEKSLIVSFGEMLIDFVPTVSGVSLADAPGFIKAPGGAPANVAIAISRLGGRAAFVGKLGDDEFGHMLAGILKQNGVSAEGINFDTGARTALAFVTLRSDGEREFMFYRNPSADMLLRPDELNLDVIRSAKVFHYGSISLIVEPCRSAHLKAMEVAKEAGALLSYDPNLRLPLWPSKEEAQKQILSIWDKAEVIKVSDEELMFLTGSDKVDDETALSLWHSNLKLLLVTLGEKGCSYYTKSFRGSVDPFHVDAVDTTGAGDSFVGALLCKIVDDRAVLEDEARLREVLRFANACGAITTTKKGAIPALPTESEVQSLLKGN

SEQ ID NO: 785 - protein, 326 aa, Arabidopsis thaliana
  peptide (1)..(326): Ceres Seq. ID no. 12338447
  misc_feature (8)..(316): Pfam Name: Pfam Description:  pfkB family carbohydrate kinase
  misc_feature (1)..(326): NCBI GI NO: 21592495 NR Description: fructokinase-like protein [Arabidopsis thaliana]
  misc_feature (1)..(326): NCBI GI NO: 15231692 NR Description: fructokinase-like protein; protein id: At3g59480
  misc_feature (3)..(324): NCBI GI NO: 15224669 NR Description: putative fructokinase; protein id: At2g31390
  misc_feature (3)..(324): NCBI GI NO: 14423528 NR Description: putative fructokinase [Arabidopsis thaliana]
  misc_feature (1)..(324): NCBI GI NO: 15221364 NR Description: fructokinase, putative; protein id: At1g06020.1
  misc_feature (3)..(325): NCBI GI NO: 1915974 NR Description: fructokinase [Lycopersicon esculentum]
  misc_feature (3)..(325): NCBI GI NO: 32765547 NR Description: fructokinase 2 [Lycopersicon hirsutum]
  misc_feature (1)..(324): NCBI GI NO: 15221365 NR Description: fructokinase, putative; protein id: At1g06030
  misc_feature (4)..(326): NCBI GI NO: 7434223 NR Description: fructokinase (EC 2.7.1.4) - beet
  misc_feature (3)..(325): NCBI GI NO: 585973 NR Description: FRUCTOKINASE
MAASNGEKSLIVSFGEMLIDFVPTVSGVSLADAPGFIKAPGGAPANVAIAISRLGGRAAFVGKLGDDEFGHMLAGILKQNGVSAEGINFDTGARTALAFVTLRSDGEREFMFYRNPSADMLLRPDELNLDVIRSAKVFHYGSISLIVEPCRSAHLKAMEVAKEAGALLSYDPNLRLPLWPSKEEAQKQILSIWDKAEVIKVSDEELMFLTGSDKVDDETALSLWHSNLKLLLVTLGEKGCSYYTKSFRGSVDPFHVDAVDTTGAGDSFVGALLCKIVDDRAVLEDEARLREVLRFANACGAITTTKKGAIPALPTESEVQSLLKGN

SEQ ID NO: 786 - protein, 310 aa, Arabidopsis thaliana
  peptide (1)..(310): Ceres Seq. ID no. 12338448
  misc_feature (1)..(300): Pfam Name: Pfam Description:  pfkB family carbohydrate kinase
  misc_feature (1)..(310): NCBI GI NO: 21592495 NR Description: fructokinase-like protein [Arabidopsis thaliana]
  misc_feature (1)..(310): NCBI GI NO: 15231692 NR Description: fructokinase-like protein; protein id: At3g59480
  misc_feature (1)..(308): NCBI GI NO: 15224669 NR Description: putative fructokinase; protein id: At2g31390
  misc_feature (1)..(308): NCBI GI NO: 14423528 NR Description: putative fructokinase [Arabidopsis thaliana]
  misc_feature (1)..(308): NCBI GI NO: 15221364 NR Description: fructokinase, putative; protein id: At1g06020.1
  misc_feature (1)..(309): NCBI GI NO: 1915974 NR Description: fructokinase [Lycopersicon esculentum]
  misc_feature (1)..(309): NCBI GI NO: 32765547 NR Description: fructokinase 2 [Lycopersicon hirsutum]
  misc_feature (1)..(308): NCBI GI NO: 15221365 NR Description: fructokinase, putative; protein id: At1g06030
  misc_feature (1)..(310): NCBI GI NO: 7434223 NR Description: fructokinase (EC 2.7.1.4) - beet
  misc_feature (1)..(309): NCBI GI NO: 585973 NR Description: FRUCTOKINASE
MLIDFVPTVSGVSLADAPGFIKAPGGAPANVAIAISRLGGRAAFVGKLGDDEFGHMLAGILKQNGVSAEGINFDTGARTALAFVTLRSDGEREFMFYRNPSADMLLRPDELNLDVIRSAKVFHYGSISLIVEPCRSAHLKAMEVAKEAGALLSYDPNLRLPLWPSKEEAQKQILSIWDKAEVIKVSDEELMFLTGSDKVDDETALSLWHSNLKLLLVTLGEKGCSYYTKSFRGSVDPFHVDAVDTTGAGDSFVGALLCKIVDDRAVLEDEARLREVLRFANACGAITTTKKGAIPALPTESEVQSLLKGN

SEQ ID NO: 787 - DNA, 1100 bp, Arabidopsis thaliana
  misc_feature (1)..(1100): Ceres Seq. ID no. 12394844
aaacacaacacaacacaatatctttcaactcaaaatctttttcatttctctgtatcctcctcatatttttattcttttgtaatgacaggttgctttagcttgtctgaagcattagaacgaacttacaaatccgggttcaaaagatccggtctacgacccgtaaccatcgacttgaaagatggaaccgtagtcaacttttgggtatccaaaaccaaacccgaatccaaacccaaacctaatctcctcctcatccacggcctcggagctactgccatctggcaatggtacgacgtagctcgccgtctctcacgttatttcaacctctacatccccgacctagtcttcttcggcggatcttccacgacccgacccgaaagatccgatattttccaagcccaaacactcatgcgggccttagaagcccaatccgtcaaaaagtttagcctcgtcggtcttagctacggcggattcgttggttatcgaatggcgtcgatgtacgcagacgcggtggagaaggtggtgatatgctgcgccgccgtgtgcgtggaggagaaagatatgaaagccggtgttttcaaggtgtcggatcttgatgaagcttcgaagattcttgtgccggagtctgtgaaaaagctccgggaacttatgggttacatattttacaaaccggcgttggcaagactggttcctacttgtcttctccatgatttcatcgaacatgctttgacaagagataatatggaagagaagagagaactgatcaaagccataccaaaagacagaataatctcagagattccaaagctcaaacagccaacattgataatatggggagagcatgatcaagtgttcccattggagatgggcaagagacttgagaagcatgtaggagataatgggaaactcgttatcatcaagagaactggtcatatctttaacttcgagaaacctaaaaagtttatcaaacttctcaaatcttttcttctagagactagtaaaccacagattcctgtctctaatgtttgattcttagtcatcgttttgaagatcctctcataagtaatttccaaggattaataacatatatatcattttcacat

SEQ ID NO: 788 - protein, 341 aa, Arabidopsis thaliana
  peptide (1)..(341): Ceres Seq. ID no. 12394845
  misc_feature (106)..(326): Pfam Name: Pfam Description:  alpha/beta hydrolase fold
  misc_feature (28)..(341): NCBI GI NO: 18411865 NR Description: hypothetical protein; protein id: At1g78210
  misc_feature (28)..(240): NCBI GI NO: 25406548 NR Description: hypothetical protein T11I11.15
  misc_feature (31)..(331): NCBI GI NO: 15242419 NR Description: putative hydrolase; protein id: At5g09430.1
  misc_feature (28)..(328): NCBI GI NO: 18420566 NR Description: Expressed protein; protein id: At4g39955
  misc_feature (28)..(328): NCBI GI NO: 21536873 NR Description: putative hydrolase [Arabidopsis thaliana]
  misc_feature (33)..(330): NCBI GI NO: 33146617 NR Description: hydrolase-like protein
  misc_feature (37)..(332): NCBI GI NO: 37533664 NR Description: putative hydrolase
  misc_feature (33)..(332): NCBI GI NO: 22326938 NR Description: similar to putative hydrolase
  misc_feature (47)..(328): NCBI GI NO: 18398716 NR Description: expressed protein; protein id: At2g18360
  misc_feature (48)..(243): NCBI GI NO: 27436747 NR Description: Hypothetical protein
KHNTTQYLSTQNLFHFSVSSSYFYSFVMTGCFSLSEALERTYKSGFKRSGLRPVTIDLKDGTVVNFWVSKTKPESKPKPNLLLIHGLGATAIWQWYDVARRLSRYFNLYIPDLVFFGGSSTTRPERSDIFQAQTLMRALEAQSVKKFSLVGLSYGGFVGYRMASMYADAVEKVVICCAAVCVEEKDMKAGVFKVSDLDEASKILVPESVKKLRELMGYIFYKPALARLVPTCLLHDFIEHALTRDNMEEKRELIKAIPKDRIISEIPKLKQPTLIIWGEHDQVFPLEMGKRLEKHVGDNGKLVIIKRTGHIFNFEKPKKFIKLLKSFLLETSKPQIPVSNV

SEQ ID NO: 789 - protein, 314 aa, Arabidopsis thaliana
  peptide (1)..(314): Ceres Seq. ID no. 12394846
  misc_feature (79)..(299): Pfam Name: Pfam Description:  alpha/beta hydrolase fold
  misc_feature (1)..(314): NCBI GI NO: 18411865 NR Description: hypothetical protein; protein id: At1g78210
  misc_feature (1)..(213): NCBI GI NO: 25406548 NR Description: hypothetical protein T11I11.15
  misc_feature (4)..(304): NCBI GI NO: 15242419 NR Description: putative hydrolase; protein id: At5g09430.1
  misc_feature (1)..(301): NCBI GI NO: 18420566 NR Description: Expressed protein; protein id: At4g39955
  misc_feature (1)..(301): NCBI GI NO: 21536873 NR Description: putative hydrolase [Arabidopsis thaliana]
  misc_feature (6)..(303): NCBI GI NO: 33146617 NR Description: hydrolase-like protein
  misc_feature (10)..(305): NCBI GI NO: 37533664 NR Description: putative hydrolase
  misc_feature (6)..(305): NCBI GI NO: 22326938 NR Description: similar to putative hydrolase
  misc_feature (20)..(301): NCBI GI NO: 18398716 NR Description: expressed protein; protein id: At2g18360
  misc_feature (21)..(216): NCBI GI NO: 27436747 NR Description: Hypothetical protein
MTGCFSLSEALERTYKSGFKRSGLRPVTIDLKDGTVVNFWVSKTKPESKPKPNLLLIHGLGATAIWQWYDVARRLSRYFNLYIPDLVFFGGSSTTRPERSDIFQAQTLMRALEAQSVKKFSLVGLSYGGFVGYRMASMYADAVEKVVICCAAVCVEEKDMKAGVFKVSDLDEASKILVPESVKKLRELMGYIFYKPALARLVPTCLLHDFIEHALTRDNMEEKRELIKAIPKDRIISEIPKLKQPTLIIWGEHDQVFPLEMGKRLEKHVGDNGKLVIIKRTGHIFNFEKPKKFIKLLKSFLLETSKPQIPVSNV

SEQ ID NO: 790 - protein, 206 aa, Arabidopsis thaliana
  peptide (1)..(206): Ceres Seq. ID no. 12394847
  misc_feature (1)..(191): Pfam Name: Pfam Description:  alpha/beta hydrolase fold
  misc_feature (1)..(206): NCBI GI NO: 18411865 NR Description: hypothetical protein; protein id: At1g78210
  misc_feature (1)..(105): NCBI GI NO: 25406548 NR Description: hypothetical protein T11I11.15
  misc_feature (1)..(196): NCBI GI NO: 15242419 NR Description: putative hydrolase; protein id: At5g09430.1
  misc_feature (1)..(193): NCBI GI NO: 18420566 NR Description: Expressed protein; protein id: At4g39955
  misc_feature (1)..(193): NCBI GI NO: 21536873 NR Description: putative hydrolase [Arabidopsis thaliana]
  misc_feature (1)..(195): NCBI GI NO: 33146617 NR Description: hydrolase-like protein
  misc_feature (1)..(197): NCBI GI NO: 37533664 NR Description: putative hydrolase
  misc_feature (1)..(197): NCBI GI NO: 22326938 NR Description: similar to putative hydrolase
  misc_feature (1)..(193): NCBI GI NO: 18398716 NR Description: expressed protein; protein id: At2g18360
  misc_feature (1)..(108): NCBI GI NO: 27436747 NR Description: Hypothetical protein
MRALEAQSVKKFSLVGLSYGGFVGYRMASMYADAVEKVVICCAAVCVEEKDMKAGVFKVSDLDEASKILVPESVKKLRELMGYIFYKPALARLVPTCLLHDFIEHALTRDNMEEKRELIKAIPKDRIISEIPKLKQPTLIIWGEHDQVFPLEMGKRLEKHVGDNGKLVIIKRTGHIFNFEKPKKFIKLLKSFLLETSKPQIPVSNV

SEQ ID NO: 791 - DNA, 802 bp, Arabidopsis thaliana
  misc_feature (1)..(802): Ceres Seq. ID no. 12393581
aagcatcactatgctcgaaaatctctctttgttcgctttgtggggaacgaactatggccgagagatggaggaacacggctctactcgtcatcgacatgcagaacgatttcatagaggaaggtgctgtgacgcaagtgaaaggaggaaaatctatagttcctaatgttatcagagtcgtcgaactcgcgaggcagcgtggtattctcgtaatttgggttgttcgagaacatgatcgtcaaggaagagatgttgaattattcaggcgccataactacagttctgagaaagtcgggccagttattaaaggcaccgtaggagcagaattggttgatggattgatgatcaacgaagaagatgactataagattgtgaaaactcgtttcagtgctttctttagtaccaatcttcattccttcttgcaaacttcaggggttaccaagttagtgattgctggtgtgcaaacgccgaactgtatccggcaaacggtgtttgatgcagtggcgctggattatcccaatgtgactgttattacagatgccacagctgctgcaacaccagagatccatactgcgaatattcttgacatgaagaatattggagtcaagactcctacattacacgagtggtccgaagaacttgcttgacaaagaccatcttaagcccttcttttatcttgttttcttgtttgtacatgtaataaagaaaatgttaatcttgttgttgtaagttacaaaatctccacctattgttgtatacttttcttgtaatcccgtccaaaaaaataaaatgtattacgtttaat

SEQ ID NO: 792 - protein, 213 aa, Arabidopsis thaliana
  peptide (1)..(213): Ceres Seq. ID no. 12393582
  misc_feature (23)..(210): Pfam Name: Pfam Description:  Isochorismatase family
  misc_feature (18)..(213): NCBI GI NO: 18401044 NR Description: putative hydrolase; protein id: At3g16190
  misc_feature (26)..(201): NCBI GI NO: 20093942 NR Description: Amidase related to nicotinamidase
  misc_feature (26)..(198): NCBI GI NO: 11499734 NR Description: isochorismatase (entB) [Archaeoglobus fulgidus]
  misc_feature (6)..(184): NCBI GI NO: 15920799 NR Description: 200aa long hypothetical isochorismatase
  misc_feature (26)..(198): NCBI GI NO: 15643241 NR Description: pyrazinamidase/nicotinamidase-related protein
  misc_feature (23)..(185): NCBI GI NO: 6681419 NR Description: ORF [Thermus thermophilus]
  misc_feature (2)..(184): NCBI GI NO: 15899200 NR Description: Isochorismatase, putative  (entB-like2)
  misc_feature (23)..(186): NCBI GI NO: 26247033 NR Description: Hypothetical isochorismatase family protein ycdL
  misc_feature (27)..(182): NCBI GI NO: 13541602 NR Description: Amidase (nicotinamidase-related)
  misc_feature (26)..(182): NCBI GI NO: 16081574 NR Description: N-carbamoylsarcosine amidase related protein
ASLCSKISLCSLCGERTMAERWRNTALLVIDMQNDFIEEGAVTQVKGGKSIVPNVIRVVELARQRGILVIWVVREHDRQGRDVELFRRHNYSSEKVGPVIKGTVGAELVDGLMINEEDDYKIVKTRFSAFFSTNLHSFLQTSGVTKLVIAGVQTPNCIRQTVFDAVALDYPNVTVITDATAAATPEIHTANILDMKNIGVKTPTLHEWSEELA

SEQ ID NO: 793 - protein, 196 aa, Arabidopsis thaliana
  peptide (1)..(196): Ceres Seq. ID no. 12393583
  misc_feature (6)..(193): Pfam Name: Pfam Description:  Isochorismatase family
  misc_feature (1)..(196): NCBI GI NO: 18401044 NR Description: putative hydrolase; protein id: At3g16190
  misc_feature (9)..(184): NCBI GI NO: 20093942 NR Description: Amidase related to nicotinamidase
  misc_feature (9)..(181): NCBI GI NO: 11499734 NR Description: isochorismatase (entB) [Archaeoglobus fulgidus]
  misc_feature (1)..(167): NCBI GI NO: 15920799 NR Description: 200aa long hypothetical isochorismatase
  misc_feature (9)..(181): NCBI GI NO: 15643241 NR Description: pyrazinamidase/nicotinamidase-related protein
  misc_feature (6)..(168): NCBI GI NO: 6681419 NR Description: ORF [Thermus thermophilus]
  misc_feature (1)..(167): NCBI GI NO: 15899200 NR Description: Isochorismatase, putative  (entB-like2)
  misc_feature (6)..(169): NCBI GI NO: 26247033 NR Description: Hypothetical isochorismatase family protein ycdL
  misc_feature (10)..(165): NCBI GI NO: 13541602 NR Description: Amidase (nicotinamidase-related)
  misc_feature (9)..(165): NCBI GI NO: 16081574 NR Description: N-carbamoylsarcosine amidase related protein
MAERWRNTALLVIDMQNDFIEEGAVTQVKGGKSIVPNVIRVVELARQRGILVIWVVREHDRQGRDVELFRRHNYSSEKVGPVIKGTVGAELVDGLMINEEDDYKIVKTRFSAFFSTNLHSFLQTSGVTKLVIAGVQTPNCIRQTVFDAVALDYPNVTVITDATAAATPEIHTANILDMKNIGVKTPTLHEWSEELA

SEQ ID NO: 794 - protein, 182 aa, Arabidopsis thaliana
  peptide (1)..(182): Ceres Seq. ID no. 12393584
  misc_feature (1)..(179): Pfam Name: Pfam Description:  Isochorismatase family
  misc_feature (1)..(182): NCBI GI NO: 18401044 NR Description: putative hydrolase; protein id: At3g16190
  misc_feature (1)..(170): NCBI GI NO: 20093942 NR Description: Amidase related to nicotinamidase
  misc_feature (1)..(167): NCBI GI NO: 11499734 NR Description: isochorismatase (entB) [Archaeoglobus fulgidus]
  misc_feature (1)..(153): NCBI GI NO: 15920799 NR Description: 200aa long hypothetical isochorismatase
  misc_feature (1)..(167): NCBI GI NO: 15643241 NR Description: pyrazinamidase/nicotinamidase-related protein
  misc_feature (1)..(154): NCBI GI NO: 6681419 NR Description: ORF [Thermus thermophilus]
  misc_feature (1)..(153): NCBI GI NO: 15899200 NR Description: Isochorismatase, putative  (entB-like2)
  misc_feature (1)..(155): NCBI GI NO: 26247033 NR Description: Hypothetical isochorismatase family protein ycdL
  misc_feature (1)..(151): NCBI GI NO: 13541602 NR Description: Amidase (nicotinamidase-related)
  misc_feature (1)..(151): NCBI GI NO: 16081574 NR Description: N-carbamoylsarcosine amidase related protein
MQNDFIEEGAVTQVKGGKSIVPNVIRVVELARQRGILVIWVVREHDRQGRDVELFRRHNYSSEKVGPVIKGTVGAELVDGLMINEEDDYKIVKTRFSAFFSTNLHSFLQTSGVTKLVIAGVQTPNCIRQTVFDAVALDYPNVTVITDATAAATPEIHTANILDMKNIGVKTPTLHEWSEELA

SEQ ID NO: 795 - DNA, 815 bp, Arabidopsis thaliana
  misc_feature (1)..(815): Ceres Seq. ID no. 12337498
aaagaagagaagaagaactctctctctatctctatctctcttctccttcttcttcagtttcgatcattcttgaatctgattcttctcgagaaaaaagcgtttcaatttcagaaatttcgactacgattgttgctttgttcaattagaagaggcgaaaaaggatggcgacggttaatgggtacacagggaatactccggcggcgactacaccggcagccaccggatcaaagcaatctgctcctccgactaagaccgtcgatagccactccgttctaaaaaggctgcaatctgaactaatgggattgatgatgggagctgatccggggatatctgcgtttccagaggaagacaacatattttgctggaaaggaacaattacaggaagcaaagatactgtgttcgaaggaactgagtacagactctcactcactttctctaacgattatccttttaagtctcccaaagttaagtttgagacatgctgcttccaccccaatgtggatctctatggcaatatttgcttggacattcttcaggataaatggtcatctgcttatgatgtgaggacgatattactctcaattcaaagccttctcggaaccgaacatcagctcaccattgaacaatcaagcggctcagctttggagcaatcaagaagagtacaggaagatggttgagaagctctacaagcctttaaacgcatgattctcaaaaatcactgtaactgattttaaaatctcaactgtattggatcatatctcttttacttttataatctcaatttgagccaatattagcaatcaaactctaccttt

SEQ ID NO: 796 - protein, 171 aa, Arabidopsis thaliana
  peptide (1)..(171): Ceres Seq. ID no. 12337499
  misc_feature (1)..(146): NCBI GI NO: 18402475 NR Description: E2, ubiquitin-conjugating enzyme, putative
  misc_feature (1)..(146): NCBI GI NO: 18403097 NR Description: E2, ubiquitin-conjugating enzyme, putative
  misc_feature (1)..(146): NCBI GI NO: 21618179 NR Description: E2, ubiquitin-conjugating enzyme, putative
  misc_feature (1)..(146): NCBI GI NO: 25293673 NR Description: hypothetical protein F17J6.3
  misc_feature (37)..(146): NCBI GI NO: 9454557 NR Description: Putative ubiquitin carrier protein
  misc_feature (8)..(146): NCBI GI NO: 34903234 NR Description: unnamed protein product
  misc_feature (17)..(146): NCBI GI NO: 3915196 NR Description: Ubiquitin-conjugating enzyme E2-C
  misc_feature (21)..(146): NCBI GI NO: 24663332 NR Description: vihar CG10682-PA
  misc_feature (29)..(146): NCBI GI NO: 4388942 NR Description: E2-C
  misc_feature (13)..(171): NCBI GI NO: 6097072 NR Description: cyclin-selective ubiquitin carrier protein E2-C
MATVNGYTGNTPAATTPAATGSKQSAPPTKTVDSHSVLKRLQSELMGLMMGADPGISAFPEEDNIFCWKGTITGSKDTVFEGTEYRLSLTFSNDYPFKSPKVKFETCCFHPNVDLYGNICLDILQDKWSSAYDVRTILLSIQSLLGTEHQLTIEQSSGSALEQSRRVQEDG

SEQ ID NO: 797 - protein, 126 aa, Arabidopsis thaliana
  peptide (1)..(126): Ceres Seq. ID no. 12337500
  misc_feature (1)..(101): NCBI GI NO: 18402475 NR Description: E2, ubiquitin-conjugating enzyme, putative
  misc_feature (1)..(101): NCBI GI NO: 18403097 NR Description: E2, ubiquitin-conjugating enzyme, putative
  misc_feature (1)..(101): NCBI GI NO: 21618179 NR Description: E2, ubiquitin-conjugating enzyme, putative
  misc_feature (1)..(101): NCBI GI NO: 25293673 NR Description: hypothetical protein F17J6.3
  misc_feature (1)..(101): NCBI GI NO: 9454557 NR Description: Putative ubiquitin carrier protein
  misc_feature (1)..(101): NCBI GI NO: 34903234 NR Description: unnamed protein product
  misc_feature (1)..(101): NCBI GI NO: 3915196 NR Description: Ubiquitin-conjugating enzyme E2-C
  misc_feature (1)..(101): NCBI GI NO: 24663332 NR Description: vihar CG10682-PA
  misc_feature (1)..(101): NCBI GI NO: 4388942 NR Description: E2-C
  misc_feature (1)..(126): NCBI GI NO: 6097072 NR Description: cyclin-selective ubiquitin carrier protein E2-C
MGLMMGADPGISAFPEEDNIFCWKGTITGSKDTVFEGTEYRLSLTFSNDYPFKSPKVKFETCCFHPNVDLYGNICLDILQDKWSSAYDVRTILLSIQSLLGTEHQLTIEQSSGSALEQSRRVQEDG

SEQ ID NO: 798 - protein, 123 aa, Arabidopsis thaliana
  peptide (1)..(123): Ceres Seq. ID no. 12337501
  misc_feature (1)..(98): NCBI GI NO: 18402475 NR Description: E2, ubiquitin-conjugating enzyme, putative
  misc_feature (1)..(98): NCBI GI NO: 18403097 NR Description: E2, ubiquitin-conjugating enzyme, putative
  misc_feature (1)..(98): NCBI GI NO: 21618179 NR Description: E2, ubiquitin-conjugating enzyme, putative
  misc_feature (1)..(98): NCBI GI NO: 25293673 NR Description: hypothetical protein F17J6.3
  misc_feature (1)..(98): NCBI GI NO: 9454557 NR Description: Putative ubiquitin carrier protein
  misc_feature (1)..(98): NCBI GI NO: 34903234 NR Description: unnamed protein product
  misc_feature (1)..(98): NCBI GI NO: 3915196 NR Description: Ubiquitin-conjugating enzyme E2-C
  misc_feature (1)..(98): NCBI GI NO: 24663332 NR Description: vihar CG10682-PA
  misc_feature (1)..(98): NCBI GI NO: 4388942 NR Description: E2-C
  misc_feature (1)..(123): NCBI GI NO: 6097072 NR Description: cyclin-selective ubiquitin carrier protein E2-C
MMGADPGISAFPEEDNIFCWKGTITGSKDTVFEGTEYRLSLTFSNDYPFKSPKVKFETCCFHPNVDLYGNICLDILQDKWSSAYDVRTILLSIQSLLGTEHQLTIEQSSGSALEQSRRVQEDG

SEQ ID NO: 799 - DNA, 590 bp, Arabidopsis thaliana
  misc_feature (1)..(590): Ceres Seq. ID no. 12420569
aactcatcacttacttaacatactaagagagttattagaacttgcaaaaaatggcttccaaggctttgattctgttaggtctcttctcagttcttctcgtcgtctccgaagtgtctgccgcaaggcaatcgggcatggtgaagccagagagtgaggaaactgtgcaacctgaaggttatggcggtggccacggaggacatggtggtcacggagggggaggaggccacggacatggaggacacaacggaggagggggccacggacttgacggatacggaggaggtggaggacactatggaggaggtggaggacactacggaggaggtggaggacactacggaggaggtggaggacactacggaggaggtggtggaggacacggaggtggaggacactacggaggtggtggaggaggatacggaggtggaggaggacaccacggaggaggaggccacgggctaaacgaacctgttcagactaagccgggtgtttaaaactatataatatcttcactaccatgcatgattgcatatatatatatacgcttatgtattatctatatgcctataaataaaccatggtgagtttgt

SEQ ID NO: 800 - protein, 147 aa, Arabidopsis thaliana
  peptide (1)..(147): Ceres Seq. ID no. 12420570
  misc_feature (38)..(146): Pfam Name: LMP1 Pfam Description: Herpesvirus latent membrane protein 1
  misc_feature (1)..(147): NCBI GI NO: 30678191 NR Description: glycine-rich protein [Arabidopsis thaliana]
  misc_feature (1)..(147): NCBI GI NO: 15224540 NR Description: putative glycine-rich protein
  misc_feature (1)..(147): NCBI GI NO: 21536606 NR Description: putative glycine-rich protein
  misc_feature (1)..(147): NCBI GI NO: 15224547 NR Description: putative glycine-rich protein
  misc_feature (1)..(147): NCBI GI NO: 9957568 NR Description: antimicrobial peptide shep-GRP
  misc_feature (3)..(136): NCBI GI NO: 121644 NR Description: Glycine-rich cell wall structural protein precursor
  misc_feature (42)..(136): NCBI GI NO: 33239465 NR Description: RNA-binding protein, RRM domain
  misc_feature (1)..(146): NCBI GI NO: 15224548 NR Description: putative glycine-rich protein
  misc_feature (29)..(136): NCBI GI NO: 33239465 NR Description: RNA-binding protein, RRM domain
  misc_feature (1)..(146): NCBI GI NO: 81625 NR Description: glycine-rich protein 3 precursor
MASKALILLGLFSVLLVVSEVSAARQSGMVKPESEETVQPEGYGGGHGGHGGHGGGGGHGHGGHNGGGGHGLDGYGGGGGHYGGGGGHYGGGGGHYGGGGGHYGGGGGGHGGGGHYGGGGGGYGGGGGHHGGGGHGLNEPVQTKPGV

SEQ ID NO: 801 - protein, 119 aa, Arabidopsis thaliana
  peptide (1)..(119): Ceres Seq. ID no. 12420571
  misc_feature (10)..(118): Pfam Name: LMP1 Pfam Description: Herpesvirus latent membrane protein 1
  misc_feature (1)..(119): NCBI GI NO: 30678191 NR Description: glycine-rich protein [Arabidopsis thaliana]
  misc_feature (1)..(119): NCBI GI NO: 15224540 NR Description: putative glycine-rich protein
  misc_feature (1)..(119): NCBI GI NO: 21536606 NR Description: putative glycine-rich protein
  misc_feature (1)..(119): NCBI GI NO: 15224547 NR Description: putative glycine-rich protein
  misc_feature (1)..(119): NCBI GI NO: 9957568 NR Description: antimicrobial peptide shep-GRP
  misc_feature (1)..(108): NCBI GI NO: 121644 NR Description: Glycine-rich cell wall structural protein precursor
  misc_feature (14)..(108): NCBI GI NO: 33239465 NR Description: RNA-binding protein, RRM domain
  misc_feature (1)..(118): NCBI GI NO: 15224548 NR Description: putative glycine-rich protein
  misc_feature (1)..(108): NCBI GI NO: 33239465 NR Description: RNA-binding protein, RRM domain
  misc_feature (1)..(118): NCBI GI NO: 81625 NR Description: glycine-rich protein 3 precursor
MVKPESEETVQPEGYGGGHGGHGGHGGGGGHGHGGHNGGGGHGLDGYGGGGGHYGGGGGHYGGGGGHYGGGGGHYGGGGGGHGGGGHYGGGGGGYGGGGGHHGGGGHGLNEPVQTKPGV

SEQ ID NO: 802 - protein, 94 aa, Arabidopsis thaliana
  peptide (1)..(94): Ceres Seq. ID no. 12420572
  misc_feature (1)..(75): Pfam Name: Pfam Description:  Transferrin binding protein-like solute binding protein
MAVATEDMVVTEGEEATDMEDTTEEGATDLTDTEEVEDTMEEVEDTTEEVEDTTEEVEDTTEEVVEDTEVEDTTEVVEEDTEVEEDTTEEEATG

SEQ ID NO: 803 - DNA, 1527 bp, Arabidopsis thaliana
  misc_feature (1)..(1527): Ceres Seq. ID no. 13496848
atgtcaaagctaatgaccagaaccagcggatcatcaagccccaacacgattccagaccaaatcgaatcaccaacaagctcaagatcggtgacgcagacgacaaacggatcgcaccaattcgtgatacaaggatacagtttagctaaaggaattggtgtagggaaacacatagcaagtgataatttctccgtaggaggttatcaatggactatcttcgtctaccctgacggtaaaaatccagaggataactcttcttacgtctctgtgttcatcgttttggctagtgaatgtactgaagttagagcgctttttgagctttctcttgttgatcaaagtggtaaagggaagcataaggttcatagccattttaatcgttcacttgatggtggtccttatacgcttaagtacagaggaagtatgtggggatacaagcgtttcttcagacggtccttgcttgagacatctgactatcttaaagacgattgcttgaaaattaattgtacagttggagttgtcgtttcagaaatgcattgcccacggttactctcgattcatgtcccagactcagaacttggatcacattttggaaagttgctggatactttacaaggctcggatgtcacatttgacgttgccggtgagaagtttcaagctcataaattggttttggctgcacgatctcagtttttcagatcaatgttttacaatactctagcagagaacaacagcgacgtagtgatcagcgatttggaacctaaggttttcaaggccttgttacacttcatgtataaagattccctcccaggagatgtggaaccattaacggctcattcatttgacctattaaggccgtccgaaatagatgatacactgattgtaaagcttctggcagctgcggaaatgtacaatctgagtaggctcagattattgtgtgaatctcacatctgcaaaggcatatctatcagctccgtgtccaagatcttagctttatccgacaaatataatgcatccgaactaaaaagcgtttccttaaaattcactgcagaaaacctagcagctgttctgcagacaaaagcatatgaagatctgaaggatgactgtccaaacctccagtctgagctactaaaggcggtcgctggttatgacgacacaagtagcagcggaggaggaaagtctcagagtgtttgggctcaactctctaacggtggtgagaccagtagccgaagggtcaggcagcgaaccacttagaagagcttcttcacatgttgttaacaaactacttttgcttaccactcgtaaacagattaaccggtttatctagtatgtaccgaatgaaagggaagcggagccagaaatcttgtaccacaagagaagagctatgcggctgtgcactagtgattaaccggtgcttcacctttcagttccttcacgtctctgtggatttttgttgttgagtctttttttcaaattcttttcccagcttcaaattactagaaacttatgatgatataatagaaagagttaact

SEQ ID NO: 804 - protein, 415 aa, Arabidopsis thaliana
  peptide (1)..(415): Ceres Seq. ID no. 13496849
  misc_feature (195)..(319): Pfam Name: Pfam Description:  BTB/POZ domain
  misc_feature (1)..(415): NCBI GI NO: 30691638 NR Description: expressed protein [Arabidopsis thaliana]
  misc_feature (5)..(415): NCBI GI NO: 11282376 NR Description: hypothetical protein F23N14
  misc_feature (18)..(415): NCBI GI NO: 15242126 NR Description: expressed protein [Arabidopsis thaliana]
  misc_feature (18)..(415): NCBI GI NO: 21536843 NR Description: unknown [Arabidopsis thaliana]
  misc_feature (18)..(392): NCBI GI NO: 14596183 NR Description: Unknown protein [Arabidopsis thaliana]
  misc_feature (20)..(411): NCBI GI NO: 30678912 NR Description: expressed protein [Arabidopsis thaliana]
  misc_feature (25)..(411): NCBI GI NO: 21536509 NR Description: unknown [Arabidopsis thaliana]
  misc_feature (19)..(414): NCBI GI NO: 34900034 NR Description: OJ1641_C04.24
  misc_feature (19)..(413): NCBI GI NO: 28269444 NR Description: unknown protein
  misc_feature (9)..(413): NCBI GI NO: 23617108 NR Description: contains ESTs AU056959
MSKLMTRTSGSSSPNTIPDQIESPTSSRSVTQTTNGSHQFVIQGYSLAKGIGVGKHIASDNFSVGGYQWTIFVYPDGKNPEDNSSYVSVFIVLASECTEVRALFELSLVDQSGKGKHKVHSHFNRSLDGGPYTLKYRGSMWGYKRFFRRSLLETSDYLKDDCLKINCTVGVVVSEMHCPRLLSIHVPDSELGSHFGKLLDTLQGSDVTFDVAGEKFQAHKLVLAARSQFFRSMFYNTLAENNSDVVISDLEPKVFKALLHFMYKDSLPGDVEPLTAHSFDLLRPSEIDDTLIVKLLAAAEMYNLSRLRLLCESHICKGISISSVSKILALSDKYNASELKSVSLKFTAENLAAVLQTKAYEDLKDDCPNLQSELLKAVAGYDDTSSSGGGKSQSVWAQLSNGGETSSRRVRQRTT

SEQ ID NO: 805 - protein, 411 aa, Arabidopsis thaliana
  peptide (1)..(411): Ceres Seq. ID no. 13496850
  misc_feature (191)..(315): Pfam Name: Pfam Description:  BTB/POZ domain
  misc_feature (1)..(411): NCBI GI NO: 30691638 NR Description: expressed protein [Arabidopsis thaliana]
  misc_feature (1)..(411): NCBI GI NO: 11282376 NR Description: hypothetical protein F23N14
  misc_feature (14)..(411): NCBI GI NO: 15242126 NR Description: expressed protein [Arabidopsis thaliana]
  misc_feature (14)..(411): NCBI GI NO: 21536843 NR Description: unknown [Arabidopsis thaliana]
  misc_feature (14)..(388): NCBI GI NO: 14596183 NR Description: Unknown protein [Arabidopsis thaliana]
  misc_feature (16)..(407): NCBI GI NO: 30678912 NR Description: expressed protein [Arabidopsis thaliana]
  misc_feature (21)..(407): NCBI GI NO: 21536509 NR Description: unknown [Arabidopsis thaliana]
  misc_feature (15)..(410): NCBI GI NO: 34900034 NR Description: OJ1641_C04.24
  misc_feature (15)..(409): NCBI GI NO: 28269444 NR Description: unknown protein
  misc_feature (5)..(409): NCBI GI NO: 23617108 NR Description: contains ESTs AU056959
MTRTSGSSSPNTIPDQIESPTSSRSVTQTTNGSHQFVIQGYSLAKGIGVGKHIASDNFSVGGYQWTIFVYPDGKNPEDNSSYVSVFIVLASECTEVRALFELSLVDQSGKGKHKVHSHFNRSLDGGPYTLKYRGSMWGYKRFFRRSLLETSDYLKDDCLKINCTVGVVVSEMHCPRLLSIHVPDSELGSHFGKLLDTLQGSDVTFDVAGEKFQAHKLVLAARSQFFRSMFYNTLAENNSDVVISDLEPKVFKALLHFMYKDSLPGDVEPLTAHSFDLLRPSEIDDTLIVKLLAAAEMYNLSRLRLLCESHICKGISISSVSKILALSDKYNASELKSVSLKFTAENLAAVLQTKAYEDLKDDCPNLQSELLKAVAGYDDTSSSGGGKSQSVWAQLSNGGETSSRRVRQRTT

SEQ ID NO: 806 - protein, 276 aa, Arabidopsis thaliana
  peptide (1)..(276): Ceres Seq. ID no. 13496851
  misc_feature (56)..(180): Pfam Name: Pfam Description:  BTB/POZ domain
  misc_feature (1)..(276): NCBI GI NO: 30691638 NR Description: expressed protein [Arabidopsis thaliana]
  misc_feature (1)..(276): NCBI GI NO: 11282376 NR Description: hypothetical protein F23N14
  misc_feature (1)..(276): NCBI GI NO: 15242126 NR Description: expressed protein [Arabidopsis thaliana]
  misc_feature (1)..(276): NCBI GI NO: 21536843 NR Description: unknown [Arabidopsis thaliana]
  misc_feature (1)..(253): NCBI GI NO: 14596183 NR Description: Unknown protein [Arabidopsis thaliana]
  misc_feature (1)..(272): NCBI GI NO: 30678912 NR Description: expressed protein [Arabidopsis thaliana]
  misc_feature (1)..(272): NCBI GI NO: 21536509 NR Description: unknown [Arabidopsis thaliana]
  misc_feature (1)..(275): NCBI GI NO: 34900034 NR Description: OJ1641_C04.24
  misc_feature (1)..(274): NCBI GI NO: 28269444 NR Description: unknown protein
  misc_feature (1)..(274): NCBI GI NO: 23617108 NR Description: contains ESTs AU056959
MWGYKRFFRRSLLETSDYLKDDCLKINCTVGVVVSEMHCPRLLSIHVPDSELGSHFGKLLDTLQGSDVTFDVAGEKFQAHKLVLAARSQFFRSMFYNTLAENNSDVVISDLEPKVFKALLHFMYKDSLPGDVEPLTAHSFDLLRPSEIDDTLIVKLLAAAEMYNLSRLRLLCESHICKGISISSVSKILALSDKYNASELKSVSLKFTAENLAAVLQTKAYEDLKDDCPNLQSELLKAVAGYDDTSSSGGGKSQSVWAQLSNGGETSSRRVRQRTT

SEQ ID NO: 807 - DNA, 1191 bp, Arabidopsis thaliana
  misc_feature (1)..(1191): Ceres Seq. ID no. 12328954
ccgaaagagagaaatcaatttgaccaatcaaataattgcggtggtgaaaatggctcgaaacgactcgcgatctaggtcgccgtctcaccgccgacggtactctcgctcgcctgtgactcatcgtagcagccgtcgtaccaggcgcgaccgcagccgctcaccctacacatcaaggcataagaagagcagatctcctgcaccaaggcaacaccaaagggatagaagtagttcattgtctccttccgagcatagaattgcgattgaagtgaagaaagaacaggaagacaaggcaagattgcagcatgaggcggagctcaagcgactagaagaagagactgcacagcggattgaggaagcagtaaggaaaaatgtagaggaaaggatgaaaaccgaagaagttaaagaagaaattgaaagacggacaaaggaagcttatgagaagatgtttcttgacgtggaaatacagctgaagaaagaaaaagaagctgctctaaacgaggcaagaagaaaagaagaacaagctaggagagaaagagaagagctggataagatgttagaagaaaatagtaggagggttgaagaatctcaaaggcgagaagcaatggaacttcaacgtaaagaagaggaaaggtatcgagaattggagctcctgcagagacagaaggaggaggctgcaaggagaaagaagctggaagaagaagaagagattagaaactccagcaagctatcaaatggaaacagatcacgatccaagctgcatttcggcatgggtttataattaaagaaacattgatgaaggcaaagtctgaagaaacttttgacttcttgtatcagagaataggaagatacagttgaggagttgactcatccaagtaagcacagacaacattctctagctgacccttcatagagcttgttgcttcactatgttagttaatctttggaaagaagcatctatcagtttggtaaagtttgataatagctctggcgggctttgggctggcgggttgggccggacctgatcaaaagcctgttttaacatgtgaggaataattgtaatttcttttttttgttagtttacttagaaaaagttgcatgttgttaaaaatctgataatatgatttgttttatcgatttttttgttttataataccagaagtttagaaaatgcacagtatatatactttctag

SEQ ID NO: 808 - protein, 258 aa, Arabidopsis thaliana
  peptide (1)..(258): Ceres Seq. ID no. 12328955
  misc_feature (57)..(245): Pfam Name: Pfam Description:  Caldesmon
  misc_feature (17)..(258): NCBI GI NO: 15240607 NR Description: putative protein; protein id: At5g13340.1
  misc_feature (31)..(256): NCBI GI NO: 15220234 NR Description: unknown protein; protein id: At1g10890.1
  misc_feature (98)..(246): NCBI GI NO: 37532486 NR Description: hypothetical protein
  misc_feature (16)..(256): NCBI GI NO: 39795605 NR Description: Unknown (protein for MGC:76303)
  misc_feature (16)..(256): NCBI GI NO: 8922259 NR Description: hypothetical protein FLJ10154 [Homo sapiens]
  misc_feature (16)..(256): NCBI GI NO: 34879649 NR Description: similar to hypothetical protein FLJ10154
  misc_feature (19)..(256): NCBI GI NO: 17862050 NR Description: LD06138p [Drosophila melanogaster]
  misc_feature (16)..(256): NCBI GI NO: 28278343 NR Description: Unknown (protein for MGC:55548) [Danio rerio]
  misc_feature (16)..(256): NCBI GI NO: 38541231 NR Description: Unknown (protein for MGC:77695) [Danio rerio]
  misc_feature (16)..(256): NCBI GI NO: 27881860 NR Description: Unknown (protein for MGC:55375) [Danio rerio]
RKREINLTNQIIAVVKMARNDSRSRSPSHRRRYSRSPVTHRSSRRTRRDRSRSPYTSRHKKSRSPAPRQHQRDRSSSLSPSEHRIAIEVKKEQEDKARLQHEAELKRLEEETAQRIEEAVRKNVEERMKTEEVKEEIERRTKEAYEKMFLDVEIQLKKEKEAALNEARRKEEQARREREELDKMLEENSRRVEESQRREAMELQRKEEERYRELELLQRQKEEAARRKKLEEEEEIRNSSKLSNGNRSRSKLHFGMGL

SEQ ID NO: 809 - protein, 242 aa, Arabidopsis thaliana
  peptide (1)..(242): Ceres Seq. ID no. 12328956
  misc_feature (41)..(229): Pfam Name: Pfam Description:  Caldesmon
  misc_feature (1)..(242): NCBI GI NO: 15240607 NR Description: putative protein; protein id: At5g13340.1
  misc_feature (15)..(240): NCBI GI NO: 15220234 NR Description: unknown protein; protein id: At1g10890.1
  misc_feature (82)..(230): NCBI GI NO: 37532486 NR Description: hypothetical protein
  misc_feature (1)..(240): NCBI GI NO: 39795605 NR Description: Unknown (protein for MGC:76303)
  misc_feature (1)..(240): NCBI GI NO: 8922259 NR Description: hypothetical protein FLJ10154 [Homo sapiens]
  misc_feature (1)..(240): NCBI GI NO: 34879649 NR Description: similar to hypothetical protein FLJ10154
  misc_feature (3)..(240): NCBI GI NO: 17862050 NR Description: LD06138p [Drosophila melanogaster]
  misc_feature (1)..(240): NCBI GI NO: 28278343 NR Description: Unknown (protein for MGC:55548) [Danio rerio]
  misc_feature (1)..(240): NCBI GI NO: 38541231 NR Description: Unknown (protein for MGC:77695) [Danio rerio]
  misc_feature (1)..(240): NCBI GI NO: 27881860 NR Description: Unknown (protein for MGC:55375) [Danio rerio]
MARNDSRSRSPSHRRRYSRSPVTHRSSRRTRRDRSRSPYTSRHKKSRSPAPRQHQRDRSSSLSPSEHRIAIEVKKEQEDKARLQHEAELKRLEEETAQRIEEAVRKNVEERMKTEEVKEEIERRTKEAYEKMFLDVEIQLKKEKEAALNEARRKEEQARREREELDKMLEENSRRVEESQRREAMELQRKEEERYRELELLQRQKEEAARRKKLEEEEEIRNSSKLSNGNRSRSKLHFGMGL

SEQ ID NO: 810 - protein, 131 aa, Arabidopsis thaliana
  peptide (1)..(131): Ceres Seq. ID no. 12328957
  misc_feature (1)..(118): Pfam Name: Pfam Description:  Caldesmon
  misc_feature (1)..(131): NCBI GI NO: 15240607 NR Description: putative protein; protein id: At5g13340.1
  misc_feature (1)..(129): NCBI GI NO: 15220234 NR Description: unknown protein; protein id: At1g10890.1
  misc_feature (1)..(119): NCBI GI NO: 37532486 NR Description: hypothetical protein
  misc_feature (1)..(129): NCBI GI NO: 39795605 NR Description: Unknown (protein for MGC:76303)
  misc_feature (1)..(129): NCBI GI NO: 8922259 NR Description: hypothetical protein FLJ10154 [Homo sapiens]
  misc_feature (1)..(129): NCBI GI NO: 34879649 NR Description: similar to hypothetical protein FLJ10154
  misc_feature (1)..(129): NCBI GI NO: 17862050 NR Description: LD06138p [Drosophila melanogaster]
  misc_feature (1)..(129): NCBI GI NO: 28278343 NR Description: Unknown (protein for MGC:55548) [Danio rerio]
  misc_feature (1)..(129): NCBI GI NO: 38541231 NR Description: Unknown (protein for MGC:77695) [Danio rerio]
  misc_feature (1)..(129): NCBI GI NO: 27881860 NR Description: Unknown (protein for MGC:55375) [Danio rerio]
MKTEEVKEEIERRTKEAYEKMFLDVEIQLKKEKEAALNEARRKEEQARREREELDKMLEENSRRVEESQRREAMELQRKEEERYRELELLQRQKEEAARRKKLEEEEEIRNSSKLSNGNRSRSKLHFGMGL

SEQ ID NO: 811 - DNA, 865 bp, Arabidopsis thaliana
  misc_feature (1)..(865): Ceres Seq. ID no. 12559367
atagagattggagagcgagcgagacaaatcagaagagagagatttagatattgtagagtgagattctaaagagagagagagagagagatatggctagtggaatcgctcgtggtcgtttagctgaagagaggaaatcgtggaggaagaatcatcctcatggttttgtggcaaagccggagacggggcaggatggaactgtgaatctaatggtgtggcattgcactatacctggtaaagctgggactgattgggaaggtggattctttccattaacgatgcacttcagtgaggattatccgagcaaacctccgaaatgtaaatttccacaagggtttttccaccctaatgtctatccatctggaactgtctgtctctctatccttaacgaggattatggatggagaccagccatcaccgtgaagcagattcttgttggtattcaggatttacttgacacaccgaatcccgctgaccctgcacagacagatggttatcatctcttctgtcaggatccagttgagtacaagaaaagggtgaagctgcagtccaagcagtatcctgctcttgtctaaaacctcaaaaaagagaacgcaccaaaactgatgacaagctctgaatattttctcgtcttgtgtcattatgtttagatgtcattgggtgattgaaaactcctcattttggcaccttaagacactggaatctatttattttcgaaaaaaaactcttctttctctatttaactgttaatattcttggtactgattcagttggtgttgcttctatataatacataattatgttctctggtcgttcatgagtgttgtccaaattctactaagtgaaatatgaagtcttcattccatag

SEQ ID NO: 812 - protein, 160 aa, Arabidopsis thaliana
  peptide (1)..(160): Ceres Seq. ID no. 12559368
  misc_feature (1)..(160): NCBI GI NO: 15230881 NR Description: E2 ubiquitin-conjugating-like enzyme, Ahus5
  misc_feature (1)..(160): NCBI GI NO: 25446690 NR Description: Putative ubiquitin-conjugating enzyme
  misc_feature (1)..(160): NCBI GI NO: 20975734 NR Description: putative ubiquitin-conjugating enzyme
  misc_feature (1)..(160): NCBI GI NO: 37536440 NR Description: putative ubiquitin-conjugating enzyme
  misc_feature (35)..(160): NCBI GI NO: 11272348 NR Description: ubiquitin-conjugating enzyme
  misc_feature (1)..(158): NCBI GI NO: 38345867 NR Description: OSJNBa0064M23.9
  misc_feature (3)..(157): NCBI GI NO: 7621708 NR Description: putative E2 enzyme Ubc9 [Dictyostelium discoideum]
  misc_feature (3)..(159): NCBI GI NO: 30584109 NR Description: Homo sapiens ubiquitin-conjugating enzyme E2I
  misc_feature (3)..(156): NCBI GI NO: 2194010 NR Description: Chain A, Human Ubiquitin-Conjugating Enzyme Ubc9
  misc_feature (3)..(156): NCBI GI NO: 3212324 NR Description: Human Ubc9
MASGIARGRLAEERKSWRKNHPHGFVAKPETGQDGTVNLMVWHCTIPGKAGTDWEGGFFPLTMHFSEDYPSKPPKCKFPQGFFHPNVYPSGTVCLSILNEDYGWRPAITVKQILVGIQDLLDTPNPADPAQTDGYHLFCQDPVEYKKRVKLQSKQYPALV

SEQ ID NO: 813 - protein, 121 aa, Arabidopsis thaliana
  peptide (1)..(121): Ceres Seq. ID no. 12559369
  misc_feature (1)..(121): NCBI GI NO: 15230881 NR Description: E2 ubiquitin-conjugating-like enzyme, Ahus5
  misc_feature (1)..(121): NCBI GI NO: 25446690 NR Description: Putative ubiquitin-conjugating enzyme
  misc_feature (1)..(121): NCBI GI NO: 20975734 NR Description: putative ubiquitin-conjugating enzyme
  misc_feature (1)..(121): NCBI GI NO: 37536440 NR Description: putative ubiquitin-conjugating enzyme
  misc_feature (1)..(121): NCBI GI NO: 11272348 NR Description: ubiquitin-conjugating enzyme
  misc_feature (1)..(119): NCBI GI NO: 38345867 NR Description: OSJNBa0064M23.9
  misc_feature (1)..(118): NCBI GI NO: 7621708 NR Description: putative E2 enzyme Ubc9 [Dictyostelium discoideum]
  misc_feature (1)..(120): NCBI GI NO: 30584109 NR Description: Homo sapiens ubiquitin-conjugating enzyme E2I
  misc_feature (1)..(117): NCBI GI NO: 2194010 NR Description: Chain A, Human Ubiquitin-Conjugating Enzyme Ubc9
  misc_feature (1)..(117): NCBI GI NO: 3212324 NR Description: Human Ubc9
MVWHCTIPGKAGTDWEGGFFPLTMHFSEDYPSKPPKCKFPQGFFHPNVYPSGTVCLSILNEDYGWRPAITVKQILVGIQDLLDTPNPADPAQTDGYHLFCQDPVEYKKRVKLQSKQYPALV

SEQ ID NO: 814 - protein, 98 aa, Arabidopsis thaliana
  peptide (1)..(98): Ceres Seq. ID no. 12559370
  misc_feature (1)..(98): NCBI GI NO: 15230881 NR Description: E2 ubiquitin-conjugating-like enzyme, Ahus5
  misc_feature (1)..(98): NCBI GI NO: 25446690 NR Description: Putative ubiquitin-conjugating enzyme
  misc_feature (1)..(98): NCBI GI NO: 20975734 NR Description: putative ubiquitin-conjugating enzyme
  misc_feature (1)..(98): NCBI GI NO: 37536440 NR Description: putative ubiquitin-conjugating enzyme
  misc_feature (1)..(98): NCBI GI NO: 11272348 NR Description: ubiquitin-conjugating enzyme
  misc_feature (1)..(96): NCBI GI NO: 38345867 NR Description: OSJNBa0064M23.9
  misc_feature (1)..(95): NCBI GI NO: 7621708 NR Description: putative E2 enzyme Ubc9 [Dictyostelium discoideum]
  misc_feature (1)..(97): NCBI GI NO: 30584109 NR Description: Homo sapiens ubiquitin-conjugating enzyme E2I
  misc_feature (1)..(94): NCBI GI NO: 2194010 NR Description: Chain A, Human Ubiquitin-Conjugating Enzyme Ubc9
  misc_feature (1)..(94): NCBI GI NO: 4507785 NR Description: ubiquitin-conjugating enzyme E2I
MHFSEDYPSKPPKCKFPQGFFHPNVYPSGTVCLSILNEDYGWRPAITVKQILVGIQDLLDTPNPADPAQTDGYHLFCQDPVEYKKRVKLQSKQYPALV

SEQ ID NO: 815 - DNA, 533 bp, Arabidopsis thaliana
  misc_feature (1)..(533): Ceres Seq. ID no. 12738178
cacggtttgtggaaacactggattactacacagcgatgtttgagtcgatagatgcagcacggccacgggatgataagcagagaatcagcgcagaacaacactgtgtagcaagagacatagtgaacatgatagcatgtgaggagtcagagagagtagagagacacgaggtactggggaaatggagggtcagaatgatgatggctgggttcacgggttggccggtcagcacatctgcagcgtttgcagcgagtgagatgctgaaagcttatgacaaaaactacaaactgggaggccatgaaggagcgctctacctcttctggaagagacgacccatggctacatgttccgtgtggaagccaaacccaaactagattgggtaagttatagtgatgatggttacttgagtggataaagaagagcacaacaaaaacacatctgtcgctgtaaattttttaggatgtgcaatgatgttttaagttgtaacacaacctaagttatatatgtatacaaaccaaacctggtggttgttttcc

SEQ ID NO: 816 - protein, 122 aa, Arabidopsis thaliana
  peptide (1)..(122): Ceres Seq. ID no. 12738179
  misc_feature (1)..(122): NCBI GI NO: 11358824 NR Description: scarecrow-like protein 13
  misc_feature (1)..(122): NCBI GI NO: 16930433 NR Description: AT4g17230/dl4650c [Arabidopsis thaliana]
  misc_feature (1)..(117): NCBI GI NO: 37533564 NR Description: putative SCARECROW gene regulator-like
  misc_feature (1)..(117): NCBI GI NO: 25989334 NR Description: chitin-inducible gibberellin-responsive protein
  misc_feature (1)..(118): NCBI GI NO: 15238903 NR Description: SCARECROW gene regulator-like
  misc_feature (1)..(118): NCBI GI NO: 26450054 NR Description: putative SCARECROW gene regulator
  misc_feature (1)..(118): NCBI GI NO: 15224425 NR Description: putative SCARECROW gene regulator
  misc_feature (1)..(118): NCBI GI NO: 11358827 NR Description: scarecrow-like protein 5
  misc_feature (1)..(118): NCBI GI NO: 14517552 NR Description: F17J6.12/F17J6.12 [Arabidopsis thaliana]
  misc_feature (1)..(118): NCBI GI NO: 25405382 NR Description: scarecrow-like protein
RFVETLDYYTAMFESIDAARPRDDKQRISAEQHCVARDIVNMIACEESERVERHEVLGKWRVRMMMAGFTGWPVSTSAAFAASEMLKAYDKNYKLGGHEGALYLFWKRRPMATCSVWKPNPN

SEQ ID NO: 817 - protein, 111 aa, Arabidopsis thaliana
  peptide (1)..(111): Ceres Seq. ID no. 12738180
  misc_feature (1)..(111): NCBI GI NO: 11358824 NR Description: scarecrow-like protein 13
  misc_feature (1)..(111): NCBI GI NO: 16930433 NR Description: AT4g17230/dl4650c [Arabidopsis thaliana]
  misc_feature (1)..(106): NCBI GI NO: 37533564 NR Description: putative SCARECROW gene regulator-like
  misc_feature (1)..(106): NCBI GI NO: 25989334 NR Description: chitin-inducible gibberellin-responsive protein
  misc_feature (1)..(107): NCBI GI NO: 15238903 NR Description: SCARECROW gene regulator-like
  misc_feature (1)..(107): NCBI GI NO: 26450054 NR Description: putative SCARECROW gene regulator
  misc_feature (1)..(107): NCBI GI NO: 15224425 NR Description: putative SCARECROW gene regulator
  misc_feature (1)..(107): NCBI GI NO: 11358827 NR Description: scarecrow-like protein 5
  misc_feature (1)..(107): NCBI GI NO: 14517552 NR Description: F17J6.12/F17J6.12 [Arabidopsis thaliana]
  misc_feature (1)..(107): NCBI GI NO: 25405382 NR Description: scarecrow-like protein
MFESIDAARPRDDKQRISAEQHCVARDIVNMIACEESERVERHEVLGKWRVRMMMAGFTGWPVSTSAAFAASEMLKAYDKNYKLGGHEGALYLFWKRRPMATCSVWKPNPN

SEQ ID NO: 818 - protein, 81 aa, Arabidopsis thaliana
  peptide (1)..(81): Ceres Seq. ID no. 12738181
  misc_feature (1)..(81): NCBI GI NO: 11358824 NR Description: scarecrow-like protein 13
  misc_feature (1)..(81): NCBI GI NO: 16930433 NR Description: AT4g17230/dl4650c [Arabidopsis thaliana]
  misc_feature (1)..(76): NCBI GI NO: 37533564 NR Description: putative SCARECROW gene regulator-like
  misc_feature (1)..(76): NCBI GI NO: 25989334 NR Description: chitin-inducible gibberellin-responsive protein
  misc_feature (1)..(77): NCBI GI NO: 15238903 NR Description: SCARECROW gene regulator-like
  misc_feature (1)..(77): NCBI GI NO: 26450054 NR Description: putative SCARECROW gene regulator
  misc_feature (1)..(77): NCBI GI NO: 15224425 NR Description: putative SCARECROW gene regulator
  misc_feature (1)..(77): NCBI GI NO: 11358827 NR Description: scarecrow-like protein 5
  misc_feature (1)..(77): NCBI GI NO: 14517552 NR Description: F17J6.12/F17J6.12 [Arabidopsis thaliana]
  misc_feature (1)..(77): NCBI GI NO: 25405382 NR Description: scarecrow-like protein
MIACEESERVERHEVLGKWRVRMMMAGFTGWPVSTSAAFAASEMLKAYDKNYKLGGHEGALYLFWKRRPMATCSVWKPNPN

SEQ ID NO: 819 - DNA, 987 bp, Arabidopsis thaliana
  misc_feature (1)..(987): Ceres Seq. ID no. 12332248
aattggagagacatgatgagagaaatatcactggaatctgaaccagacagtttctgatcttcttctccttagaggatctctcggagaagattcaaaaccaagaacaatctcagtctctatctctctctctgggtgcatttagatggctggagttgtgcgattaacgacgacgtcggttcaagccattcgtgtctcctcgtccttcagctcctttgccaccgctcttaatcctctgcaaccttgcttacctccaaactcgaatctgaattccgacaagagattgcgtcttctctcatcttctccttcctgctcgtcttctcattaccacccatcttctggtctcggaagccatctcccccttagacgacccaagagccaagtggttcgtgtcaagttagatgaaaatgtagccgagacagagccaccgaaatggtgggagaggaatgctccaaacatggtcgatattcattctactgaagagttcttgagcgctttaagcggtgcgggtgaaagattagttattgtagagttttatggaacttggtgtgcttcttgcagagcattgttcccaaagctttgcaagacagcggtggaacatcccgatatagtgttccttaaagtaaactttgatgagaataaaccgatgtgcaagagtttgaacgtgagagtgcttccttttttccacttttaccgtggagctgatggtcagcttgagtcattctcatgttctcttgctaagtttcagaagataaaagatgcaatccaactgcacaataccgatcgttgcagcctcggtccagccaaggtacctgaaggcttaacattagccaaaccagctgcatcaagttgaagtgccagatttttagatatattactaaggcaacaatctttggttgctcaagcaaatactcagcttaaaattctgtatatcgtcatatttttgggtgtaaaagaatacttcctaaagccagttacgattcttctgcc

SEQ ID NO: 820 - protein, 235 aa, Arabidopsis thaliana
  peptide (1)..(235): Ceres Seq. ID no. 12332249
  misc_feature (105)..(212): Pfam Name: Pfam Description:  Thioredoxin
  misc_feature (1)..(235): NCBI GI NO: 21554313 NR Description: thioredoxin-like protein [Arabidopsis thaliana]
  misc_feature (1)..(235): NCBI GI NO: 18417441 NR Description: Thioredoxin - like protein; protein id: At4g29670
  misc_feature (1)..(218): NCBI GI NO: 30688403 NR Description: thioredoxin family [Arabidopsis thaliana]
  misc_feature (8)..(216): NCBI GI NO: 21553512 NR Description: putative thioredoxin [Arabidopsis thaliana]
  misc_feature (8)..(216): NCBI GI NO: 15236134 NR Description: putative thioredoxin; protein id: At4g26160
  misc_feature (18)..(216): NCBI GI NO: 4973258 NR Description: thioredoxin-like 2 [Arabidopsis thaliana]
  misc_feature (105)..(218): NCBI GI NO: 14423392 NR Description: Thioredoxin-like protein [Arabidopsis thaliana]
  misc_feature (64)..(234): NCBI GI NO: 308906 NR Description: thioredoxin
  misc_feature (96)..(234): NCBI GI NO: 15223262 NR Description: putative thioredoxin; protein id: At1g08570
  misc_feature (96)..(221): NCBI GI NO: 34394520 NR Description: putative thioredoxin
MAGVVRLTTTSVQAIRVSSSFSSFATALNPLQPCLPPNSNLNSDKRLRLLSSSPSCSSSHYHPSSGLGSHLPLRRPKSQVVRVKLDENVAETEPPKWWERNAPNMVDIHSTEEFLSALSGAGERLVIVEFYGTWCASCRALFPKLCKTAVEHPDIVFLKVNFDENKPMCKSLNVRVLPFFHFYRGADGQLESFSCSLAKFQKIKDAIQLHNTDRCSLGPAKVPEGLTLAKPAASS

SEQ ID NO: 821 - protein, 131 aa, Arabidopsis thaliana
  peptide (1)..(131): Ceres Seq. ID no. 12332250
  misc_feature (1)..(108): Pfam Name: Pfam Description:  Thioredoxin
  misc_feature (1)..(131): NCBI GI NO: 21554313 NR Description: thioredoxin-like protein [Arabidopsis thaliana]
  misc_feature (1)..(131): NCBI GI NO: 18417441 NR Description: Thioredoxin - like protein; protein id: At4g29670
  misc_feature (1)..(114): NCBI GI NO: 30688403 NR Description: thioredoxin family [Arabidopsis thaliana]
  misc_feature (1)..(112): NCBI GI NO: 21553512 NR Description: putative thioredoxin [Arabidopsis thaliana]
  misc_feature (1)..(112): NCBI GI NO: 15236134 NR Description: putative thioredoxin; protein id: At4g26160
  misc_feature (1)..(112): NCBI GI NO: 4973258 NR Description: thioredoxin-like 2 [Arabidopsis thaliana]
  misc_feature (1)..(114): NCBI GI NO: 14423392 NR Description: Thioredoxin-like protein [Arabidopsis thaliana]
  misc_feature (1)..(130): NCBI GI NO: 308906 NR Description: thioredoxin
  misc_feature (1)..(130): NCBI GI NO: 15223262 NR Description: putative thioredoxin; protein id: At1g08570
  misc_feature (1)..(117): NCBI GI NO: 34394520 NR Description: putative thioredoxin
MVDIHSTEEFLSALSGAGERLVIVEFYGTWCASCRALFPKLCKTAVEHPDIVFLKVNFDENKPMCKSLNVRVLPFFHFYRGADGQLESFSCSLAKFQKIKDAIQLHNTDRCSLGPAKVPEGLTLAKPAASS

SEQ ID NO: 822 - DNA, 818 bp, Arabidopsis thaliana
  misc_feature (1)..(818): Ceres Seq. ID no. 12332246
ggagacggaagaaaattcgaatcatcagtgtttgtttcctcctctcttaaagcttagcccttctcaggtcattgttcttcaatggcttcgagcaacacgactactggggttgataatacgtttagaaagaagtttgatgtggaagagtttaaggagcgtgctcgtgaacgcgaaaagaaggaatcggatcggtctaaatctcggtccaaaggtcctcctgtgcaaagagcccctttgaagcatagagattatcatgtagacctagaatctcgtctgggcaagacacaggtcgttacaccggtagcgcctctaagtcagcaggctggttatttctgtcgcgtttgtgattgtgttgttaaagattcggcaaactacttggatcacataaatgggaaaaaacatcaaagggcattggggatgtctatgcgggtggagagatcgtcacttgaacaagtccaagagcggttcgaggttttaaagaagcggaaagcgccaggaactttcacagaacaagatctggacgaacgcatccgaaaacagcaagaagaagaggaagaactaaaaaggcagcgtagagagaaaaagaaagagaagaagaaagggaaggtggtggaagaagagcctgagatggatcctgaggttgcagagatgatgggatttgggggctttggatcttcaaaaaaatcatgatgattatatgatcacttgtatctttgtcttgtagcgtttttgatccaaagtttgcaactttgtaatctgacacatcataacgatatttttctcattgtgcaagaagaggaatttgatggcaatttacc

SEQ ID NO: 823 - protein, 202 aa, Arabidopsis thaliana
  peptide (1)..(202): Ceres Seq. ID no. 12332247
  misc_feature (83)..(107): Pfam Name: Pfam Description:  Zinc finger, C2H2 type
  misc_feature (1)..(202): NCBI GI NO: 18397358 NR Description: expressed protein; protein id: At3g05760
  misc_feature (1)..(172): NCBI GI NO: 6714389 NR Description: hypothetical protein [Arabidopsis thaliana]
  misc_feature (4)..(201): NCBI GI NO: 34897240 NR Description: unknown protein
  misc_feature (8)..(201): NCBI GI NO: 37595334 NR Description: z2610510D14Rik [Danio rerio]
  misc_feature (1)..(202): NCBI GI NO: 13385046 NR Description: RIKEN cDNA 2610510D14 [Mus musculus]
  misc_feature (14)..(202): NCBI GI NO: 34878791 NR Description: similar to histidyl-tRNA synthetase-like
  misc_feature (15)..(202): NCBI GI NO: 21355873 NR Description: CG11586-PA [Drosophila melanogaster]
  misc_feature (3)..(201): NCBI GI NO: 39581678 NR Description: Hypothetical protein CBG00030
  misc_feature (3)..(201): NCBI GI NO: 17557051 NR Description: Putative nuclear protein family member
  misc_feature (5)..(180): NCBI GI NO: 23509107 NR Description: hypothetical protein, conserved
MASSNTTTGVDNTFRKKFDVEEFKERAREREKKESDRSKSRSKGPPVQRAPLKHRDYHVDLESRLGKTQVVTPVAPLSQQAGYFCRVCDCVVKDSANYLDHINGKKHQRALGMSMRVERSSLEQVQERFEVLKKRKAPGTFTEQDLDERIRKQQEEEEELKRQRREKKKEKKKGKVVEEEPEMDPEVAEMMGFGGFGSSKKS

SEQ ID NO: 824 - DNA, 1631 bp, Arabidopsis thaliana
  misc_feature (1)..(1631): Ceres Seq. ID no. 12321799
aacaaacaaacaaaaacacaccaattccttcattcatcttctccatttcgtaattcgtacacttcactctcaagtctctctaagccacaaaccactgaagaagaatccatctaagagctgttaaaaattgatgaagcttcgaatatgaagaaattgaaaagctattacatgcaagttcgtaaccagcaacaatctcttgaccgaaaatggattcttccattagcaatcggatccatttgttctctctttctcttgttgctaacgaacttagcttcttcttctggtcaaactcgtttgattccattttcagtttacggatttagatcctccgtcttcgtcgaatccaagataaatccagtatccgtctcactcaccgtctccgtctctcctcctccgccgccacgtctcgcttatctaatctccggctcctctggtgacggtcagatgctgaaacgaactctaatggcgctttatcatcccaacaaccagtacgttgttcatctcgatcgggaatcttcaccggaggaacgattggatctcagtggttttgtggcgaatcatactctgtttcagagatttcaaaatgttcggatgattgttaaggctaatttcgttacgtatcgtggtccaactatggtggctaatacacttcacgctgcagcgattttgcttcgtgaaggtggtgattgggattggttcatcaatctcagtgcctctgattatcctctcgtaacacaagatgatctgttgcatacgttttcgtatcttcctcgagatctcaatttcatcgatcatacaagcaacattggctggaaagagtctcatagagcaaagcctataattattgatcctggtttgtatatgtcaaagaaagctgatgttttctgggtttcacagaagagaagtatgcctacagctttcaaactcttcacaggatctgcgtggatgatgttatctagaccttttgtggattatttcatatggggatgggataatcttcctcgaattgtgttaatgtattacgcaaacttcctttcatcgccagaaggttacttccacactgtgatttgcaatgctcgagagtttaccaacacaacggttaacagtgacttacatttcatctcatgggacaatcctccaaagcaacatcctcaccatcttacattagatgatttccagagaatggtggacagtaacgctccttttgctaggaaattccgtagagatgagcctgttctcgataagattgattcggaactattgtttcggagtcacgggatggtcactccgggtggttggtgtattggtacgagggaaaacgggagcgatccgtgtgcggtgattggtgatacgtcggttattaaacctggtcttggagctaaacggatcgagaaactcataacttatttgttatctactgagaatttcagaccacggcaatgccggtaatggcaaattagagttttgtcatagagatggttacgtggtttttcacacaaatgaactgtattgattatccgatactttgatatggttgtatagagatctttttggactttcttcatttgagaaagtgcagaaatttcgggaaagatcattgattattggaatttgtcttctattgccgaccg

SEQ ID NO: 825 - protein, 434 aa, Arabidopsis thaliana
  peptide (1)..(434): Ceres Seq. ID no. 12321800
  misc_feature (88)..(313): Pfam Name: Pfam Description:  Core-2/I-Branching enzyme
  misc_feature (1)..(434): NCBI GI NO: 15242199 NR Description: N-acetylglucosaminyltransferase family
  misc_feature (1)..(434): NCBI GI NO: 15242532 NR Description: N-acetylglucosaminyltransferase family
  misc_feature (19)..(433): NCBI GI NO: 15218824 NR Description: N-acetylglucosaminyltransferase family
  misc_feature (17)..(434): NCBI GI NO: 18400725 NR Description: N-acetylglucosaminyltransferase family
  misc_feature (17)..(434): NCBI GI NO: 15146308 NR Description: AT3g15350/K7L4_15 [Arabidopsis thaliana]
  misc_feature (19)..(434): NCBI GI NO: 30687610 NR Description: N-acetylglucosaminyltransferase family
  misc_feature (19)..(433): NCBI GI NO: 15236287 NR Description: N-acetylglucosaminyltransferase family
  misc_feature (50)..(434): NCBI GI NO: 7486258 NR Description: hypothetical protein F27G19
  misc_feature (18)..(434): NCBI GI NO: 34903664 NR Description: B1015E06.17
  misc_feature (18)..(433): NCBI GI NO: 15219202 NR Description: N-acetylglucosaminyltransferase family
MKKLKSYYMQVRNQQQSLDRKWILPLAIGSICSLFLLLLTNLASSSGQTRLIPFSVYGFRSSVFVESKINPVSVSLTVSVSPPPPPRLAYLISGSSGDGQMLKRTLMALYHPNNQYVVHLDRESSPEERLDLSGFVANHTLFQRFQNVRMIVKANFVTYRGPTMVANTLHAAAILLREGGDWDWFINLSASDYPLVTQDDLLHTFSYLPRDLNFIDHTSNIGWKESHRAKPIIIDPGLYMSKKADVFWVSQKRSMPTAFKLFTGSAWMMLSRPFVDYFIWGWDNLPRIVLMYYANFLSSPEGYFHTVICNAREFTNTTVNSDLHFISWDNPPKQHPHHLTLDDFQRMVDSNAPFARKFRRDEPVLDKIDSELLFRSHGMVTPGGWCIGTRENGSDPCAVIGDTSVIKPGLGAKRIEKLITYLLSTENFRPRQCR

SEQ ID NO: 826 - protein, 426 aa, Arabidopsis thaliana
  peptide (1)..(426): Ceres Seq. ID no. 12321801
  misc_feature (80)..(305): Pfam Name: Pfam Description:  Core-2/I-Branching enzyme
  misc_feature (1)..(426): NCBI GI NO: 15242199 NR Description: N-acetylglucosaminyltransferase family
  misc_feature (1)..(426): NCBI GI NO: 15242532 NR Description: N-acetylglucosaminyltransferase family
  misc_feature (11)..(425): NCBI GI NO: 15218824 NR Description: N-acetylglucosaminyltransferase family
  misc_feature (9)..(426): NCBI GI NO: 18400725 NR Description: N-acetylglucosaminyltransferase family
  misc_feature (9)..(426): NCBI GI NO: 15146308 NR Description: AT3g15350/K7L4_15 [Arabidopsis thaliana]
  misc_feature (11)..(426): NCBI GI NO: 30687610 NR Description: N-acetylglucosaminyltransferase family
  misc_feature (11)..(425): NCBI GI NO: 15236287 NR Description: N-acetylglucosaminyltransferase family
  misc_feature (42)..(426): NCBI GI NO: 7486258 NR Description: hypothetical protein F27G19
  misc_feature (10)..(426): NCBI GI NO: 34903664 NR Description: B1015E06.17
  misc_feature (10)..(425): NCBI GI NO: 15219202 NR Description: N-acetylglucosaminyltransferase family
MQVRNQQQSLDRKWILPLAIGSICSLFLLLLTNLASSSGQTRLIPFSVYGFRSSVFVESKINPVSVSLTVSVSPPPPPRLAYLISGSSGDGQMLKRTLMALYHPNNQYVVHLDRESSPEERLDLSGFVANHTLFQRFQNVRMIVKANFVTYRGPTMVANTLHAAAILLREGGDWDWFINLSASDYPLVTQDDLLHTFSYLPRDLNFIDHTSNIGWKESHRAKPIIIDPGLYMSKKADVFWVSQKRSMPTAFKLFTGSAWMMLSRPFVDYFIWGWDNLPRIVLMYYANFLSSPEGYFHTVICNAREFTNTTVNSDLHFISWDNPPKQHPHHLTLDDFQRMVDSNAPFARKFRRDEPVLDKIDSELLFRSHGMVTPGGWCIGTRENGSDPCAVIGDTSVIKPGLGAKRIEKLITYLLSTENFRPRQCR

SEQ ID NO: 827 - protein, 334 aa, Arabidopsis thaliana
  peptide (1)..(334): Ceres Seq. ID no. 12321802
  misc_feature (1)..(213): Pfam Name: Pfam Description:  Core-2/I-Branching enzyme
  misc_feature (1)..(334): NCBI GI NO: 15242199 NR Description: N-acetylglucosaminyltransferase family
  misc_feature (1)..(334): NCBI GI NO: 15242532 NR Description: N-acetylglucosaminyltransferase family
  misc_feature (1)..(333): NCBI GI NO: 15218824 NR Description: N-acetylglucosaminyltransferase family
  misc_feature (1)..(334): NCBI GI NO: 18400725 NR Description: N-acetylglucosaminyltransferase family
  misc_feature (1)..(334): NCBI GI NO: 15146308 NR Description: AT3g15350/K7L4_15 [Arabidopsis thaliana]
  misc_feature (1)..(334): NCBI GI NO: 30687610 NR Description: N-acetylglucosaminyltransferase family
  misc_feature (1)..(333): NCBI GI NO: 15236287 NR Description: N-acetylglucosaminyltransferase family
  misc_feature (1)..(334): NCBI GI NO: 7486258 NR Description: hypothetical protein F27G19
  misc_feature (1)..(334): NCBI GI NO: 34903664 NR Description: B1015E06.17
  misc_feature (1)..(333): NCBI GI NO: 15219202 NR Description: N-acetylglucosaminyltransferase family
MLKRTLMALYHPNNQYVVHLDRESSPEERLDLSGFVANHTLFQRFQNVRMIVKANFVTYRGPTMVANTLHAAAILLREGGDWDWFINLSASDYPLVTQDDLLHTFSYLPRDLNFIDHTSNIGWKESHRAKPIIIDPGLYMSKKADVFWVSQKRSMPTAFKLFTGSAWMMLSRPFVDYFIWGWDNLPRIVLMYYANFLSSPEGYFHTVICNAREFTNTTVNSDLHFISWDNPPKQHPHHLTLDDFQRMVDSNAPFARKFRRDEPVLDKIDSELLFRSHGMVTPGGWCIGTRENGSDPCAVIGDTSVIKPGLGAKRIEKLITYLLSTENFRPRQCR

SEQ ID NO: 828 - DNA, 1113 bp, Arabidopsis thaliana
  misc_feature (1)..(1113): Ceres Seq. ID no. 13580802
acgttctcattcatgactctatatatttcgcatttcttctcctcaacgctctcataaaaagtagtactcgtgtcttactcgtgccagccactcgcatttctccagattttattatccttcctcgaaacaagagcttagctaagatgacgaagaactacccaaccgtgagcgaagattacaagaaggctgttgagaagtgcaggaggaagctcagaggtttgatcgctgagaagaactgtgcacccatcatggtccgactcgcatggcactctgctggaactttcgattgtcaatcaaggactggaggtccattcggaacaatgaggtttgacgctgagcaagctcatggagccaacagtggtatccacattgctcttaggttgttggaccccatcagggagcaattccctaccatctcttttgctgatttccatcagcttgctggtgttgtggccgttgaagttactggtggccctgacattcctttccaccctggaagagaggacaagccccaaccacctccagagggtcgtcttcctgatgctaccaagggttgtgaccatttgagagatgtctttgctaagcagatgggcttatctgacaaagacattgtcgctttatctggtgcccacactctgggacgatgccacaaggataggtctggcttcgaaggtgcatggacatcaaaccctctaatcttcgacaactcttacttcaaggaactcttgagcggagagaaggaaggccttcttcagcttgtctctgacaaagcactattggacgaccctgttttccgtcctttggtcgagaaatacgctgctgatgaagatgcctttttcgctgattacgctgaggcccacatgaagctttctgagcttgggtttgctgatgcttaagctgtgacgtatgctctgtgtgtgtgtgtgtgtctccccgagagtcatggctgtttttggttgggggctggaggggtcgcattgcatttgaactttgtcatatgattgcttaatgtactctcggatttacgtatctgtttttttcggtgggttgcgatttgaacacatccgttgcgcttttgctgcttagacacattaataaaattaatttctctcg

SEQ ID NO: 829 - protein, 297 aa, Arabidopsis thaliana
  peptide (1)..(297): Ceres Seq. ID no. 13580803
  misc_feature (66)..(274): Pfam Name: Pfam Description:  Peroxidase
  misc_feature (35)..(297): NCBI GI NO: 99735 NR Description: L-ascorbate peroxidase (EC 1
  misc_feature (48)..(297): NCBI GI NO: 15223049 NR Description: ascorbate peroxidase, putative (APX)
  misc_feature (48)..(297): NCBI GI NO: 24421233 NR Description: ascorbate peroxidase [Brassica juncea]
  misc_feature (48)..(297): NCBI GI NO: 24421231 NR Description: ascorbate peroxidase [Brassica juncea]
  misc_feature (48)..(297): NCBI GI NO: 18265381 NR Description: ascorbate peroxidase [Brassica oleracea]
  misc_feature (48)..(297): NCBI GI NO: 18265379 NR Description: ascorbate peroxidase [Brassica oleracea]
  misc_feature (48)..(297): NCBI GI NO: 541927 NR Description: L-ascorbate peroxidase (EC 1.11.1.11) - radish
  misc_feature (48)..(297): NCBI GI NO: 1890354 NR Description: L-ascorbate peroxidase [Brassica napus]
  misc_feature (48)..(297): NCBI GI NO: 7488439 NR Description: L-ascorbate peroxidase (EC 1
  misc_feature (48)..(297): NCBI GI NO: 24636598 NR Description: ascorbate peroxidase [Solanum tuberosum]
VLIHDSIYFAFLLLNALIKSSTRVLLVPATRISPDFIILPRNKSLAKMTKNYPTVSEDYKKAVEKCRRKLRGLIAEKNCAPIMVRLAWHSAGTFDCQSRTGGPFGTMRFDAEQAHGANSGIHIALRLLDPIREQFPTISFADFHQLAGVVAVEVTGGPDIPFHPGREDKPQPPPEGRLPDATKGCDHLRDVFAKQMGLSDKDIVALSGAHTLGRCHKDRSGFEGAWTSNPLIFDNSYFKELLSGEKEGLLQLVSDKALLDDPVFRPLVEKYAADEDAFFADYAEAHMKLSELGFADA

SEQ ID NO: 830 - protein, 250 aa, Arabidopsis thaliana
  peptide (1)..(250): Ceres Seq. ID no. 13580804
  misc_feature (19)..(227): Pfam Name: Pfam Description:  Peroxidase
  misc_feature (1)..(250): NCBI GI NO: 99735 NR Description: L-ascorbate peroxidase (EC 1
  misc_feature (1)..(250): NCBI GI NO: 15223049 NR Description: ascorbate peroxidase, putative (APX)
  misc_feature (1)..(250): NCBI GI NO: 24421233 NR Description: ascorbate peroxidase [Brassica juncea]
  misc_feature (1)..(250): NCBI GI NO: 24421231 NR Description: ascorbate peroxidase [Brassica juncea]
  misc_feature (1)..(250): NCBI GI NO: 18265381 NR Description: ascorbate peroxidase [Brassica oleracea]
  misc_feature (1)..(250): NCBI GI NO: 18265379 NR Description: ascorbate peroxidase [Brassica oleracea]
  misc_feature (1)..(250): NCBI GI NO: 541927 NR Description: L-ascorbate peroxidase (EC 1.11.1.11) - radish
  misc_feature (1)..(250): NCBI GI NO: 1890354 NR Description: L-ascorbate peroxidase [Brassica napus]
  misc_feature (1)..(250): NCBI GI NO: 7488439 NR Description: L-ascorbate peroxidase (EC 1
  misc_feature (1)..(250): NCBI GI NO: 24636598 NR Description: ascorbate peroxidase [Solanum tuberosum]
MTKNYPTVSEDYKKAVEKCRRKLRGLIAEKNCAPIMVRLAWHSAGTFDCQSRTGGPFGTMRFDAEQAHGANSGIHIALRLLDPIREQFPTISFADFHQLAGVVAVEVTGGPDIPFHPGREDKPQPPPEGRLPDATKGCDHLRDVFAKQMGLSDKDIVALSGAHTLGRCHKDRSGFEGAWTSNPLIFDNSYFKELLSGEKEGLLQLVSDKALLDDPVFRPLVEKYAADEDAFFADYAEAHMKLSELGFADA

SEQ ID NO: 831 - protein, 215 aa, Arabidopsis thaliana
  peptide (1)..(215): Ceres Seq. ID no. 13580805
  misc_feature (1)..(192): Pfam Name: Pfam Description:  Peroxidase
  misc_feature (1)..(215): NCBI GI NO: 99735 NR Description: L-ascorbate peroxidase (EC 1
  misc_feature (1)..(215): NCBI GI NO: 15223049 NR Description: ascorbate peroxidase, putative (APX)
  misc_feature (1)..(215): NCBI GI NO: 24421233 NR Description: ascorbate peroxidase [Brassica juncea]
  misc_feature (1)..(215): NCBI GI NO: 24421231 NR Description: ascorbate peroxidase [Brassica juncea]
  misc_feature (1)..(215): NCBI GI NO: 18265381 NR Description: ascorbate peroxidase [Brassica oleracea]
  misc_feature (1)..(215): NCBI GI NO: 18265379 NR Description: ascorbate peroxidase [Brassica oleracea]
  misc_feature (1)..(215): NCBI GI NO: 541927 NR Description: L-ascorbate peroxidase (EC 1.11.1.11) - radish
  misc_feature (1)..(215): NCBI GI NO: 1890354 NR Description: L-ascorbate peroxidase [Brassica napus]
  misc_feature (1)..(215): NCBI GI NO: 7488439 NR Description: L-ascorbate peroxidase (EC 1
  misc_feature (1)..(215): NCBI GI NO: 24636598 NR Description: ascorbate peroxidase [Solanum tuberosum]
MVRLAWHSAGTFDCQSRTGGPFGTMRFDAEQAHGANSGIHIALRLLDPIREQFPTISFADFHQLAGVVAVEVTGGPDIPFHPGREDKPQPPPEGRLPDATKGCDHLRDVFAKQMGLSDKDIVALSGAHTLGRCHKDRSGFEGAWTSNPLIFDNSYFKELLSGEKEGLLQLVSDKALLDDPVFRPLVEKYAADEDAFFADYAEAHMKLSELGFADA

SEQ ID NO: 832 - DNA, 767 bp, Arabidopsis thaliana
  misc_feature (1)..(767): Ceres Seq. ID no. 12481796
acaatagtctccttctgtttctctttatatttgtctctataactctctttcgttaaagtttcataaaacctcaacgaactccttccatggcagcaggactatcaacaatcgccgtaacactcaaaccactcaaccgctcttctttctccgcaaaccaccctatatccaccgcagttttccctccatctctaagattcaacggcttccgacgtcgaaagattctcaccgtttgtttcgtcgtggaagaacggaaacaaagctctcccatggacgatgacaacaaaccagaaagcacgacaagctcttctgagatcttgatgacgtcgcggcttctcaagaaagcggagaagaagaaatcagagaggttcacttatttaatagcagctgtgatgtcgagctttggtatcacttctatggctataatggctgtttattaccgattttcttggcaaatgaagggaggtgaagtgtctgtgttagagatgtttggtacatttgctctttccgttggtgctgccggactgggaataacgatgtttggaatggcttacatgttcgttcacgatggacttgtgcacaagagattccctgtaggtcccattgccaacgttccttaccttcgaaaggtcgccgccgctcaccagctacaccacacagacaaattcaaaggtgtaccatatgggctgtttcttggaccaaaggaagtagaagaagtgggaggaaaagaagagttggagaaagagataagccggagaatcaaattatac

SEQ ID NO: 833 - protein, 227 aa, Arabidopsis thaliana
  peptide (1)..(227): Ceres Seq. ID no. 12481797
  misc_feature (144)..(224): Pfam Name: Pfam Description:  Carotene hydroxylase
  misc_feature (1)..(162): NCBI GI NO: 15237204 NR Description: beta-carotene hydroxylase, putative
  misc_feature (144)..(226): NCBI GI NO: 15237204 NR Description: beta-carotene hydroxylase, putative
  misc_feature (1)..(164): NCBI GI NO: 15235959 NR Description: beta-carotene hydroxylase; protein id: At4g25700
  misc_feature (144)..(226): NCBI GI NO: 15235959 NR Description: beta-carotene hydroxylase; protein id: At4g25700
  misc_feature (18)..(164): NCBI GI NO: 1575296 NR Description: beta-carotene hydroxylase [Arabidopsis thaliana]
  misc_feature (144)..(226): NCBI GI NO: 1575296 NR Description: beta-carotene hydroxylase [Arabidopsis thaliana]
  misc_feature (12)..(164): NCBI GI NO: 5870598 NR Description: beta-carotene hydroxylase
  misc_feature (144)..(226): NCBI GI NO: 5870598 NR Description: beta-carotene hydroxylase
  misc_feature (1)..(164): NCBI GI NO: 9971820 NR Description: beta hydroxylase [Tagetes erecta]
  misc_feature (144)..(226): NCBI GI NO: 9971820 NR Description: beta hydroxylase [Tagetes erecta]
MAAGLSTIAVTLKPLNRSSFSANHPISTAVFPPSLRFNGFRRRKILTVCFVVEERKQSSPMDDDNKPESTTSSSEILMTSRLLKKAEKKKSERFTYLIAAVMSSFGITSMAIMAVYYRFSWQMKGGEVSVLEMFGTFALSVGAAGLGITMFGMAYMFVHDGLVHKRFPVGPIANVPYLRKVAAAHQLHHTDKFKGVPYGLFLGPKEVEEVGGKEELEKEISRRIKLY

SEQ ID NO: 834 - protein, 167 aa, Arabidopsis thaliana
  peptide (1)..(167): Ceres Seq. ID no. 12481798
  misc_feature (84)..(164): Pfam Name: Pfam Description:  Carotene hydroxylase
  misc_feature (1)..(102): NCBI GI NO: 15237204 NR Description: beta-carotene hydroxylase, putative
  misc_feature (84)..(166): NCBI GI NO: 15237204 NR Description: beta-carotene hydroxylase, putative
  misc_feature (1)..(104): NCBI GI NO: 15235959 NR Description: beta-carotene hydroxylase; protein id: At4g25700
  misc_feature (84)..(166): NCBI GI NO: 15235959 NR Description: beta-carotene hydroxylase; protein id: At4g25700
  misc_feature (1)..(104): NCBI GI NO: 1575296 NR Description: beta-carotene hydroxylase [Arabidopsis thaliana]
  misc_feature (84)..(166): NCBI GI NO: 1575296 NR Description: beta-carotene hydroxylase [Arabidopsis thaliana]
  misc_feature (1)..(104): NCBI GI NO: 5870598 NR Description: beta-carotene hydroxylase
  misc_feature (84)..(166): NCBI GI NO: 5870598 NR Description: beta-carotene hydroxylase
  misc_feature (1)..(104): NCBI GI NO: 9971820 NR Description: beta hydroxylase [Tagetes erecta]
  misc_feature (84)..(166): NCBI GI NO: 9971820 NR Description: beta hydroxylase [Tagetes erecta]
MDDDNKPESTTSSSEILMTSRLLKKAEKKKSERFTYLIAAVMSSFGITSMAIMAVYYRFSWQMKGGEVSVLEMFGTFALSVGAAGLGITMFGMAYMFVHDGLVHKRFPVGPIANVPYLRKVAAAHQLHHTDKFKGVPYGLFLGPKEVEEVGGKEELEKEISRRIKLY

SEQ ID NO: 835 - protein, 150 aa, Arabidopsis thaliana
  peptide (1)..(150): Ceres Seq. ID no. 12481799
  misc_feature (67)..(147): Pfam Name: Pfam Description:  Carotene hydroxylase
  misc_feature (1)..(85): NCBI GI NO: 15237204 NR Description: beta-carotene hydroxylase, putative
  misc_feature (67)..(149): NCBI GI NO: 15237204 NR Description: beta-carotene hydroxylase, putative
  misc_feature (1)..(87): NCBI GI NO: 15235959 NR Description: beta-carotene hydroxylase; protein id: At4g25700
  misc_feature (67)..(149): NCBI GI NO: 15235959 NR Description: beta-carotene hydroxylase; protein id: At4g25700
  misc_feature (1)..(87): NCBI GI NO: 1575296 NR Description: beta-carotene hydroxylase [Arabidopsis thaliana]
  misc_feature (67)..(149): NCBI GI NO: 1575296 NR Description: beta-carotene hydroxylase [Arabidopsis thaliana]
  misc_feature (1)..(87): NCBI GI NO: 5870598 NR Description: beta-carotene hydroxylase
  misc_feature (67)..(149): NCBI GI NO: 5870598 NR Description: beta-carotene hydroxylase
  misc_feature (1)..(87): NCBI GI NO: 9971820 NR Description: beta hydroxylase [Tagetes erecta]
  misc_feature (67)..(149): NCBI GI NO: 9971820 NR Description: beta hydroxylase [Tagetes erecta]
MTSRLLKKAEKKKSERFTYLIAAVMSSFGITSMAIMAVYYRFSWQMKGGEVSVLEMFGTFALSVGAAGLGITMFGMAYMFVHDGLVHKRFPVGPIANVPYLRKVAAAHQLHHTDKFKGVPYGLFLGPKEVEEVGGKEELEKEISRRIKLY

SEQ ID NO: 836 - DNA, 474 bp, Arabidopsis thaliana
  misc_feature (1)..(474): Ceres Seq. ID no. 13495933
aatatagaatataaccatattccggacatgaagatcgtgacattggtactcgtcgtcttcgtcatactttcgacatcattcccggctgccatcaaagccgaagacacgggagatacaggaaatgtgggagtgacatgtgacgcaaggcagcttcagccttgccttgccgcgattacgggaggaggacaaccctcaggtgcatgttgtgcaaagcttacagagcaacagtcatgcctctgtggtttcgctaagaaccctgcgttcgcacagtacattagctctccaaacgctcgcaaagtgctccttgcttgcaatgttgcttatcccacttgttgaaacttatctagagattttataaataaataaacgaaaggaaataaattacattatatcaaacgttatgatacaattcaaccgtttgtgttaatgtactggcttacatggttaaataaagtttattttcttggttgtttt

SEQ ID NO: 837 - protein, 111 aa, Arabidopsis thaliana
  peptide (1)..(111): Ceres Seq. ID no. 13495934
  misc_feature (46)..(111): Pfam Name: Pfam Description:  Protease inhibitor/seed storage/LTP family
  misc_feature (10)..(111): NCBI GI NO: 15219758 NR Description: lipid transfer protein family
  misc_feature (22)..(111): NCBI GI NO: 7488524 NR Description: lipid transfer like protein - turnip (fragment)
  misc_feature (10)..(111): NCBI GI NO: 15240847 NR Description: protease inhibitor/seed storage/lipid transfer
  misc_feature (10)..(111): NCBI GI NO: 18421731 NR Description: protease inhibitor/seed storage/lipid transfer
  misc_feature (10)..(111): NCBI GI NO: 21555147 NR Description: lipid transfer-like protein [Arabidopsis thaliana]
  misc_feature (10)..(111): NCBI GI NO: 15240856 NR Description: protease inhibitor/seed storage/lipid transfer
  misc_feature (29)..(111): NCBI GI NO: 7489543 NR Description: probable lipid transfer protein - rice
  misc_feature (43)..(111): NCBI GI NO: 18402345 NR Description: protease inhibitor/seed storage/lipid transfer
  misc_feature (38)..(111): NCBI GI NO: 3183088 NR Description: Probable nonspecific lipid-transfer protein AKCS9 precursor
  misc_feature (17)..(111): NCBI GI NO: 7489428 NR Description: probable lipid transfer protein - barley
NIEYNHIPDMKIVTLVLVVFVILSTSFPAAIKAEDTGDTGNVGVTCDARQLQPCLAAITGGGQPSGACCAKLTEQQSCLCGFAKNPAFAQYISSPNARKVLLACNVAYPTC

SEQ ID NO: 838 - protein, 102 aa, Arabidopsis thaliana
  peptide (1)..(102): Ceres Seq. ID no. 13495935
  misc_feature (37)..(102): Pfam Name: Pfam Description:  Protease inhibitor/seed storage/LTP family
  misc_feature (1)..(102): NCBI GI NO: 15219758 NR Description: lipid transfer protein family
  misc_feature (13)..(102): NCBI GI NO: 7488524 NR Description: lipid transfer like protein - turnip (fragment)
  misc_feature (1)..(102): NCBI GI NO: 15240847 NR Description: protease inhibitor/seed storage/lipid transfer
  misc_feature (1)..(102): NCBI GI NO: 18421731 NR Description: protease inhibitor/seed storage/lipid transfer
  misc_feature (1)..(102): NCBI GI NO: 21555147 NR Description: lipid transfer-like protein [Arabidopsis thaliana]
  misc_feature (1)..(102): NCBI GI NO: 15240856 NR Description: protease inhibitor/seed storage/lipid transfer
  misc_feature (20)..(102): NCBI GI NO: 7489543 NR Description: probable lipid transfer protein - rice
  misc_feature (34)..(102): NCBI GI NO: 18402345 NR Description: protease inhibitor/seed storage/lipid transfer
  misc_feature (29)..(102): NCBI GI NO: 3183088 NR Description: Probable nonspecific lipid-transfer protein AKCS9 precursor
  misc_feature (8)..(102): NCBI GI NO: 7489428 NR Description: probable lipid transfer protein - barley
MKIVTLVLVVFVILSTSFPAAIKAEDTGDTGNVGVTCDARQLQPCLAAITGGGQPSGACCAKLTEQQSCLCGFAKNPAFAQYISSPNARKVLLACNVAYPTC

SEQ ID NO: 839 - DNA, 1293 bp, Arabidopsis thaliana
  misc_feature (1)..(1293): Ceres Seq. ID no. 12370494
gttaaatcttttccctttttgatcctttcttcctttcttcttcttcttcgcattgatttggtcctccttcctcttctattctattcattaagaacctaatcttcatcttctccatcttcttcttcacggactccacttcgctcatccaggaaggtttattagtagtaaccaatccaagtgttccttttgtttgaagcaacaagctttgtgatattatcctgagagacaatgtttggtttaaggaaatcaccggcaaatcttcccaagcataactcagtcgacctcaagtcttccaagccaaatcctttcgattcagatgatgaatctgacaacaaacatacccttaacccttctaagaggactacctctgaaccctctttggctgatatgacaaacccttttggtggtgagagagttcagaaaggagatagtagttcatccaaacagtcattgttttcgaactccaaataccagtacaagaacaatttccgtgattctggtggtattgaaaaccagtcggttcaggagcttgaaggttatgctgtgtacaaggctgaagagactacgaaatctgtacaaggttgtttgaaggtagcagaagatataaggtctgatgctaccagaactttggtcatgttacacgatcagggcgagcaaatcactaggacgcaccataaagccgttgaaatcgaccatgatctcagtcgtggtgagaagcttcttggaagccttggaggcatgttttcaaagacttggaaaccaaagaagactcgtcctataaatggtcccgtcgtaaccagagatgactcaccaacgagaagagttaaccacttagagaaaagggaaaaactgggactgaactcagcacccagaggacaatcaagaacccgagaaccactccccgaatcagctgatgcttatcagagagtggagatggaaaaagctaagcaagacgatgggctttcagacttgagtgatatactcggcgagctaaagaacatggctgttgacatgggaagcgaaatcgagaagcagaacaaaggacttgaccatcttcatgatgatgttgacgaactcaacttcagagtgcaacaatcaaaccaacgtggtcgccgtttgcttggaaagtagatgaacagagggtttatatgttcattacactcattcctcgtttgttttattctctatgaagttgttctttaaaactggaaagattcttatcatgttaaatacattattgctatctgtgtttgtatttgatcttgtgacaaaaaaccaaaaaacttattgacc

SEQ ID NO: 840 - protein, 300 aa, Arabidopsis thaliana
  peptide (1)..(300): Ceres Seq. ID no. 12370495
  misc_feature (240)..(300): Pfam Name: Pfam Description:  SNARE domain
  misc_feature (1)..(300): NCBI GI NO: 15240163 NR Description: syntaxin SNAP33; protein id: At5g61210
  misc_feature (1)..(300): NCBI GI NO: 21553460 NR Description: snap25a [Arabidopsis thaliana]
  misc_feature (53)..(300): NCBI GI NO: 15222976 NR Description: synaptosomal associated protein
  misc_feature (8)..(300): NCBI GI NO: 32308074 NR Description: SNAP-34 [Hordeum vulgare subsp. vulgare]
  misc_feature (82)..(300): NCBI GI NO: 15241436 NR Description: SNAP25 - like protein; protein id: At5g07880.1
  misc_feature (89)..(299): NCBI GI NO: 18765733 NR Description: synaptosomal-associated protein 25 isoform SNAP25A
  misc_feature (89)..(299): NCBI GI NO: 6755588 NR Description: synaptosomal-associated protein
  misc_feature (91)..(298): NCBI GI NO: 27263173 NR Description: synaptosome-associated protein of 25 kDa
  misc_feature (95)..(298): NCBI GI NO: 28279149 NR Description: Similar to synaptosomal-associated protein, 23kD
  misc_feature (98)..(298): NCBI GI NO: 17737875 NR Description: Synapse protein 24 CG9474-PA
MFGLRKSPANLPKHNSVDLKSSKPNPFDSDDESDNKHTLNPSKRTTSEPSLADMTNPFGGERVQKGDSSSSKQSLFSNSKYQYKNNFRDSGGIENQSVQELEGYAVYKAEETTKSVQGCLKVAEDIRSDATRTLVMLHDQGEQITRTHHKAVEIDHDLSRGEKLLGSLGGMFSKTWKPKKTRPINGPVVTRDDSPTRRVNHLEKREKLGLNSAPRGQSRTREPLPESADAYQRVEMEKAKQDDGLSDLSDILGELKNMAVDMGSEIEKQNKGLDHLHDDVDELNFRVQQSNQRGRRLLGK

SEQ ID NO: 841 - protein, 247 aa, Arabidopsis thaliana
  peptide (1)..(247): Ceres Seq. ID no. 12370496
  misc_feature (187)..(247): Pfam Name: Pfam Description:  SNARE domain
  misc_feature (1)..(247): NCBI GI NO: 15240163 NR Description: syntaxin SNAP33; protein id: At5g61210
  misc_feature (1)..(247): NCBI GI NO: 21553460 NR Description: snap25a [Arabidopsis thaliana]
  misc_feature (1)..(247): NCBI GI NO: 15222976 NR Description: synaptosomal associated protein
  misc_feature (1)..(247): NCBI GI NO: 32308074 NR Description: SNAP-34 [Hordeum vulgare subsp. vulgare]
  misc_feature (29)..(247): NCBI GI NO: 15241436 NR Description: SNAP25 - like protein; protein id: At5g07880.1
  misc_feature (36)..(246): NCBI GI NO: 18765733 NR Description: synaptosomal-associated protein 25 isoform SNAP25A
  misc_feature (36)..(246): NCBI GI NO: 6755588 NR Description: synaptosomal-associated protein
  misc_feature (38)..(245): NCBI GI NO: 27263173 NR Description: synaptosome-associated protein of 25 kDa
  misc_feature (42)..(245): NCBI GI NO: 28279149 NR Description: Similar to synaptosomal-associated protein, 23kD
  misc_feature (45)..(245): NCBI GI NO: 17737875 NR Description: Synapse protein 24 CG9474-PA
MTNPFGGERVQKGDSSSSKQSLFSNSKYQYKNNFRDSGGIENQSVQELEGYAVYKAEETTKSVQGCLKVAEDIRSDATRTLVMLHDQGEQITRTHHKAVEIDHDLSRGEKLLGSLGGMFSKTWKPKKTRPINGPVVTRDDSPTRRVNHLEKREKLGLNSAPRGQSRTREPLPESADAYQRVEMEKAKQDDGLSDLSDILGELKNMAVDMGSEIEKQNKGLDHLHDDVDELNFRVQQSNQRGRRLLGK

SEQ ID NO: 842 - protein, 165 aa, Arabidopsis thaliana
  peptide (1)..(165): Ceres Seq. ID no. 12370497
  misc_feature (105)..(165): Pfam Name: Pfam Description:  SNARE domain
  misc_feature (1)..(165): NCBI GI NO: 15240163 NR Description: syntaxin SNAP33; protein id: At5g61210
  misc_feature (1)..(165): NCBI GI NO: 21553460 NR Description: snap25a [Arabidopsis thaliana]
  misc_feature (1)..(165): NCBI GI NO: 15222976 NR Description: synaptosomal associated protein
  misc_feature (1)..(165): NCBI GI NO: 32308074 NR Description: SNAP-34 [Hordeum vulgare subsp. vulgare]
  misc_feature (1)..(165): NCBI GI NO: 15241436 NR Description: SNAP25 - like protein; protein id: At5g07880.1
  misc_feature (1)..(164): NCBI GI NO: 18765733 NR Description: synaptosomal-associated protein 25 isoform SNAP25A
  misc_feature (1)..(164): NCBI GI NO: 6755588 NR Description: synaptosomal-associated protein
  misc_feature (1)..(163): NCBI GI NO: 27263173 NR Description: synaptosome-associated protein of 25 kDa
  misc_feature (1)..(163): NCBI GI NO: 28279149 NR Description: Similar to synaptosomal-associated protein, 23kD
  misc_feature (1)..(163): NCBI GI NO: 17737875 NR Description: Synapse protein 24 CG9474-PA
MLHDQGEQITRTHHKAVEIDHDLSRGEKLLGSLGGMFSKTWKPKKTRPINGPVVTRDDSPTRRVNHLEKREKLGLNSAPRGQSRTREPLPESADAYQRVEMEKAKQDDGLSDLSDILGELKNMAVDMGSEIEKQNKGLDHLHDDVDELNFRVQQSNQRGRRLLGK

SEQ ID NO: 843 - DNA, 1317 bp, Arabidopsis thaliana
  misc_feature (1)..(1317): Ceres Seq. ID no. 12339040
aagttgatttagcctctgtttgtccttgttatgttgttgtaaaacttgaaactttggaagcaaactcatttttataacaaaaggaaatcttattttatacattacattaaagcaacatgaaagacaattcaagctggtcttgttcttgttcttggtcttcgtggaaaatatgtttgttgtctgttctctttctcaccgagacgatcaccgccgtgaagctgccgccaaaattgattattccggctgtaatcgctttcggagactccatcgtcgacacaggaatgaacaacaatgtcaaaaccgtggttaagtgtgattttcttccttatggtatcaatttccaaagcggagttgccacggggagattctgcgatggacgagtccctgccgatttgctagccgaagaactgggaataaaatcaattgtaccagcatacctagatccgaatctaaaatcgaaagatcttttaaccggtgtatcgtttgcgtccggaggttctggttatgatcctataacaccgaaacttgtggcagtaatatcattagaagatcaattgagttatttcgaggagtacatagagaaagtgaagaatatagttggggaagcaagaaaagacttcatagtagccaacagcttattcttattggtcgcaggcagcgacgacatagccaatacatactatactctacgtgcaagacctgaatacgacgtcgattcatacactactcttatgtctgactctgcctcagaatttgtgactaaactatatggatatggagtgagaagagtagctgtgtttggtgcaccaccaattgggtgtgtaccatcacagagaacgttaggaggaggtatcttgagagattgtgctgataattacaacgaagcagcaaaactttttaattcaaagctctccccaaaattggattcgttgcgtaaaaccctaccgggcatcaaaccgatctacattaatatctatgatcctctttttgacatcatccagaatcctgcaaattatgggtttgaagtgtctaataaaggatgctgtggaacaggagccatagaagttgctgtgttgtgcaataaaatcacatcttctgtatgtcccgacgtgtctactcatgtgttttgggacagttatcatcctacagagaaaacttacaaagtattagtctcactgttgattaacaaatttgttaatcagttcgtctgaattaaaaactattttcacggcataatgattgattatattttatctcatcttgtttgtattatttgataattgtattcgatttaaataaaattaatattttcttgtt

SEQ ID NO: 844 - protein, 364 aa, Arabidopsis thaliana
  peptide (1)..(364): Ceres Seq. ID no. 12339041
  misc_feature (44)..(351): Pfam Name: Pfam Description:  GDSL-like Lipase/Acylhydrolase
  misc_feature (1)..(364): NCBI GI NO: 15222901 NR Description: family II extracellular lipase 3
  misc_feature (1)..(364): NCBI GI NO: 26449364 NR Description: putative family II lipase EXL3
  misc_feature (1)..(361): NCBI GI NO: 25404994 NR Description: protein T4O12.13 [imported] - Arabidopsis thaliana
  misc_feature (16)..(363): NCBI GI NO: 28393626 NR Description: putative family II extracellular lipase 1 (EXL1)
  misc_feature (16)..(363): NCBI GI NO: 18410954 NR Description: family II extracellular lipase 1
  misc_feature (16)..(360): NCBI GI NO: 18410956 NR Description: family II extracellular lipase 2
  misc_feature (16)..(352): NCBI GI NO: 8778807 NR Description: T4O12.12 [Arabidopsis thaliana]
  misc_feature (27)..(360): NCBI GI NO: 8778807 NR Description: T4O12.12 [Arabidopsis thaliana]
  misc_feature (42)..(363): NCBI GI NO: 18394825 NR Description: anter-specific proline-rich protein APG precursor
  misc_feature (42)..(363): NCBI GI NO: 21592372 NR Description: anter-specific proline-rich protein APG precursor
MKDNSSWSCSCSWSSWKICLLSVLFLTETITAVKLPPKLIIPAVIAFGDSIVDTGMNNNVKTVVKCDFLPYGINFQSGVATGRFCDGRVPADLLAEELGIKSIVPAYLDPNLKSKDLLTGVSFASGGSGYDPITPKLVAVISLEDQLSYFEEYIEKVKNIVGEARKDFIVANSLFLLVAGSDDIANTYYTLRARPEYDVDSYTTLMSDSASEFVTKLYGYGVRRVAVFGAPPIGCVPSQRTLGGGILRDCADNYNEAAKLFNSKLSPKLDSLRKTLPGIKPIYINIYDPLFDIIQNPANYGFEVSNKGCCGTGAIEVAVLCNKITSSVCPDVSTHVFWDSYHPTEKTYKVLVSLLINKFVNQFV

SEQ ID NO: 845 - protein, 309 aa, Arabidopsis thaliana
  peptide (1)..(309): Ceres Seq. ID no. 12339042
  misc_feature (1)..(296): Pfam Name: Pfam Description:  GDSL-like Lipase/Acylhydrolase
  misc_feature (1)..(309): NCBI GI NO: 15222901 NR Description: family II extracellular lipase 3
  misc_feature (1)..(309): NCBI GI NO: 26449364 NR Description: putative family II lipase EXL3
  misc_feature (1)..(306): NCBI GI NO: 25404994 NR Description: protein T4O12.13 [imported] - Arabidopsis thaliana
  misc_feature (1)..(308): NCBI GI NO: 28393626 NR Description: putative family II extracellular lipase 1 (EXL1)
  misc_feature (1)..(308): NCBI GI NO: 18410954 NR Description: family II extracellular lipase 1
  misc_feature (1)..(305): NCBI GI NO: 18410956 NR Description: family II extracellular lipase 2
  misc_feature (1)..(297): NCBI GI NO: 8778807 NR Description: T4O12.12 [Arabidopsis thaliana]
  misc_feature (1)..(305): NCBI GI NO: 8778807 NR Description: T4O12.12 [Arabidopsis thaliana]
  misc_feature (1)..(308): NCBI GI NO: 18394825 NR Description: anter-specific proline-rich protein APG precursor
  misc_feature (1)..(308): NCBI GI NO: 21592372 NR Description: anter-specific proline-rich protein APG precursor
MNNNVKTVVKCDFLPYGINFQSGVATGRFCDGRVPADLLAEELGIKSIVPAYLDPNLKSKDLLTGVSFASGGSGYDPITPKLVAVISLEDQLSYFEEYIEKVKNIVGEARKDFIVANSLFLLVAGSDDIANTYYTLRARPEYDVDSYTTLMSDSASEFVTKLYGYGVRRVAVFGAPPIGCVPSQRTLGGGILRDCADNYNEAAKLFNSKLSPKLDSLRKTLPGIKPIYINIYDPLFDIIQNPANYGFEVSNKGCCGTGAIEVAVLCNKITSSVCPDVSTHVFWDSYHPTEKTYKVLVSLLINKFVNQFV

SEQ ID NO: 846 - DNA, 1251 bp, Arabidopsis thaliana
  misc_feature (1)..(1251): Ceres Seq. ID no. 12391659
acatgaaaactaaacacacgtacacaagaaaccccaaaacattttgcctagaaagttgtttaaattacctcttaaaccttaagaaatcatatccagaaactcaatggatcaacaagggatggtcaagaaaagactagccgttctcgtcggctgcaactaccctaacacaaggaacgagcttcacggttgcatcaatgatgttctagccatgaaagaaactattttgtcacgtttcggattcaaacaagacgacattgaggtgctaacggacgagccagaatcaaaggtaaagccgacaggtgccaacatcaaggctgctctacgtaggatggtggataaagctcaagccggatctggagacatcttgttcttccactacagtggccatggaactcgtattccttcggttaaatctgctcatccttttaaacaagacgaagctattgttccttgtgatttcaatctcatcacagatgttgatttccgagaattggtcaatcaacttcctaaaggaacaagctttaccatgatctctgattcttgccatagtggtggtctcatcgacaaggagaaagaacagatcggaccctcttcggtctccagcaacatatctccggctattgagacaacgaacaagactataacatcacgtgccttgcccttcaaggcagtccttgaccacttgagttctctcaccggaattacaacttccgacatcggcacacatctacttgagctctttggccgcgatgctggtcttaagtttcggttaccggcaatggatctaatggatcttttggagactatgacggcccgtgaaaaacacgtggactcagggatattgatgagcgggtgtcaggcggatgagacgtctgctgacgtcggcgttgggaacgggaaagcgtacggagcgtttagcaacgcgattcaaagggtgttgaacgaaaatgaaggtgccatgaagaacaagcaactagtgatgatggcaagggatgtgcttgagagactagggtttcatcaacacccttgtctctactgcagcgaccagaacgcagacgcgacgttcctttctcaaccttgaattttaaacgtttgcgttgttttcttttatttgttttatcacgtttgcctttggggttgttgtaaattgttaactggtggaatgtgtgtattttctattctctgtggtgtactctaaaaggaaaaaggacatataaaacttgtttaataacatttatcttttttaatggt

SEQ ID NO: 847 - protein, 325 aa, Arabidopsis thaliana
  peptide (1)..(325): Ceres Seq. ID no. 12391660
  misc_feature (10)..(325): Pfam Name: Pfam Description:  Caspase domain
  misc_feature (1)..(325): NCBI GI NO: 15237648 NR Description: hypothetical protein common family
  misc_feature (6)..(325): NCBI GI NO: 21554334 NR Description: latex-abundant protein-like [Arabidopsis thaliana]
  misc_feature (6)..(236): NCBI GI NO: 15219340 NR Description: hypothetical protein common family
  misc_feature (243)..(322): NCBI GI NO: 15219340 NR Description: hypothetical protein common family
  misc_feature (15)..(163): NCBI GI NO: 23343885 NR Description: metacaspase 1 [Lycopersicon esculentum]
  misc_feature (243)..(322): NCBI GI NO: 23343885 NR Description: metacaspase 1 [Lycopersicon esculentum]
  misc_feature (6)..(164): NCBI GI NO: 4235430 NR Description: latex-abundant protein [Hevea brasiliensis]
  misc_feature (243)..(322): NCBI GI NO: 4235430 NR Description: latex-abundant protein [Hevea brasiliensis]
  misc_feature (8)..(164): NCBI GI NO: 29367583 NR Description: latex-abundant protein-like protein
  misc_feature (224)..(322): NCBI GI NO: 29367583 NR Description: latex-abundant protein-like protein
MDQQGMVKKRLAVLVGCNYPNTRNELHGCINDVLAMKETILSRFGFKQDDIEVLTDEPESKVKPTGANIKAALRRMVDKAQAGSGDILFFHYSGHGTRIPSVKSAHPFKQDEAIVPCDFNLITDVDFRELVNQLPKGTSFTMISDSCHSGGLIDKEKEQIGPSSVSSNISPAIETTNKTITSRALPFKAVLDHLSSLTGITTSDIGTHLLELFGRDAGLKFRLPAMDLMDLLETMTAREKHVDSGILMSGCQADETSADVGVGNGKAYGAFSNAIQRVLNENEGAMKNKQLVMMARDVLERLGFHQHPCLYCSDQNADATFLSQP

SEQ ID NO: 848 - protein, 320 aa, Arabidopsis thaliana
  peptide (1)..(320): Ceres Seq. ID no. 12391661
  misc_feature (5)..(320): Pfam Name: Pfam Description:  Caspase domain
  misc_feature (1)..(320): NCBI GI NO: 15237648 NR Description: hypothetical protein common family
  misc_feature (1)..(320): NCBI GI NO: 21554334 NR Description: latex-abundant protein-like [Arabidopsis thaliana]
  misc_feature (1)..(231): NCBI GI NO: 15219340 NR Description: hypothetical protein common family
  misc_feature (238)..(317): NCBI GI NO: 15219340 NR Description: hypothetical protein common family
  misc_feature (10)..(158): NCBI GI NO: 23343885 NR Description: metacaspase 1 [Lycopersicon esculentum]
  misc_feature (238)..(317): NCBI GI NO: 23343885 NR Description: metacaspase 1 [Lycopersicon esculentum]
  misc_feature (1)..(159): NCBI GI NO: 4235430 NR Description: latex-abundant protein [Hevea brasiliensis]
  misc_feature (238)..(317): NCBI GI NO: 4235430 NR Description: latex-abundant protein [Hevea brasiliensis]
  misc_feature (3)..(159): NCBI GI NO: 29367583 NR Description: latex-abundant protein-like protein
  misc_feature (219)..(317): NCBI GI NO: 29367583 NR Description: latex-abundant protein-like protein
MVKKRLAVLVGCNYPNTRNELHGCINDVLAMKETILSRFGFKQDDIEVLTDEPESKVKPTGANIKAALRRMVDKAQAGSGDILFFHYSGHGTRIPSVKSAHPFKQDEAIVPCDFNLITDVDFRELVNQLPKGTSFTMISDSCHSGGLIDKEKEQIGPSSVSSNISPAIETTNKTITSRALPFKAVLDHLSSLTGITTSDIGTHLLELFGRDAGLKFRLPAMDLMDLLETMTAREKHVDSGILMSGCQADETSADVGVGNGKAYGAFSNAIQRVLNENEGAMKNKQLVMMARDVLERLGFHQHPCLYCSDQNADATFLSQP

SEQ ID NO: 849 - protein, 290 aa, Arabidopsis thaliana
  peptide (1)..(290): Ceres Seq. ID no. 12391662
  misc_feature (1)..(290): Pfam Name: Pfam Description:  Caspase domain
  misc_feature (1)..(290): NCBI GI NO: 15237648 NR Description: hypothetical protein common family
  misc_feature (1)..(290): NCBI GI NO: 21554334 NR Description: latex-abundant protein-like [Arabidopsis thaliana]
  misc_feature (1)..(201): NCBI GI NO: 15219340 NR Description: hypothetical protein common family
  misc_feature (208)..(287): NCBI GI NO: 15219340 NR Description: hypothetical protein common family
  misc_feature (1)..(128): NCBI GI NO: 23343885 NR Description: metacaspase 1 [Lycopersicon esculentum]
  misc_feature (208)..(287): NCBI GI NO: 23343885 NR Description: metacaspase 1 [Lycopersicon esculentum]
  misc_feature (1)..(129): NCBI GI NO: 4235430 NR Description: latex-abundant protein [Hevea brasiliensis]
  misc_feature (208)..(287): NCBI GI NO: 4235430 NR Description: latex-abundant protein [Hevea brasiliensis]
  misc_feature (1)..(129): NCBI GI NO: 29367583 NR Description: latex-abundant protein-like protein
  misc_feature (189)..(287): NCBI GI NO: 29367583 NR Description: latex-abundant protein-like protein
MKETILSRFGFKQDDIEVLTDEPESKVKPTGANIKAALRRMVDKAQAGSGDILFFHYSGHGTRIPSVKSAHPFKQDEAIVPCDFNLITDVDFRELVNQLPKGTSFTMISDSCHSGGLIDKEKEQIGPSSVSSNISPAIETTNKTITSRALPFKAVLDHLSSLTGITTSDIGTHLLELFGRDAGLKFRLPAMDLMDLLETMTAREKHVDSGILMSGCQADETSADVGVGNGKAYGAFSNAIQRVLNENEGAMKNKQLVMMARDVLERLGFHQHPCLYCSDQNADATFLSQP

SEQ ID NO: 850 - DNA, 1127 bp, Arabidopsis thaliana
  misc_feature (1)..(1127): Ceres Seq. ID no. 12385171
aaaaccagttgtgctatttcaaagccacaagtacttggaacctttgtttcttctaccctaacatagcccttgcaaaccataaccaaaccatcatcatcatcatcatctcttggtgacagaagaaaagagttgaggaacagagaaaatggcagcacaagcacttgtgtcttcttcacttacctcctctgttcagacagctagacagatatttggctcaaaaccagttgcgtctgcctcacagaagaagagttcctttgttgttaaagctgctgcaactccacctgtcaagcaaggagccaacagaccattgtggtttgcttcatcgcagagtctctcttacttggatggcagcttacctggtgactatggattcgaccctcttggtctttcagacccagaaggtactggaggattcattgagccaagatggctagcatacggagagatcatcaacggacggttcgccatgttgggtgcagctggagctattgctcctgagattttaggaaaggctggtctgattccagcagagactgctcttccttggttccaaaccggtgtgattccaccagcagggacatacacttactgggcagacaattacacactctttgttctcgagatggctctgatgggattcgctgagcaccggaggttacaggactggtacaacccaggatctatgggaaaacagtacttcttggggttagagaagggtttggccggttcaggtaacccggcttaccccggtggacctttcttcaaccctcttgggtttgggaaagatgagaagtcactgaaggagttgaaactcaaggaggtcaagaacggtagactggctatgctcgccatcctcggttactttatccaaggactagtgaccggtgtgggaccttatcagaacctgcttgatcacttggctgatcccgtcaacaacaacgtcttgaccagcctcaagttccactgaggtgatcatcatctcatgtgtttttatgtctcttgtatcgtacaatatttccatctttcgctaccattggcttcttcgtattgtaacaccctgtgtaaacatattcgtgttttgtaagaaatgacaatgtcaatggccaaacgaaaaaacttttaggact

SEQ ID NO: 851 - protein, 273 aa, Arabidopsis thaliana
  peptide (1)..(273): Ceres Seq. ID no. 12385172
  misc_feature (61)..(244): Pfam Name: Pfam Description:  Chlorophyll A-B binding protein
  misc_feature (1)..(273): NCBI GI NO: 15219941 NR Description: light-harvesting chlorophyll a/b binding protein
  misc_feature (1)..(273): NCBI GI NO: 430947 NR Description: PSI type III chlorophyll a/b-binding protein
  misc_feature (1)..(273): NCBI GI NO: 21554335 NR Description: PSI type III chlorophyll a/b-binding protein
  misc_feature (1)..(273): NCBI GI NO: 82080 NR Description: chlorophyll a/b-binding protein type III precursor
  misc_feature (1)..(273): NCBI GI NO: 115813 NR Description: Chlorophyll A-B binding protein 8
  misc_feature (1)..(273): NCBI GI NO: 7443229 NR Description: probable chlorophyll a/b-binding protein type III precursor
  misc_feature (1)..(273): NCBI GI NO: 99487 NR Description: chlorophyll a/b-binding protein
  misc_feature (72)..(264): NCBI GI NO: 7271947 NR Description: chlorophyll a/b-binding protein type III
  misc_feature (11)..(269): NCBI GI NO: 40714511 NR Description: light-harvesting chlorophyll-a/b protein of photosystem I
  misc_feature (109)..(273): NCBI GI NO: 37780998 NR Description: chlorophyll a/b binding protein [Vitis vinifera]
MAAQALVSSSLTSSVQTARQIFGSKPVASASQKKSSFVVKAAATPPVKQGANRPLWFASSQSLSYLDGSLPGDYGFDPLGLSDPEGTGGFIEPRWLAYGEIINGRFAMLGAAGAIAPEILGKAGLIPAETALPWFQTGVIPPAGTYTYWADNYTLFVLEMALMGFAEHRRLQDWYNPGSMGKQYFLGLEKGLAGSGNPAYPGGPFFNPLGFGKDEKSLKELKLKEVKNGRLAMLAILGYFIQGLVTGVGPYQNLLDHLADPVNNNVLTSLKFH

SEQ ID NO: 852 - protein, 166 aa, Arabidopsis thaliana
  peptide (1)..(166): Ceres Seq. ID no. 12385173
  misc_feature (1)..(137): Pfam Name: Pfam Description:  Chlorophyll A-B binding protein
  misc_feature (1)..(166): NCBI GI NO: 15219941 NR Description: light-harvesting chlorophyll a/b binding protein
  misc_feature (1)..(166): NCBI GI NO: 430947 NR Description: PSI type III chlorophyll a/b-binding protein
  misc_feature (1)..(166): NCBI GI NO: 21554335 NR Description: PSI type III chlorophyll a/b-binding protein
  misc_feature (1)..(166): NCBI GI NO: 82080 NR Description: chlorophyll a/b-binding protein type III precursor
  misc_feature (1)..(166): NCBI GI NO: 115813 NR Description: Chlorophyll A-B binding protein 8
  misc_feature (1)..(166): NCBI GI NO: 7443229 NR Description: probable chlorophyll a/b-binding protein type III precursor
  misc_feature (1)..(166): NCBI GI NO: 99487 NR Description: chlorophyll a/b-binding protein
  misc_feature (1)..(157): NCBI GI NO: 7271947 NR Description: chlorophyll a/b-binding protein type III
  misc_feature (1)..(162): NCBI GI NO: 40714511 NR Description: light-harvesting chlorophyll-a/b protein of photosystem I
  misc_feature (2)..(166): NCBI GI NO: 37780998 NR Description: chlorophyll a/b binding protein [Vitis vinifera]
MLGAAGAIAPEILGKAGLIPAETALPWFQTGVIPPAGTYTYWADNYTLFVLEMALMGFAEHRRLQDWYNPGSMGKQYFLGLEKGLAGSGNPAYPGGPFFNPLGFGKDEKSLKELKLKEVKNGRLAMLAILGYFIQGLVTGVGPYQNLLDHLADPVNNNVLTSLKFH

SEQ ID NO: 853 - DNA, 636 bp, Arabidopsis thaliana
  misc_feature (1)..(636): Ceres Seq. ID no. 12423268
  misc_feature (26)..(26): n is a, c, t, g, unknown, or other
aaaaaacatcacatacactatttttntcctctccttattgtctatatatttttcctctttagctttttcatttcgaaatggccaccgttgaggttgaacaagtcactccagtagcagtagagaacgttgaggtaccaacaaagacagtggaggagacagtggtggagacagaggtgacccaacagccggaagaatccgtccccgccgtgacagaacaaaaatccgaagcaccaattgtagaaacaaacgaagaagtggttgtggaagaggcagagaagaaagatgaagaaaccgagaagaaaacagaggagaaagacgagaagacagaagtgatcacggaaactccggtagttgaggaggaggagaagaaagctgaggaagtgaccgaaactccggcggttgtggaggaggagaagaagacagaggtggttgaggagaaacagactgaggttgcggctgctgaggaagtcgccgttgagaaggccgaggagtaaagaggaaggaagaagctatatatgaccttttttggtctcatatcgttttctgtttattttattttatcaacatttcataagtattttctatgtttgttgggtttgttatgatgaaatcagatgtttggatcttttaatggtc

SEQ ID NO: 854 - protein, 138 aa, Arabidopsis thaliana
  peptide (1)..(138): Ceres Seq. ID no. 12423269
  misc_feature (25)..(132): Pfam Name: Pfam Description:  DREPP plasma membrane polypeptide
  misc_feature (1)..(138): NCBI GI NO: 30682601 NR Description: expressed protein [Arabidopsis thaliana]
  misc_feature (39)..(138): NCBI GI NO: 18391349 NR Description: expressed protein; protein id: At1g12080
  misc_feature (1)..(134): NCBI GI NO: 21555836 NR Description: unknown [Arabidopsis thaliana]
  misc_feature (1)..(134): NCBI GI NO: 18407594 NR Description: expressed protein; protein id: At1g62480
  misc_feature (39)..(138): NCBI GI NO: 15231671 NR Description: putative protein; protein id: At3g59370.1
  misc_feature (1)..(130): NCBI GI NO: 18391349 NR Description: expressed protein; protein id: At1g12080
  misc_feature (1)..(138): NCBI GI NO: 9049359 NR Description: vacuolar calcium binding protein
  misc_feature (1)..(138): NCBI GI NO: 9049359 NR Description: vacuolar calcium binding protein
  misc_feature (1)..(138): NCBI GI NO: 9049359 NR Description: vacuolar calcium binding protein
  misc_feature (1)..(138): NCBI GI NO: 22999045 NR Description: hypothetical protein [Magnetococcus sp. MC-1]
MATVEVEQVTPVAVENVEVPTKTVEETVVETEVTQQPEESVPAVTEQKSEAPIVETNEEVVVEEAEKKDEETEKKTEEKDEKTEVITETPVVEEEEKKAEEVTETPAVVEEEKKTEVVEEKQTEVAAAEEVAVEKAEE

SEQ ID NO: 855 - DNA, 1221 bp, Arabidopsis thaliana; identical to SEQ ID NO: 337
  misc_feature (1)..(1221): Ceres Seq. ID no. 12562215

SEQ ID NO: 856 - protein, 148 aa, Arabidopsis thaliana; identical to SEQ ID NO: 338
  peptide (1)..(148): Ceres Seq. ID no. 12562216
  misc_feature (1)..(84): Pfam Name: II Pfam Description: 2OG-Fe
  misc_feature (1)..(148): NCBI GI NO: 587086 NR Description: ACC oxidase [Brassica oleracea]
  misc_feature (1)..(148): NCBI GI NO: 728780 NR Description: 1-aminocyclopropane-1-carboxylate oxidase
  misc_feature (1)..(148): NCBI GI NO: 7638440 NR Description: 1-aminocyclopropane-1-carboxylate oxidase
  misc_feature (1)..(148): NCBI GI NO: 7433206 NR Description: probable 1-aminocyclopropane-1-carboxylate oxidase
  misc_feature (1)..(148): NCBI GI NO: 15221170 NR Description: putative amino-cyclopropane-carboxylic acid oxidase
  misc_feature (1)..(148): NCBI GI NO: 7433194 NR Description: probable 1-aminocyclopropane-1-carboxylate oxidase
  misc_feature (1)..(148): NCBI GI NO: 14148975 NR Description: ACC oxidase [Brassica rapa subsp. rapa]
  misc_feature (1)..(143): NCBI GI NO: 18496053 NR Description: ACC oxidase 1 [Fagus sylvatica]
  misc_feature (1)..(143): NCBI GI NO: 584711 NR Description: 1-aminocyclopropane-1-carboxylate oxidase 3
  misc_feature (1)..(143): NCBI GI NO: 1813891 NR Description: 1-aminocyclopropane-1-carboxylate oxidase

SEQ ID NO: 857 - protein, 148 aa, Arabidopsis thaliana; identical to SEQ ID NO: 339
  peptide (1)..(148): Ceres Seq. ID no. 12562217
  misc_feature (1)..(148): NCBI GI NO: 587086 NR Description: ACC oxidase [Brassica oleracea]
  misc_feature (1)..(148): NCBI GI NO: 728780 NR Description: 1-aminocyclopropane-1-carboxylate oxidase
  misc_feature (1)..(148): NCBI GI NO: 7638440 NR Description: 1-aminocyclopropane-1-carboxylate oxidase
  misc_feature (1)..(148): NCBI GI NO: 7433206 NR Description: probable 1-aminocyclopropane-1-carboxylate oxidase
  misc_feature (1)..(146): NCBI GI NO: 15221170 NR Description: putative amino-cyclopropane-carboxylic acid oxidase
  misc_feature (1)..(148): NCBI GI NO: 7433194 NR Description: probable 1-aminocyclopropane-1-carboxylate oxidase
  misc_feature (1)..(148): NCBI GI NO: 14148975 NR Description: ACC oxidase [Brassica rapa subsp. rapa]
  misc_feature (7)..(148): NCBI GI NO: 18496053 NR Description: ACC oxidase 1 [Fagus sylvatica]
  misc_feature (7)..(148): NCBI GI NO: 584711 NR Description: 1-aminocyclopropane-1-carboxylate oxidase 3
  misc_feature (7)..(148): NCBI GI NO: 1813891 NR Description: 1-aminocyclopropane-1-carboxylate oxidase

SEQ ID NO: 858 - protein, 144 aa, Arabidopsis thaliana; identical to SEQ ID NO: 340
  peptide (1)..(144): Ceres Seq. ID no. 12562218
  misc_feature (1)..(144): NCBI GI NO: 587086 NR Description: ACC oxidase [Brassica oleracea]
  misc_feature (1)..(144): NCBI GI NO: 728780 NR Description: 1-aminocyclopropane-1-carboxylate oxidase
  misc_feature (1)..(144): NCBI GI NO: 7638440 NR Description: 1-aminocyclopropane-1-carboxylate oxidase
  misc_feature (1)..(144): NCBI GI NO: 7433206 NR Description: probable 1-aminocyclopropane-1-carboxylate oxidase
  misc_feature (1)..(142): NCBI GI NO: 15221170 NR Description: putative amino-cyclopropane-carboxylic acid oxidase
  misc_feature (1)..(144): NCBI GI NO: 7433194 NR Description: probable 1-aminocyclopropane-1-carboxylate oxidase
  misc_feature (1)..(144): NCBI GI NO: 14148975 NR Description: ACC oxidase [Brassica rapa subsp. rapa]
  misc_feature (3)..(144): NCBI GI NO: 18496053 NR Description: ACC oxidase 1 [Fagus sylvatica]
  misc_feature (3)..(144): NCBI GI NO: 584711 NR Description: 1-aminocyclopropane-1-carboxylate oxidase 3
  misc_feature (3)..(144): NCBI GI NO: 1813891 NR Description: 1-aminocyclopropane-1-carboxylate oxidase

SEQ ID NO: 859 - DNA, 611 bp, Arabidopsis thaliana
  misc_feature (1)..(611): Ceres Seq. ID no. 12332262
agctaaaaccctaaagccctaaaatcaaaattacgctaaacagagaaggcgacaatggatcacatcgctgcggcggaagagcaaatcgtatcggagagacttcgaagaaagcttgaagaagttaatgtagctgctcagactcagctttctcctatccaagatcacatcaatttcacccttcagcaagcttatttcaaatgtgcatatgagtgctttgacagaagaagaaagcaagaggagataagtaactgcgtcgagcactgcagtgttcccgttgtcaaatctcaacagtatttcgagaacgaaatggctcagtttcaggaaagattgaacagatcactggtggtgtgtcaagacaagtttgaggcctcaaagctccagaagataaggcctgaagcggttaacgagatggagagttgtgtgcacaaatccattgaggaaaatctcaatacattaccacatattgtgcagagaatgaagacagcatttaacataaccaactaaaagctctcgtgaaaaaccttggattccagaacttgactagccatattgtttgaaaagaccttttcttttgtcttaatatgatctataaatttgttttcctttttctt

SEQ ID NO: 860 - protein, 149 aa, Arabidopsis thaliana
  peptide (1)..(149): Ceres Seq. ID no. 12332263
  misc_feature (15)..(145): Pfam Name: DUF842 Pfam Description: Eukaryotic protein of unknown function
  misc_feature (1)..(149): NCBI GI NO: 18402744 NR Description: expressed protein; protein id: At2g31725
  misc_feature (1)..(149): NCBI GI NO: 15221245 NR Description: hypothetical Protein; protein id: At1g05730.1
  misc_feature (7)..(149): NCBI GI NO: 15224344 NR Description: hypothetical protein; protein id: At2g43720
  misc_feature (1)..(124): NCBI GI NO: 15221247 NR Description: hypothetical protein; protein id: At1g05740.1
  misc_feature (35)..(146): NCBI GI NO: 37589716 NR Description: Unknown (protein for MGC:73247) [Danio rerio]
  misc_feature (19)..(144): NCBI GI NO: 15929034 NR Description: hypothetical protein FLJ14668 [Homo sapiens]
  misc_feature (19)..(144): NCBI GI NO: 14249520 NR Description: hypothetical protein FLJ14668 [Homo sapiens]
  misc_feature (42)..(146): NCBI GI NO: 13385042 NR Description: RIKEN cDNA 2010309E21 [Mus musculus]
  misc_feature (42)..(146): NCBI GI NO: 15489002 NR Description: Unknown (protein for IMAGE:3493774) [Mus musculus]
  misc_feature (23)..(146): NCBI GI NO: 28482029 NR Description: similar to RIKEN cDNA 2010309E21 [Mus musculus]
MDHIAAAEEQIVSERLRRKLEEVNVAAQTQLSPIQDHINFTLQQAYFKCAYECFDRRRKQEEISNCVEHCSVPVVKSQQYFENEMAQFQERLNRSLVVCQDKFEASKLQKIRPEAVNEMESCVHKSIEENLNTLPHIVQRMKTAFNITN

SEQ ID NO: 861 - DNA, 756 bp, Arabidopsis thaliana
  misc_feature (1)..(756): Ceres Seq. ID no. 13499510
ctttcccctaagtcttggttcttcttctctctaatacgagaagaaaaaggcgaaaacctcgccaatccgattacgcgaaaaatcaaaggtttttggatatggcgtcgaagcggatcttgaaggaattgaaggatctccagaaggatccacctacatcatgtagcgcaggtcctgttgctgaagacatgtttcactggcaggcaacgataatgggtccttcagagagtccttatgctggaggtgttttccttgtaaccatccatttccctccggattacccattcaagcctcctaaggtggcctttaggaccaaggtgttccatcccaacattaacagcaacggtagcatttgcctcgacatcttgaaggagcagtggagtcctgcgctcaccatttccaaggtgctgctatcgatctgttctttgttaaccgatccaaacccggatgatcctttggtgcccgagatagctcacatgtacaagactgacaagaacaagtacgagtccactgcacgaagctggactcagaagtatgccatgggctaaatggaaaatcccacctactaaattatctctttatgaagaaaaaaatctgccttaatttctatgtatgattcgatagacatctctttgtgtccttttaactttctgaagacaggaccaaatgaagtgggtcttgttttaaacgaaacaaaaaaaaacatcatctttgtgaaaactagaatctgatcatcttctgttgtttcttcttgtggtg

SEQ ID NO: 862 - protein, 148 aa, Arabidopsis thaliana
  peptide (1)..(148): Ceres Seq. ID no. 13499511
  misc_feature (1)..(148): NCBI GI NO: 18423494 NR Description: ubiquitin-conjugating enzyme 10 (UBC10)
  misc_feature (1)..(148): NCBI GI NO: 11762186 NR Description: AT4g27960 [Arabidopsis thaliana]
  misc_feature (1)..(148): NCBI GI NO: 18417097 NR Description: ubiquitin-conjugating enzyme 9 (UBC9)
  misc_feature (1)..(148): NCBI GI NO: 21554343 NR Description: E2, ubiquitin-conjugating enzyme 10 (UBC10)
  misc_feature (1)..(148): NCBI GI NO: 30687803 NR Description: ubiquitin-conjugating enzyme 9 (UBC9)
  misc_feature (1)..(148): NCBI GI NO: 40287554 NR Description: ubiquitin-conjugating enzyme 8 [Capsicum annuum]
  misc_feature (1)..(148): NCBI GI NO: 5762457 NR Description: ubiquitin-conjugating enzyme UBC2
  misc_feature (1)..(148): NCBI GI NO: 18408001 NR Description: ubiquitin-conjugating enzyme
  misc_feature (1)..(148): NCBI GI NO: 19347859 NR Description: putative E2, ubiquitin-conjugating enzyme UBC9
  misc_feature (1)..(148): NCBI GI NO: 456568 NR Description: ubiquitin conjugating enzyme
MASKRILKELKDLQKDPPTSCSAGPVAEDMFHWQATIMGPSESPYAGGVFLVTIHFPPDYPFKPPKVAFRTKVFHPNINSNGSICLDILKEQWSPALTISKVLLSICSLLTDPNPDDPLVPEIAHMYKTDKNKYESTARSWTQKYAMG

SEQ ID NO: 863 - protein, 119 aa, Arabidopsis thaliana
  peptide (1)..(119): Ceres Seq. ID no. 13499512
  misc_feature (1)..(119): NCBI GI NO: 18423494 NR Description: ubiquitin-conjugating enzyme 10 (UBC10)
  misc_feature (1)..(119): NCBI GI NO: 11762186 NR Description: AT4g27960 [Arabidopsis thaliana]
  misc_feature (1)..(119): NCBI GI NO: 18417097 NR Description: ubiquitin-conjugating enzyme 9 (UBC9)
  misc_feature (1)..(119): NCBI GI NO: 21554343 NR Description: E2, ubiquitin-conjugating enzyme 10 (UBC10)
  misc_feature (1)..(119): NCBI GI NO: 30687803 NR Description: ubiquitin-conjugating enzyme 9 (UBC9)
  misc_feature (1)..(119): NCBI GI NO: 40287554 NR Description: ubiquitin-conjugating enzyme 8 [Capsicum annuum]
  misc_feature (1)..(119): NCBI GI NO: 5762457 NR Description: ubiquitin-conjugating enzyme UBC2
  misc_feature (1)..(119): NCBI GI NO: 18408001 NR Description: ubiquitin-conjugating enzyme
  misc_feature (1)..(119): NCBI GI NO: 19347859 NR Description: putative E2, ubiquitin-conjugating enzyme UBC9
  misc_feature (1)..(119): NCBI GI NO: 456568 NR Description: ubiquitin conjugating enzyme
MFHWQATIMGPSESPYAGGVFLVTIHFPPDYPFKPPKVAFRTKVFHPNINSNGSICLDILKEQWSPALTISKVLLSICSLLTDPNPDDPLVPEIAHMYKTDKNKYESTARSWTQKYAMG

SEQ ID NO: 864 - protein, 111 aa, Arabidopsis thaliana
  peptide (1)..(111): Ceres Seq. ID no. 13499513
  misc_feature (1)..(111): NCBI GI NO: 18423494 NR Description: ubiquitin-conjugating enzyme 10 (UBC10)
  misc_feature (1)..(111): NCBI GI NO: 11762186 NR Description: AT4g27960 [Arabidopsis thaliana]
  misc_feature (1)..(111): NCBI GI NO: 18417097 NR Description: ubiquitin-conjugating enzyme 9 (UBC9)
  misc_feature (1)..(111): NCBI GI NO: 21554343 NR Description: E2, ubiquitin-conjugating enzyme 10 (UBC10)
  misc_feature (1)..(111): NCBI GI NO: 30687803 NR Description: ubiquitin-conjugating enzyme 9 (UBC9)
  misc_feature (1)..(111): NCBI GI NO: 40287554 NR Description: ubiquitin-conjugating enzyme 8 [Capsicum annuum]
  misc_feature (1)..(111): NCBI GI NO: 5762457 NR Description: ubiquitin-conjugating enzyme UBC2
  misc_feature (1)..(111): NCBI GI NO: 18408001 NR Description: ubiquitin-conjugating enzyme
  misc_feature (1)..(111): NCBI GI NO: 19347859 NR Description: putative E2, ubiquitin-conjugating enzyme UBC9
  misc_feature (1)..(111): NCBI GI NO: 456568 NR Description: ubiquitin conjugating enzyme
MGPSESPYAGGVFLVTIHFPPDYPFKPPKVAFRTKVFHPNINSNGSICLDILKEQWSPALTISKVLLSICSLLTDPNPDDPLVPEIAHMYKTDKNKYESTARSWTQKYAMG

SEQ ID NO: 865 - DNA, 979 bp, Arabidopsis thaliana
  misc_feature (1)..(979): Ceres Seq. ID no. 13493781
gaaccgtctctgaatctgaccgaccaccattcttctcgcgccggcgatttcactgtttacagagaaatctcgagaaccctaacctgggtctctctagatttctttgaaatttcgagaatctagggtttcaaactaaaatcgagtccttgagttttcccaatttaaatcgttatgagctctatcaatatcactaacgtcaccgtcttggacaatcctgctccgtttgtgaatccattccagttcgagatttcttacgaatgcttgacctctctcaaagacgatttggaatggaagcttatatacgtagggtcagctgaagacgaaacgtatgatcaagttttggaaagtgttcttgttggtcctgttaacgttgggaactatcgatttgtgttgcaggctgactctccagatccgttaaagattcgtgaggaagatattattggtgttactgtgttattgttgacttgctcatacatggatcaagagtttataagagttggctattatgtgaacaatgactatgatgatgaacagctcagggaagagcctcctaccaaggttttgattgataaggtccaaaggaacatactcacagacaaacctagagtaactaagttccctatcaactttcatcctgagaatgagcagactcttggtgatgggcctgcacctactgaaccatttgctgattctgttgtaaatggagaagctccggtgtttcttgagcagccacaaaagcttcaggagatagaacaatttgatgattctgatgtaaatggagaagctatagcgttgcttgatcagccacaaaatctccaggagacatgattcttgtttgactcaagcttaactggaaactggattagaactatcatctcaattctaatcgaaagatttgtatttttgtttcttttatctggaacttgaactccagttgtgttactgtttgtagaaatttaagttcttcttgcaacatccc

SEQ ID NO: 866 - protein, 218 aa, Arabidopsis thaliana
  peptide (1)..(218): Ceres Seq. ID no. 13493782
  misc_feature (1)..(155): Pfam Name: Pfam Description:  Anti-silencing protein, ASF1-like
  misc_feature (1)..(218): NCBI GI NO: 15240842 NR Description: anti-silencing factor 1-related protein
  misc_feature (1)..(186): NCBI GI NO: 15219729 NR Description: (ASF1a) anti-silencing function 1a protein
  misc_feature (12)..(187): NCBI GI NO: 6069498 NR Description: S-locus protein 7 [Brassica rapa]
  misc_feature (25)..(162): NCBI GI NO: 34911252 NR Description: putative anti-silencing factor 1-like protein
  misc_feature (1)..(189): NCBI GI NO: 17737649 NR Description: anti-silencing factor 1 CG9383-PA
  misc_feature (1)..(180): NCBI GI NO: 6841514 NR Description: HSPC146 [Homo sapiens]
  misc_feature (1)..(180): NCBI GI NO: 7661592 NR Description: ASF1 anti-silencing function 1 homolog A
  misc_feature (1)..(180): NCBI GI NO: 27705326 NR Description: similar to RIKEN cDNA 2310079C17
  misc_feature (1)..(180): NCBI GI NO: 13384964 NR Description: ASF1 anti-silencing function 1 homolog A
  misc_feature (1)..(163): NCBI GI NO: 33416731 NR Description: Unknown (protein for MGC:69151) [Xenopus laevis]
MSSINITNVTVLDNPAPFVNPFQFEISYECLTSLKDDLEWKLIYVGSAEDETYDQVLESVLVGPVNVGNYRFVLQADSPDPLKIREEDIIGVTVLLLTCSYMDQEFIRVGYYVNNDYDDEQLREEPPTKVLIDKVQRNILTDKPRVTKFPINFHPENEQTLGDGPAPTEPFADSVVNGEAPVFLEQPQKLQEIEQFDDSDVNGEAIALLDQPQNLQET

SEQ ID NO: 867 - protein, 117 aa, Arabidopsis thaliana
  peptide (1)..(117): Ceres Seq. ID no. 13493783
  misc_feature (1)..(54): Pfam Name: Pfam Description:  Anti-silencing protein, ASF1-like
  misc_feature (1)..(117): NCBI GI NO: 15240842 NR Description: anti-silencing factor 1-related protein
  misc_feature (1)..(85): NCBI GI NO: 15219729 NR Description: (ASF1a) anti-silencing function 1a protein
  misc_feature (1)..(86): NCBI GI NO: 6069498 NR Description: S-locus protein 7 [Brassica rapa]
  misc_feature (1)..(61): NCBI GI NO: 34911252 NR Description: putative anti-silencing factor 1-like protein
  misc_feature (1)..(88): NCBI GI NO: 17737649 NR Description: anti-silencing factor 1 CG9383-PA
  misc_feature (1)..(79): NCBI GI NO: 6841514 NR Description: HSPC146 [Homo sapiens]
  misc_feature (1)..(79): NCBI GI NO: 7661592 NR Description: ASF1 anti-silencing function 1 homolog A
  misc_feature (1)..(79): NCBI GI NO: 27705326 NR Description: similar to RIKEN cDNA 2310079C17
  misc_feature (1)..(79): NCBI GI NO: 13384964 NR Description: ASF1 anti-silencing function 1 homolog A
  misc_feature (1)..(62): NCBI GI NO: 33416731 NR Description: Unknown (protein for MGC:69151) [Xenopus laevis]
MDQEFIRVGYYVNNDYDDEQLREEPPTKVLIDKVQRNILTDKPRVTKFPINFHPENEQTLGDGPAPTEPFADSVVNGEAPVFLEQPQKLQEIEQFDDSDVNGEAIALLDQPQNLQET

SEQ ID NO: 868 - DNA, 989 bp, Arabidopsis thaliana
  misc_feature (1)..(989): Ceres Seq. ID no. 12332944
atttttcggatcggaccaattcgactaatcggttccggtttctttcccggggcaaggtagagctagagatttcgaagaagaaacgaaagggagagagagagatagacaagttccgcgatgaacgaaggctcgagcgaagaagtaacgaggacggtaatggaagagaaaccagaacagcaacaaagaggatctctggagaaaggaagatcgtgcaaaggctatttatattactcttccactctcaaatccaagtctaagaaccctcgctgcgtcggaatccctcgtactctccgtcaagttcctgattatgttgttggacaatctgaagctgaagcttctaaagacggaaggaccttagctgatttttactatggatgtttgggttattccgtctacatgactgataaagactcatctgccatcaagcaacatacgaagactcaacttcccgtttgtgtcggtcttgagatattagcagatagaagagcagcttctggcaatacttcatctgttccagcccgtgttcaaaatagaaaagattcccgggaggtgcctgtgcctcagcaccagaacaataaaccagccactgccacaaacacagaaaacggcttcttaaccaggttcacaagaaacgcaaacctggtagcagcaggggtgatgaagaacatgaagagagttggtaactatgtgaaagaaactgtggatgattccttggacccatatcgcaagcgaccaaaataaagaaactttttacattagatgtggagacaacaaacccaaaaaaaatgaccgacagacgacaggatatgaatcttatttgacacttttttggattctcttgaatcatcaaaaaataaaatcaaccaaaaaaaatggctgtatgatttgtttaagcaggccatgtcccaaagaccaaagtaatgtgtacaccttcctcagttttggtttactgatattatacatatgccaatgaggttcacttttattgc

SEQ ID NO: 869 - protein, 207 aa, Arabidopsis thaliana
  peptide (1)..(207): Ceres Seq. ID no. 12332945
  misc_feature (1)..(207): NCBI GI NO: 15230397 NR Description: putative protein; protein id: At3g51100.1
MNEGSSEEVTRTVMEEKPEQQQRGSLEKGRSCKGYLYYSSTLKSKSKNPRCVGIPRTLRQVPDYVVGQSEAEASKDGRTLADFYYGCLGYSVYMTDKDSSAIKQHTKTQLPVCVGLEILADRRAASGNTSSVPARVQNRKDSREVPVPQHQNNKPATATNTENGFLTRFTRNANLVAAGVMKNMKRVGNYVKETVDDSLDPYRKRPK

SEQ ID NO: 870 - protein, 194 aa, Arabidopsis thaliana
  peptide (1)..(194): Ceres Seq. ID no. 12332946
  misc_feature (1)..(194): NCBI GI NO: 15230397 NR Description: putative protein; protein id: At3g51100.1
MEEKPEQQQRGSLEKGRSCKGYLYYSSTLKSKSKNPRCVGIPRTLRQVPDYVVGQSEAEASKDGRTLADFYYGCLGYSVYMTDKDSSAIKQHTKTQLPVCVGLEILADRRAASGNTSSVPARVQNRKDSREVPVPQHQNNKPATATNTENGFLTRFTRNANLVAAGVMKNMKRVGNYVKETVDDSLDPYRKRPK

SEQ ID NO: 871 - protein, 114 aa, Arabidopsis thaliana
  peptide (1)..(114): Ceres Seq. ID no. 12332947
  misc_feature (1)..(114): NCBI GI NO: 15230397 NR Description: putative protein; protein id: At3g51100.1
MTDKDSSAIKQHTKTQLPVCVGLEILADRRAASGNTSSVPARVQNRKDSREVPVPQHQNNKPATATNTENGFLTRFTRNANLVAAGVMKNMKRVGNYVKETVDDSLDPYRKRPK

SEQ ID NO: 872 - DNA, 1645 bp, Arabidopsis thaliana
  misc_feature (1)..(1645): Ceres Seq. ID no. 13593234
actctgtcgcttggcgcgctctctctccatagttccagttctgaaatctcactttcacagtttgtgtctgtgcgataatggccatggcagagctctcaacccccaaaacgacgtcgccttttctcaactcttcgtctcggcttcgtctctcttcaaaattgcacctttcaaaccactttcgccatcttcttcttccacctctccacacaacaactcccaactccaaaatctcttgctccgtttctcaaaatagccaagctcctgttgctgtgcaagaaaatggattggtgaagacgaagaaagagtgttatggagtgttctgcctcacctatgatcttaaagctgaagaagagacaagatcatggaagaagttaattaatattgcagtttcaggtgctgcaggaatgatttctaaccatcttctcttcaaacttgcttcaggggaagtatttggtccagatcaacccattgcattgaaactgctaggatcagagagatcaattcaagctcttgaaggtgttgcaatggaactggaggattcattgttcccattgttgagagaagttgatataggaacagatccaaatgaagtgttccaagatgtggagtgggctattctgattggagcaaaacctcgaggccctggaatggaacgtgctgacttgttggacatcaatggccaaatctttgctgagcagggcaaagctctgaacaaagctgcctctcctaacgtcaaggttcttgtagtgggaaacccttgcaacaccaatgccttgatttgtcttaaaaatgctcccaacattcctgcaaagaacttccatgccctcacgaggttagacgaaaatcgtgccaaatgccagcttgctcttaaagccggtgttttctatgacaaagtgtctaatatgaccatatggggaaatcactccacgactcaggtgccagacttcttaaatgccagaattaatggcctgcctgtgaaggaggttattacagatcacaaatggttagaagagggattcactgagagtgtgcagaagagaggtgggttattaattcagaaatggggtcgatcttctgctgcttctactgctgtttccattgttgatgctataaagtctcttgtaactcctactcctgagggtgattggttttcgactggggtgtacacggatggaaatccttatggtattgaagagggccttgtcttcagtatgccatgccggtcgaagggagatggagattatgaacttgtcaaggatgtagaaattgatgactaccttcgccaacgaatcgccaagtcggaagcggaactgttggctgagaagagatgtgttgcacacctcactggagagggcattgcctactgtgatcttggtccggtagatactatgcttcctggggaagtttgatttttgcaggacgttgaacatctcaagtaagcattctcttccgggttgttagctgtacagagcacagccacattacttatgatgattgttcagaataagaaaatgaaactcttatttcttatttacatgcatctgtatgtgatttttcttgagcaatgctccaaaagtcatatacagtagtatttgtaaacacttgaaacgtttctatgctttattccagtttcagaactcaaact

SEQ ID NO: 873 - protein, 443 aa, Arabidopsis thaliana
  peptide (1)..(443): Ceres Seq. ID no. 13593235
  misc_feature (251)..(423): Pfam Name: Pfam Description:  lactate/malate dehydrogenase
  misc_feature (1)..(443): NCBI GI NO: 30697049 NR Description: malate dehydrogenase
  misc_feature (1)..(443): NCBI GI NO: 18377751 NR Description: putative NADP-dependent malate dehydrogenase
  misc_feature (1)..(443): NCBI GI NO: 30697051 NR Description: malate dehydrogenase
  misc_feature (3)..(443): NCBI GI NO: 21554349 NR Description: NADP-dependent malate dehydrogenase
  misc_feature (1)..(443): NCBI GI NO: 11133370 NR Description: Malate dehydrogenase
  misc_feature (1)..(443): NCBI GI NO: 462579 NR Description: Malate dehydrogenase
  misc_feature (1)..(443): NCBI GI NO: 462578 NR Description: Malate dehydrogenase
  misc_feature (7)..(443): NCBI GI NO: 1170895 NR Description: Malate dehydrogenase
  misc_feature (45)..(443): NCBI GI NO: 726334 NR Description: NADP-malate dehydrogenase
  misc_feature (52)..(443): NCBI GI NO: 7546191 NR Description: Chain A
MAMAELSTPKTTSPFLNSSSRLRLSSKLHLSNHFRHLLLPPLHTTTPNSKISCSVSQNSQAPVAVQENGLVKTKKECYGVFCLTYDLKAEEETRSWKKLINIAVSGAAGMISNHLLFKLASGEVFGPDQPIALKLLGSERSIQALEGVAMELEDSLFPLLREVDIGTDPNEVFQDVEWAILIGAKPRGPGMERADLLDINGQIFAEQGKALNKAASPNVKVLVVGNPCNTNALICLKNAPNIPAKNFHALTRLDENRAKCQLALKAGVFYDKVSNMTIWGNHSTTQVPDFLNARINGLPVKEVITDHKWLEEGFTESVQKRGGLLIQKWGRSSAASTAVSIVDAIKSLVTPTPEGDWFSTGVYTDGNPYGIEEGLVFSMPCRSKGDGDYELVKDVEIDDYLRQRIAKSEAELLAEKRCVAHLTGEGIAYCDLGPVDTMLPGEV

SEQ ID NO: 874 - protein, 441 aa, Arabidopsis thaliana
  peptide (1)..(441): Ceres Seq. ID no. 13593236
  misc_feature (249)..(421): Pfam Name: Pfam Description:  lactate/malate dehydrogenase
  misc_feature (1)..(441): NCBI GI NO: 30697049 NR Description: malate dehydrogenase
  misc_feature (1)..(441): NCBI GI NO: 18377751 NR Description: putative NADP-dependent malate dehydrogenase
  misc_feature (1)..(441): NCBI GI NO: 30697051 NR Description: malate dehydrogenase
  misc_feature (1)..(441): NCBI GI NO: 21554349 NR Description: NADP-dependent malate dehydrogenase
  misc_feature (1)..(441): NCBI GI NO: 11133370 NR Description: Malate dehydrogenase
  misc_feature (1)..(441): NCBI GI NO: 462579 NR Description: Malate dehydrogenase
  misc_feature (1)..(441): NCBI GI NO: 462578 NR Description: Malate dehydrogenase
  misc_feature (5)..(441): NCBI GI NO: 1170895 NR Description: Malate dehydrogenase
  misc_feature (43)..(441): NCBI GI NO: 726334 NR Description: NADP-malate dehydrogenase
  misc_feature (50)..(441): NCBI GI NO: 7546191 NR Description: Chain A
MAELSTPKTTSPFLNSSSRLRLSSKLHLSNHFRHLLLPPLHTTTPNSKISCSVSQNSQAPVAVQENGLVKTKKECYGVFCLTYDLKAEEETRSWKKLINIAVSGAAGMISNHLLFKLASGEVFGPDQPIALKLLGSERSIQALEGVAMELEDSLFPLLREVDIGTDPNEVFQDVEWAILIGAKPRGPGMERADLLDINGQIFAEQGKALNKAASPNVKVLVVGNPCNTNALICLKNAPNIPAKNFHALTRLDENRAKCQLALKAGVFYDKVSNMTIWGNHSTTQVPDFLNARINGLPVKEVITDHKWLEEGFTESVQKRGGLLIQKWGRSSAASTAVSIVDAIKSLVTPTPEGDWFSTGVYTDGNPYGIEEGLVFSMPCRSKGDGDYELVKDVEIDDYLRQRIAKSEAELLAEKRCVAHLTGEGIAYCDLGPVDTMLPGEV

SEQ ID NO: 875 - protein, 334 aa, Arabidopsis thaliana
  peptide (1)..(334): Ceres Seq. ID no. 13593237
  misc_feature (142)..(314): Pfam Name: Pfam Description:  lactate/malate dehydrogenase
  misc_feature (1)..(334): NCBI GI NO: 30697049 NR Description: malate dehydrogenase
  misc_feature (1)..(334): NCBI GI NO: 18377751 NR Description: putative NADP-dependent malate dehydrogenase
  misc_feature (1)..(334): NCBI GI NO: 30697051 NR Description: malate dehydrogenase
  misc_feature (1)..(334): NCBI GI NO: 21554349 NR Description: NADP-dependent malate dehydrogenase
  misc_feature (1)..(334): NCBI GI NO: 11133370 NR Description: Malate dehydrogenase
  misc_feature (1)..(334): NCBI GI NO: 462579 NR Description: Malate dehydrogenase
  misc_feature (1)..(334): NCBI GI NO: 462578 NR Description: Malate dehydrogenase
  misc_feature (1)..(334): NCBI GI NO: 1170895 NR Description: Malate dehydrogenase
  misc_feature (1)..(334): NCBI GI NO: 726334 NR Description: NADP-malate dehydrogenase
  misc_feature (1)..(334): NCBI GI NO: 7546191 NR Description: Chain A
MISNHLLFKLASGEVFGPDQPIALKLLGSERSIQALEGVAMELEDSLFPLLREVDIGTDPNEVFQDVEWAILIGAKPRGPGMERADLLDINGQIFAEQGKALNKAASPNVKVLVVGNPCNTNALICLKNAPNIPAKNFHALTRLDENRAKCQLALKAGVFYDKVSNMTIWGNHSTTQVPDFLNARINGLPVKEVITDHKWLEEGFTESVQKRGGLLIQKWGRSSAASTAVSIVDAIKSLVTPTPEGDWFSTGVYTDGNPYGIEEGLVFSMPCRSKGDGDYELVKDVEIDDYLRQRIAKSEAELLAEKRCVAHLTGEGIAYCDLGPVDTMLPGEV

SEQ ID NO: 876 - DNA, 1068 bp, Arabidopsis thaliana
  misc_feature (1)..(1068): Ceres Seq. ID no. 12334919
aatgatctgatctgatctcccaaaaattcccaaatccaaatctacgaatctccgtctcctccgtcgcattttccgaggtagagagagagatcaaaccaaagagacacagagagagtatccaccgatggaatccgcagcaacggctgttgtacctccggcagccgccgccaccaccgccaccgccaccgatgataatctccaatcaagcgactcatcatctcccgccgacgccgttaaccgattgatccacgccttttcgcagcgacaacaacatcttctcgacaaaacggttcctcacgttctctatcgatggatcgcatgtctctgtgttgtattgatctacatcgttcgtgtttactttgtggaaggcttctacatcatcacttacgccatcggcatctaccttttgaatctcatcattgcttttctatctcctcaagaagatcccgaagcttctctcacttccggtggttctcttcctactcggagatccgatgagtatcgtcctttcgttcgccgtctccctgagttcaaattctggttatcgatcataagggctttcatcatcggatttatgatgacgttcttcgaggtgtttgatgtacctgtattctggccaatacttctcttctactgggtgatgttgtttttccttacgatgaggaaacagatacagcatatgatcaaatacagatatgtccctttctcttttgggaaaaagcagtatggaaagaaaccggctccaacagagagcagtgaatgatcaatcaaaactgttcaggtcagcaattttacagtcttttgagagaagtagcatttgaaaaggtcggtcttttgttctcttttgatggcctatatctttgttagggatgaagtagagatagacatattttgctcttttatcatcctgactattttactggtttcacctgaactcaatgtacaatcttatttttttacatccttttttcagtgagaaaataatgtttcatacttgacccttttgtaatcatcatggtggaaaactaaagactaatcagtaatcactgtccggttctatcgatgttc

SEQ ID NO: 877 - protein, 212 aa, Arabidopsis thaliana
  peptide (1)..(212): Ceres Seq. ID no. 12334920
  misc_feature (23)..(204): Pfam Name: Pfam Description:  Rer1 family
  misc_feature (1)..(212): NCBI GI NO: 18400234 NR Description: putative integral membrane protein
  misc_feature (1)..(212): NCBI GI NO: 30682033 NR Description: integral membrane protein -related
  misc_feature (1)..(199): NCBI GI NO: 7488292 NR Description: probable integral membrane protein At2g23310
  misc_feature (1)..(140): NCBI GI NO: 27817215 NR Description: putative endoplasmic reticulum retrieval protein
  misc_feature (29)..(202): NCBI GI NO: 15234975 NR Description: AtRer1A; protein id: At4g39220
  misc_feature (29)..(204): NCBI GI NO: 11281669 NR Description: endoplasmatic reticulum retrieval protein Rer1B
  misc_feature (3)..(144): NCBI GI NO: 35210534 NR Description: putative endoplasmatic reticulum retrieval protein Rer1B
  misc_feature (141)..(199): NCBI GI NO: 35210534 NR Description: putative endoplasmatic reticulum retrieval protein Rer1B
  misc_feature (29)..(204): NCBI GI NO: 15226596 NR Description: AtRer1B; protein id: At2g21600
  misc_feature (4)..(200): NCBI GI NO: 34894094 NR Description: putative Rer1A protein (AtRer1A)
MESAATAVVPPAAAATTATATDDNLQSSDSSSPADAVNRLIHAFSQRQQHLLDKTVPHVLYRWIACLCVVLIYIVRVYFVEGFYIITYAIGIYLLNLIIAFLSPQEDPEASLTSGGSLPTRRSDEYRPFVRRLPEFKFWLSIIRAFIIGFMMTFFEVFDVPVFWPILLFYWVMLFFLTMRKQIQHMIKYRYVPFSFGKKQYGKKPAPTESSE

SEQ ID NO: 878 - DNA, 1221 bp, Arabidopsis thaliana
  misc_feature (1)..(1221): Ceres Seq. ID no. 13490479
aatttcgacacaaaaagccctaatctctgcttctgtaaagttcaacatttggcggagtcaaagaaacagagtgattctctgatccgattccggcgaaagaggacgaaacaaacggaacttgttcatcatcttctccagaaatgacgtcgtttcaggtgatgcgttcttcaaattcgagaaactcggatctatctcgtcgcatctcttctgcttctacttcttcttcgtctataagacctcaacaacagttccggcgagatctaacaagtgtcggttacggcggaagaaacgacggattatacagttcaaattcgatgacggtcgaagggattttacacgatactttcgcatcagatccaccagcaccaacggaatcttcactcttagatgcgtcgataaatctgatggatgcttctccagcaccaatggagataacaacaacgacggcttctgatgttgtggatcacggcggaggaacggagacgacgcgtggtgggaagagtgttgatgagatttggagagagatggtatcaggagaaggtaaagggatgaaggaagagacgtcggaagagataatgacgttagaggattttctagcgaaagctgcggtggaagacgaaacagcggtgacggcgtcggcggaggatttggatgtgaagattccggtgacgaattacggattcgatcattctgcaccgccgcataatccgtttcagatgattgataaagtagaaggatcaatagttgcgtttgggaatggtttagatgtttacggaggaggagctagagggaagagagcgagagtgatggttgagccattggataaagcagctgcacagagacagagaaggatgattaagaatcgtgaatctgcagctaggtctagagagaggaaacaagcttatcaagttgagttagaagctttggctgcgaagcttgaggaagagaatgagttgctttctaaggagattgaagataagaggaaagagagataccagaagttgatggagtttgtgattcctgttgttgagaaaccgaagcagcagccaccacggtttttacgcaggattcggtctttggaatggtgataagaggtatagacttttgaggattttagggtcttaatgttacttactttgtgtatgtgtgtgtgagagttgattcataatctgcagtagagtgtaatgattatggttaataacttatatattatattagatt

SEQ ID NO: 879 - protein, 315 aa, Arabidopsis thaliana
  peptide (1)..(315): Ceres Seq. ID no. 13490480
  misc_feature (229)..(293): Pfam Name: Pfam Description:  bZIP transcription factor
  misc_feature (1)..(315): NCBI GI NO: 15240086 NR Description: bZIP transcription factor
  misc_feature (1)..(315): NCBI GI NO: 21554353 NR Description: unknown [Arabidopsis thaliana]
  misc_feature (103)..(315): NCBI GI NO: 15219608 NR Description: G-box binding factor 4, GBF4
  misc_feature (120)..(315): NCBI GI NO: 7489466 NR Description: DNA binding protein - rice
  misc_feature (120)..(315): NCBI GI NO: 7638404 NR Description: OSE2 [Oryza sativa]
  misc_feature (212)..(315): NCBI GI NO: 29367541 NR Description: OSE2-like protein
  misc_feature (120)..(315): NCBI GI NO: 34908608 NR Description: putative DNA binding protein
  misc_feature (116)..(312): NCBI GI NO: 33146493 NR Description: putative bZIP protein DPBF3
  misc_feature (120)..(278): NCBI GI NO: 26451276 NR Description: putative bZIP transcription factor AtbZIP12 / DPBF4
  misc_feature (120)..(278): NCBI GI NO: 7487620 NR Description: probable bZIP transcription factor
MTSFQVMRSSNSRNSDLSRRISSASTSSSSIRPQQQFRRDLTSVGYGGRNDGLYSSNSMTVEGILHDTFASDPPAPTESSLLDASINLMDASPAPMEITTTTASDVVDHGGGTETTRGGKSVDEIWREMVSGEGKGMKEETSEEIMTLEDFLAKAAVEDETAVTASAEDLDVKIPVTNYGFDHSAPPHNPFQMIDKVEGSIVAFGNGLDVYGGGARGKRARVMVEPLDKAAAQRQRRMIKNRESAARSRERKQAYQVELEALAAKLEEENELLSKEIEDKRKERYQKLMEFVIPVVEKPKQQPPRFLRRIRSLEW

SEQ ID NO: 880 - protein, 309 aa, Arabidopsis thaliana
  peptide (1)..(309): Ceres Seq. ID no. 13490481
  misc_feature (223)..(287): Pfam Name: Pfam Description:  bZIP transcription factor
  misc_feature (1)..(309): NCBI GI NO: 15240086 NR Description: bZIP transcription factor
  misc_feature (1)..(309): NCBI GI NO: 21554353 NR Description: unknown [Arabidopsis thaliana]
  misc_feature (97)..(309): NCBI GI NO: 15219608 NR Description: G-box binding factor 4, GBF4
  misc_feature (114)..(309): NCBI GI NO: 7489466 NR Description: DNA binding protein - rice
  misc_feature (114)..(309): NCBI GI NO: 7638404 NR Description: OSE2 [Oryza sativa]
  misc_feature (206)..(309): NCBI GI NO: 29367541 NR Description: OSE2-like protein
  misc_feature (114)..(309): NCBI GI NO: 34908608 NR Description: putative DNA binding protein
  misc_feature (110)..(306): NCBI GI NO: 33146493 NR Description: putative bZIP protein DPBF3
  misc_feature (114)..(272): NCBI GI NO: 26451276 NR Description: putative bZIP transcription factor AtbZIP12 / DPBF4
  misc_feature (114)..(272): NCBI GI NO: 7487620 NR Description: probable bZIP transcription factor
MRSSNSRNSDLSRRISSASTSSSSIRPQQQFRRDLTSVGYGGRNDGLYSSNSMTVEGILHDTFASDPPAPTESSLLDASINLMDASPAPMEITTTTASDVVDHGGGTETTRGGKSVDEIWREMVSGEGKGMKEETSEEIMTLEDFLAKAAVEDETAVTASAEDLDVKIPVTNYGFDHSAPPHNPFQMIDKVEGSIVAFGNGLDVYGGGARGKRARVMVEPLDKAAAQRQRRMIKNRESAARSRERKQAYQVELEALAAKLEEENELLSKEIEDKRKERYQKLMEFVIPVVEKPKQQPPRFLRRIRSLEW

SEQ ID NO: 881 - protein, 257 aa, Arabidopsis thaliana
  peptide (1)..(257): Ceres Seq. ID no. 13490482
  misc_feature (171)..(235): Pfam Name: Pfam Description:  bZIP transcription factor
  misc_feature (1)..(257): NCBI GI NO: 15240086 NR Description: bZIP transcription factor
  misc_feature (1)..(257): NCBI GI NO: 21554353 NR Description: unknown [Arabidopsis thaliana]
  misc_feature (45)..(257): NCBI GI NO: 15219608 NR Description: G-box binding factor 4, GBF4
  misc_feature (62)..(257): NCBI GI NO: 7489466 NR Description: DNA binding protein - rice
  misc_feature (62)..(257): NCBI GI NO: 7638404 NR Description: OSE2 [Oryza sativa]
  misc_feature (154)..(257): NCBI GI NO: 29367541 NR Description: OSE2-like protein
  misc_feature (62)..(257): NCBI GI NO: 34908608 NR Description: putative DNA binding protein
  misc_feature (58)..(254): NCBI GI NO: 33146493 NR Description: putative bZIP protein DPBF3
  misc_feature (62)..(220): NCBI GI NO: 26451276 NR Description: putative bZIP transcription factor AtbZIP12 / DPBF4
  misc_feature (62)..(220): NCBI GI NO: 7487620 NR Description: probable bZIP transcription factor
MTVEGILHDTFASDPPAPTESSLLDASINLMDASPAPMEITTTTASDVVDHGGGTETTRGGKSVDEIWREMVSGEGKGMKEETSEEIMTLEDFLAKAAVEDETAVTASAEDLDVKIPVTNYGFDHSAPPHNPFQMIDKVEGSIVAFGNGLDVYGGGARGKRARVMVEPLDKAAAQRQRRMIKNRESAARSRERKQAYQVELEALAAKLEEENELLSKEIEDKRKERYQKLMEFVIPVVEKPKQQPPRFLRRIRSLEW

SEQ ID NO: 882 - DNA, 1693 bp, Arabidopsis thaliana
  misc_feature (1)..(1693): Ceres Seq. ID no. 13490475
ataaaaatcccaacatctcctaaaatctcccaaactttcaaaaagttaaccaaaacccccaaacagaaaaatgagaaacaatttcgtccctataattctctccttcatcatcttcttgactccatcaatcgcagaacaagaaccttcaattctttctcccgtcgatcaactcctcaacaaaacaagctcatacctcgatttttcaacaaaattcaaccaaccaagaatcgaactaacaacatcaacgatcatcgccggcatactctctttcctagcttcatcaatctcaagcgccggtggaatcggcggtggaggtttatatgttccgataatgacaatcgtggccggtctcgatctaaagacagcttcaagcttctcagcttttatggttactggtggatctatagctaacgtgggatgcaatctattcgttagaaaccctaaatctggtggcaaaaccctaatcgacttcgatttagctcttttattggaaccatgtatgcttcttggagttagtattggtgtgatctgtaatcttgttttcccgaactggttgattacgagtctcttcgctgtttttcttgcgtggtcgacgttgaagacttttggaaatggactttattattggagattggaatcggagatggtgaagattagagaatcgaatagaatagaagaagatgatgatgaagaagataagattgagagtctaaagttgcctctcttggaggattatcagagaccaaagaggtttccatggattaagcttggagctttggtcattatttggctttcttactttgcagtttatcttcttcgaggaaacaaatatggcgagggaatcatatcgatcgagccatgtggaaacgcctactggctcatttcatcgtctcaaataccactaactctcttcttcactctctggatctgcttcagtgacaatgttcaaagccaacaacaatcagattaccatgtctcagtaaaggatgtagaagatttgagatcaaatgatggagcaagatcaaacaagtgtatgttccctgtaatggctctattagctggagttttgggtggtgtgttcggtattggaggtggaatgctcattagtcctcttcttcttcaagtcggtatcgctcccgaggtaactgcagcgacatgttctttcatggttcttttttcatcaacaatgtctgcgattcaatacttattactaggcatggaacataccggaaccgcaagtatatttacggtcatatgttttgtggcgtcactcgtgggactaaaggtggttcaaaaggtaataaccgagtatggaagggcttcgatcattgtgttctcggttggtatcgtcatggcattgagtattgtgttgatgacaagctatggagctcttgatgtttggaatgattatgtctctggtcgttacatgggtttcaagttaccttgttgagaccaagaaaagaaagttttggtttcttgggttacaagtttcataatacatgtgtatatcatatcaccatgttgttgctctttcatccatttggtcatttagagttaagaagctttctgtttctttcttttgtatgatttttatatcactattcagaatgcacatctcgtgcattcgaatatatggtcaaataaaagttatgttgtgaacctaaattcatatttcaatatcaaatttctatgc

SEQ ID NO: 883 - protein, 459 aa, Arabidopsis thaliana
  peptide (1)..(459): Ceres Seq. ID no. 13490476
  misc_feature (1)..(459): NCBI GI NO: 15220600 NR Description: expressed protein [Arabidopsis thaliana]
  misc_feature (70)..(459): NCBI GI NO: 11358507 NR Description: membrane protein
  misc_feature (1)..(459): NCBI GI NO: 15220419 NR Description: expressed protein [Arabidopsis thaliana]
  misc_feature (33)..(459): NCBI GI NO: 6554197 NR Description: T23J18.20 [Arabidopsis thaliana]
  misc_feature (1)..(419): NCBI GI NO: 15233579 NR Description: hypothetical protein [Arabidopsis thaliana]
  misc_feature (1)..(459): NCBI GI NO: 34908754 NR Description: P0415A04.10
  misc_feature (50)..(441): NCBI GI NO: 34908752 NR Description: P0415A04.9
  misc_feature (330)..(459): NCBI GI NO: 15233581 NR Description: hypothetical protein [Arabidopsis thaliana]
  misc_feature (87)..(200): NCBI GI NO: 15233581 NR Description: hypothetical protein [Arabidopsis thaliana]
  misc_feature (60)..(459): NCBI GI NO: 40253412 NR Description: membrane protein-like
MRNNFVPIILSFIIFLTPSIAEQEPSILSPVDQLLNKTSSYLDFSTKFNQPRIELTTSTIIAGILSFLASSISSAGGIGGGGLYVPIMTIVAGLDLKTASSFSAFMVTGGSIANVGCNLFVRNPKSGGKTLIDFDLALLLEPCMLLGVSIGVICNLVFPNWLITSLFAVFLAWSTLKTFGNGLYYWRLESEMVKIRESNRIEEDDDEEDKIESLKLPLLEDYQRPKRFPWIKLGALVIIWLSYFAVYLLRGNKYGEGIISIEPCGNAYWLISSSQIPLTLFFTLWICFSDNVQSQQQSDYHVSVKDVEDLRSNDGARSNKCMFPVMALLAGVLGGVFGIGGGMLISPLLLQVGIAPEVTAATCSFMVLFSSTMSAIQYLLLGMEHTGTASIFTVICFVASLVGLKVVQKVITEYGRASIIVFSVGIVMALSIVLMTSYGALDVWNDYVSGRYMGFKLPC

SEQ ID NO: 884 - protein, 372 aa, Arabidopsis thaliana
  peptide (1)..(372): Ceres Seq. ID no. 13490477
  misc_feature (1)..(372): NCBI GI NO: 15220600 NR Description: expressed protein [Arabidopsis thaliana]
  misc_feature (1)..(372): NCBI GI NO: 11358507 NR Description: membrane protein
  misc_feature (1)..(372): NCBI GI NO: 15220419 NR Description: expressed protein [Arabidopsis thaliana]
  misc_feature (1)..(372): NCBI GI NO: 6554197 NR Description: T23J18.20 [Arabidopsis thaliana]
  misc_feature (1)..(332): NCBI GI NO: 15233579 NR Description: hypothetical protein [Arabidopsis thaliana]
  misc_feature (1)..(372): NCBI GI NO: 34908754 NR Description: P0415A04.10
  misc_feature (1)..(354): NCBI GI NO: 34908752 NR Description: P0415A04.9
  misc_feature (243)..(372): NCBI GI NO: 15233581 NR Description: hypothetical protein [Arabidopsis thaliana]
  misc_feature (1)..(113): NCBI GI NO: 15233581 NR Description: hypothetical protein [Arabidopsis thaliana]
  misc_feature (1)..(372): NCBI GI NO: 40253412 NR Description: membrane protein-like
MTIVAGLDLKTASSFSAFMVTGGSIANVGCNLFVRNPKSGGKTLIDFDLALLLEPCMLLGVSIGVICNLVFPNWLITSLFAVFLAWSTLKTFGNGLYYWRLESEMVKIRESNRIEEDDDEEDKIESLKLPLLEDYQRPKRFPWIKLGALVIIWLSYFAVYLLRGNKYGEGIISIEPCGNAYWLISSSQIPLTLFFTLWICFSDNVQSQQQSDYHVSVKDVEDLRSNDGARSNKCMFPVMALLAGVLGGVFGIGGGMLISPLLLQVGIAPEVTAATCSFMVLFSSTMSAIQYLLLGMEHTGTASIFTVICFVASLVGLKVVQKVITEYGRASIIVFSVGIVMALSIVLMTSYGALDVWNDYVSGRYMGFKLPC

SEQ ID NO: 885 - protein, 354 aa, Arabidopsis thaliana
  peptide (1)..(354): Ceres Seq. ID no. 13490478
  misc_feature (1)..(354): NCBI GI NO: 15220600 NR Description: expressed protein [Arabidopsis thaliana]
  misc_feature (1)..(354): NCBI GI NO: 11358507 NR Description: membrane protein
  misc_feature (1)..(354): NCBI GI NO: 15220419 NR Description: expressed protein [Arabidopsis thaliana]
  misc_feature (1)..(354): NCBI GI NO: 6554197 NR Description: T23J18.20 [Arabidopsis thaliana]
  misc_feature (1)..(314): NCBI GI NO: 15233579 NR Description: hypothetical protein [Arabidopsis thaliana]
  misc_feature (1)..(354): NCBI GI NO: 34908754 NR Description: P0415A04.10
  misc_feature (1)..(336): NCBI GI NO: 34908752 NR Description: P0415A04.9
  misc_feature (225)..(354): NCBI GI NO: 15233581 NR Description: hypothetical protein [Arabidopsis thaliana]
  misc_feature (1)..(95): NCBI GI NO: 15233581 NR Description: hypothetical protein [Arabidopsis thaliana]
  misc_feature (1)..(354): NCBI GI NO: 40253412 NR Description: membrane protein-like
MVTGGSIANVGCNLFVRNPKSGGKTLIDFDLALLLEPCMLLGVSIGVICNLVFPNWLITSLFAVFLAWSTLKTFGNGLYYWRLESEMVKIRESNRIEEDDDEEDKIESLKLPLLEDYQRPKRFPWIKLGALVIIWLSYFAVYLLRGNKYGEGIISIEPCGNAYWLISSSQIPLTLFFTLWICFSDNVQSQQQSDYHVSVKDVEDLRSNDGARSNKCMFPVMALLAGVLGGVFGIGGGMLISPLLLQVGIAPEVTAATCSFMVLFSSTMSAIQYLLLGMEHTGTASIFTVICFVASLVGLKVVQKVITEYGRASIIVFSVGIVMALSIVLMTSYGALDVWNDYVSGRYMGFKLPC

SEQ ID NO: 886 - DNA, 1317 bp, Arabidopsis thaliana
  misc_feature (1)..(1317): Ceres Seq. ID no. 12421574
aagaagcctattcgacttcctacttttctccgtgtttctaggactcgcatgtctctgtttatctccgattccggaacagctcggaaactcaggttcagtgttaacggcgagttcaagatactacaagtggcggatatgcattttgctaacggcgctaagacgcagtgtcaaaatgttcttcctagccagagagctcattgctcagacctcaacaccaccatcttcatgtcgcgagtcatcgccgccgagaagcctgatcttatcgtcttcaccggtgataacatatttgggtttgatgtaaaagacgctttgaaatccataaacgctgcgtttgctccagcgattgcgtctaaaatcccatgggttgctattttgggaaaccatgaccaagaatctacatttacaagacaacaagttatgaatcacattgtgaagcttcccaacactttgtctcaagtgaatcctcctgaagctgctcattacattgatggttttggtaattacaatctccaaatccatggagctgctgattcgaaactacagaacaaatctgttcttaatctttattttctcgatagtggagattattctagtgttccttacatggaaggttatgattggatcaaaacttctcagcagttttggttcgaccgcacttcaaaacgtctcaagagggagtacaacgcaaagcctaatcctcaagaaggtatagctccaggactagcttacttccacattccattaccggagtttttgagttttgactcaaagaacgctacaaaaggagtgagacaagaaggtacatccgcggcttctacaaactcgggtttcttcacaacattgatagctagaggagatgtgaaatctgtgtttgtgggtcacgaccatgtcaacgacttctgcggtgaacttaaaggtttgaatctatgttatggtggtggatttgggtatcatgcttatggtaaagctggatgggaaagaagagcgagagttgtggttgttgatttgaataagaagagaaaaggaaagtggggagctgtgaaatcgattaagacatggaagaggcttgatgataagcatctctctgttattgactctcaagttctttggaacaattctgcaaacaaattagttgttcgttgatattgattccatgtgttgttgttttgatctgtctactaaatgttctgttttagttggttttgggtttcatagaaactgtttaagtgtttatcattgagttagttttaaactccatttgatgtaattttgtttggtttaagactttaaggcaagaaagtgaaaaactaaactttc

SEQ ID NO: 887 - protein, 380 aa, Arabidopsis thaliana
  peptide (1)..(380): Ceres Seq. ID no. 12421575
  misc_feature (38)..(298): Pfam Name: Pfam Description:  Calcineurin-like phosphoesterase
  misc_feature (28)..(380): NCBI GI NO: 15242654 NR Description: putative protein; protein id: At5g63140.1
  misc_feature (28)..(373): NCBI GI NO: 7208777 NR Description: putative PTS protein [Cicer arietinum]
  misc_feature (9)..(376): NCBI GI NO: 25763519 NR Description: probable phosphoesterase (EC 3
  misc_feature (9)..(373): NCBI GI NO: 15226455 NR Description: hypothetical protein; protein id: At2g46880.1
  misc_feature (9)..(373): NCBI GI NO: 30267807 NR Description: hypothetical protein [Arabidopsis thaliana]
  misc_feature (9)..(316): NCBI GI NO: 30267809 NR Description: hypothetical protein [Arabidopsis thaliana]
  misc_feature (30)..(373): NCBI GI NO: 15242042 NR Description: putative protein; protein id: At5g57140.1
  misc_feature (23)..(373): NCBI GI NO: 6323393 NR Description: Dose-Dependent Cell cycle Regulator; Dcr2p
  misc_feature (31)..(365): NCBI GI NO: 40740622 NR Description: hypothetical protein AN3604.2
  misc_feature (76)..(344): NCBI GI NO: 29349293 NR Description: putative phosphohydrolase, Icc family
KKPIRLPTFLRVSRTRMSLFISDSGTARKLRFSVNGEFKILQVADMHFANGAKTQCQNVLPSQRAHCSDLNTTIFMSRVIAAEKPDLIVFTGDNIFGFDVKDALKSINAAFAPAIASKIPWVAILGNHDQESTFTRQQVMNHIVKLPNTLSQVNPPEAAHYIDGFGNYNLQIHGAADSKLQNKSVLNLYFLDSGDYSSVPYMEGYDWIKTSQQFWFDRTSKRLKREYNAKPNPQEGIAPGLAYFHIPLPEFLSFDSKNATKGVRQEGTSAASTNSGFFTTLIARGDVKSVFVGHDHVNDFCGELKGLNLCYGGGFGYHAYGKAGWERRARVVVVDLNKKRKGKWGAVKSIKTWKRLDDKHLSVIDSQVLWNNSANKLVVR

SEQ ID NO: 888 - protein, 364 aa, Arabidopsis thaliana
  peptide (1)..(364): Ceres Seq. ID no. 12421576
  misc_feature (22)..(282): Pfam Name: Pfam Description:  Calcineurin-like phosphoesterase
  misc_feature (12)..(364): NCBI GI NO: 15242654 NR Description: putative protein; protein id: At5g63140.1
  misc_feature (12)..(357): NCBI GI NO: 7208777 NR Description: putative PTS protein [Cicer arietinum]
  misc_feature (1)..(360): NCBI GI NO: 25763519 NR Description: probable phosphoesterase (EC 3
  misc_feature (1)..(357): NCBI GI NO: 15226455 NR Description: hypothetical protein; protein id: At2g46880.1
  misc_feature (1)..(357): NCBI GI NO: 30267807 NR Description: hypothetical protein [Arabidopsis thaliana]
  misc_feature (1)..(300): NCBI GI NO: 30267809 NR Description: hypothetical protein [Arabidopsis thaliana]
  misc_feature (14)..(357): NCBI GI NO: 15242042 NR Description: putative protein; protein id: At5g57140.1
  misc_feature (7)..(357): NCBI GI NO: 6323393 NR Description: Dose-Dependent Cell cycle Regulator; Dcr2p
  misc_feature (15)..(349): NCBI GI NO: 40740622 NR Description: hypothetical protein AN3604.2
  misc_feature (60)..(328): NCBI GI NO: 29349293 NR Description: putative phosphohydrolase, Icc family
MSLFISDSGTARKLRFSVNGEFKILQVADMHFANGAKTQCQNVLPSQRAHCSDLNTTIFMSRVIAAEKPDLIVFTGDNIFGFDVKDALKSINAAFAPAIASKIPWVAILGNHDQESTFTRQQVMNHIVKLPNTLSQVNPPEAAHYIDGFGNYNLQIHGAADSKLQNKSVLNLYFLDSGDYSSVPYMEGYDWIKTSQQFWFDRTSKRLKREYNAKPNPQEGIAPGLAYFHIPLPEFLSFDSKNATKGVRQEGTSAASTNSGFFTTLIARGDVKSVFVGHDHVNDFCGELKGLNLCYGGGFGYHAYGKAGWERRARVVVVDLNKKRKGKWGAVKSIKTWKRLDDKHLSVIDSQVLWNNSANKLVVR

SEQ ID NO: 889 - protein, 335 aa, Arabidopsis thaliana
  peptide (1)..(335): Ceres Seq. ID no. 12421577
  misc_feature (1)..(253): Pfam Name: Pfam Description:  Calcineurin-like phosphoesterase
  misc_feature (1)..(335): NCBI GI NO: 15242654 NR Description: putative protein; protein id: At5g63140.1
  misc_feature (1)..(328): NCBI GI NO: 7208777 NR Description: putative PTS protein [Cicer arietinum]
  misc_feature (1)..(331): NCBI GI NO: 25763519 NR Description: probable phosphoesterase (EC 3
  misc_feature (1)..(328): NCBI GI NO: 15226455 NR Description: hypothetical protein; protein id: At2g46880.1
  misc_feature (1)..(328): NCBI GI NO: 30267807 NR Description: hypothetical protein [Arabidopsis thaliana]
  misc_feature (1)..(271): NCBI GI NO: 30267809 NR Description: hypothetical protein [Arabidopsis thaliana]
  misc_feature (1)..(328): NCBI GI NO: 15242042 NR Description: putative protein; protein id: At5g57140.1
  misc_feature (1)..(328): NCBI GI NO: 6323393 NR Description: Dose-Dependent Cell cycle Regulator; Dcr2p
  misc_feature (1)..(320): NCBI GI NO: 40740622 NR Description: hypothetical protein AN3604.2
  misc_feature (31)..(299): NCBI GI NO: 29349293 NR Description: putative phosphohydrolase, Icc family
MHFANGAKTQCQNVLPSQRAHCSDLNTTIFMSRVIAAEKPDLIVFTGDNIFGFDVKDALKSINAAFAPAIASKIPWVAILGNHDQESTFTRQQVMNHIVKLPNTLSQVNPPEAAHYIDGFGNYNLQIHGAADSKLQNKSVLNLYFLDSGDYSSVPYMEGYDWIKTSQQFWFDRTSKRLKREYNAKPNPQEGIAPGLAYFHIPLPEFLSFDSKNATKGVRQEGTSAASTNSGFFTTLIARGDVKSVFVGHDHVNDFCGELKGLNLCYGGGFGYHAYGKAGWERRARVVVVDLNKKRKGKWGAVKSIKTWKRLDDKHLSVIDSQVLWNNSANKLVVR

SEQ ID NO: 890 - DNA, 1143 bp, Arabidopsis thaliana
  misc_feature (1)..(1143): Ceres Seq. ID no. 12321414
aacaaacacaacatatccacaatacaaaacacaactttcatatataacaaaaaaagttatagaaatggccaaagacgtggaaggacctgagggatttcagacaagagactacgaagatccgccaccaactccgtttttcgatgcggacgagcttaccaagtggtctttatacagagccgtcattgccgagttcgtagccactctcctcttcttgtacatcaccgttttgactgttatcggttacaagattcagtccgacacaaaagctggtggagttgactgtggcggtgtcggaatccttggcatcgcgtgggcttttggtggcatgatcttcattcttgtctactgcaccgccggtatctcaggtggtcatataaacccggcggtgacatttggtttattcttagcccggaaggtgtcgctgattagggcggtgctttacatggtggctcagtgtttgggtgctatttgtggagttgggtttcgtcaaagctttcaaagctcttactatgatcgttacggtggaggagccaactctctagcagacggctacaacacaggcaccggactagccgcagagatcattggaacattcgttctcgtctacacagtcttctccgctactgatcccaaacgtaacgctagagactcccacgttccggttttggcgccacttccgattgggtttgcggtgtttatggtacatttggccactattccgatcaccggaaccggcatcaacccggctaggagtttcggagcgtccgtaatctataacaagagcaagccatgggatgaccactggatattctgggtgggaccattcattggagctgcgatagctgcattttatcaccaatttgtcctaagggcttcaggttccaagtcacttggatccttcagaagtgcagccaacgtttgagtttttgccacacaaaaaaaaacctatcataataacaacaattacaaaatggttgtgttattatgtatgtacaaaaattggcaactttgcttgtaaaactatgcactatatttcttcttgctttttctgttttcattgtggtgtaatactttgatatgtgccaatgccaatgtttgtgtactcgggaaaacaattaatgaaaaccaaattctttttgccct

SEQ ID NO: 891 - protein, 306 aa, Arabidopsis thaliana
  peptide (1)..(306): Ceres Seq. ID no. 12321415
  misc_feature (50)..(285): Pfam Name: Pfam Description:  Major intrinsic protein
  misc_feature (22)..(306): NCBI GI NO: 629543 NR Description: plasma membrane intrinsic protein 2b
  misc_feature (22)..(306): NCBI GI NO: 15228095 NR Description: aquaporin
  misc_feature (22)..(306): NCBI GI NO: 21554356 NR Description: aquaporin (plasma membrane intrinsic protein 2B)
  misc_feature (22)..(306): NCBI GI NO: 15228096 NR Description: aquaporin
  misc_feature (22)..(306): NCBI GI NO: 21537097 NR Description: aquaporin (plasma membrane intrinsic protein 2C)
  misc_feature (22)..(304): NCBI GI NO: 7209560 NR Description: Plasma membrane aquaporin 2b [Raphanus sativus]
  misc_feature (22)..(304): NCBI GI NO: 5081423 NR Description: plasma membrane intrinsic protein 2
  misc_feature (22)..(304): NCBI GI NO: 7209562 NR Description: Plasma membrane aquaporin 2c [Raphanus sativus]
  misc_feature (22)..(306): NCBI GI NO: 15231810 NR Description: plasma membrane intrinsic protein 2a
  misc_feature (22)..(306): NCBI GI NO: 5081421 NR Description: plasma membrane intrinsic protein 1
TNTTYPQYKTQLSYITKKVIEMAKDVEGPEGFQTRDYEDPPPTPFFDADELTKWSLYRAVIAEFVATLLFLYITVLTVIGYKIQSDTKAGGVDCGGVGILGIAWAFGGMIFILVYCTAGISGGHINPAVTFGLFLARKVSLIRAVLYMVAQCLGAICGVGFRQSFQSSYYDRYGGGANSLADGYNTGTGLAAEIIGTFVLVYTVFSATDPKRNARDSHVPVLAPLPIGFAVFMVHLATIPITGTGINPARSFGASVIYNKSKPWDDHWIFWVGPFIGAAIAAFYHQFVLRASGSKSLGSFRSAANV

SEQ ID NO: 892 - protein, 285 aa, Arabidopsis thaliana
  peptide (1)..(285): Ceres Seq. ID no. 12321416
  misc_feature (29)..(264): Pfam Name: Pfam Description:  Major intrinsic protein
  misc_feature (1)..(285): NCBI GI NO: 629543 NR Description: plasma membrane intrinsic protein 2b
  misc_feature (1)..(285): NCBI GI NO: 15228095 NR Description: aquaporin
  misc_feature (1)..(285): NCBI GI NO: 21554356 NR Description: aquaporin (plasma membrane intrinsic protein 2B)
  misc_feature (1)..(285): NCBI GI NO: 15228096 NR Description: aquaporin
  misc_feature (1)..(285): NCBI GI NO: 21537097 NR Description: aquaporin (plasma membrane intrinsic protein 2C)
  misc_feature (1)..(283): NCBI GI NO: 7209560 NR Description: Plasma membrane aquaporin 2b [Raphanus sativus]
  misc_feature (1)..(283): NCBI GI NO: 5081423 NR Description: plasma membrane intrinsic protein 2
  misc_feature (1)..(283): NCBI GI NO: 7209562 NR Description: Plasma membrane aquaporin 2c [Raphanus sativus]
  misc_feature (1)..(285): NCBI GI NO: 15231810 NR Description: plasma membrane intrinsic protein 2a
  misc_feature (1)..(285): NCBI GI NO: 5081421 NR Description: plasma membrane intrinsic protein 1
MAKDVEGPEGFQTRDYEDPPPTPFFDADELTKWSLYRAVIAEFVATLLFLYITVLTVIGYKIQSDTKAGGVDCGGVGILGIAWAFGGMIFILVYCTAGISGGHINPAVTFGLFLARKVSLIRAVLYMVAQCLGAICGVGFRQSFQSSYYDRYGGGANSLADGYNTGTGLAAEIIGTFVLVYTVFSATDPKRNARDSHVPVLAPLPIGFAVFMVHLATIPITGTGINPARSFGASVIYNKSKPWDDHWIFWVGPFIGAAIAAFYHQFVLRASGSKSLGSFRSAANV

SEQ ID NO: 893 - protein, 198 aa, Arabidopsis thaliana
  peptide (1)..(198): Ceres Seq. ID no. 12321417
  misc_feature (1)..(177): Pfam Name: Pfam Description:  Major intrinsic protein
  misc_feature (1)..(198): NCBI GI NO: 629543 NR Description: plasma membrane intrinsic protein 2b
  misc_feature (1)..(198): NCBI GI NO: 15228095 NR Description: aquaporin
  misc_feature (1)..(198): NCBI GI NO: 21554356 NR Description: aquaporin (plasma membrane intrinsic protein 2B)
  misc_feature (1)..(198): NCBI GI NO: 15228096 NR Description: aquaporin
  misc_feature (1)..(198): NCBI GI NO: 21537097 NR Description: aquaporin (plasma membrane intrinsic protein 2C)
  misc_feature (1)..(196): NCBI GI NO: 7209560 NR Description: Plasma membrane aquaporin 2b [Raphanus sativus]
  misc_feature (1)..(196): NCBI GI NO: 5081423 NR Description: plasma membrane intrinsic protein 2
  misc_feature (1)..(196): NCBI GI NO: 7209562 NR Description: Plasma membrane aquaporin 2c [Raphanus sativus]
  misc_feature (1)..(198): NCBI GI NO: 15231810 NR Description: plasma membrane intrinsic protein 2a
  misc_feature (1)..(198): NCBI GI NO: 5081421 NR Description: plasma membrane intrinsic protein 1
MIFILVYCTAGISGGHINPAVTFGLFLARKVSLIRAVLYMVAQCLGAICGVGFRQSFQSSYYDRYGGGANSLADGYNTGTGLAAEIIGTFVLVYTVFSATDPKRNARDSHVPVLAPLPIGFAVFMVHLATIPITGTGINPARSFGASVIYNKSKPWDDHWIFWVGPFIGAAIAAFYHQFVLRASGSKSLGSFRSAANV

SEQ ID NO: 894 - DNA, 1530 bp, Arabidopsis thaliana
  misc_feature (1)..(1530): Ceres Seq. ID no. 13487891
aacttgccaataattttttcaactgttacagattactacatcaacgaaatattaaacatttaaccatatataaaagttggagatatatgatataagcttttcttagcagtcccacccttcctctctcgagagagctccattccaatcaaagctgtaaacacacttcagaagatggagatcactaacgttaccgagtatgatgcaatcgcaaaggcgaagttgcctaagatggtatatgactactatgcatctggtgcagaagatcaatggactcttcaagagaacagaaacgcttttgcaagaatcctcttccggcctcggattttgattgatgtgaacaaaattgatatggcgactaccgtcttggggttcaagatctcgatgccgatcatggttgctcctactgcctttcaaaagatggctcaccctgatggggaatatgctacggctagagctgcgtctgctgctggaaccatcatgacactatcttcatgggctacttcaagtgttgaagaagttgcttccacagggccaggaatccgattcttccagctctatgtatacaagaacaggaaggtggttgagcagctcgtgagaagagccgagaaagctgggttcaaagccattgctctcactgtagacaccccaaggctaggtcgcagagagtctgatatcaagaacagattcactttgcctccaaacctgacattgaagaactttgaaggtcttgaccttggaaagatggacgaggccaatgactctggcttggcttcgtatgttgctggtcaaattgaccgtaccttgagctggaaggatatccagtggctccaaacaatcaccaacatgccaattcttgtcaagggtgttcttacaggagaggatgcaaggatagcgattcaagctggagcagcagggatcattgtgtcaaatcatggagctcgccagcttgattatgtcccagcaacaatctcagcccttgaagaggttgtcaaagcaacacaaggacgagttcctgtcttcttggatggtggtgttcgacgtggcactgatgtcttcaaggcacttgcacttggagcctctggaatatttattggaagaccagtggtttttgcactagctgctgaaggagaagccggagtcaaaaaggtgcttcaaatgttgcgtgatgagttcgagctaaccatggcactaagtgggtgccggtcactcagtgaaatcacccgtaaccacattgtcacggaatgggacactccacgccatttgcccaggttatagagaagaaaaaaaaaacagagaacagaaacaacacggcaccaaaacgtattcatattctgattgatcactttgcttctactctgctatatttatatctcgaaaaacttgtttctccctatatcggatcacaaaaacgtgcgtagagattctctgtaatgctatttggctacattttacctttccgtttattcttattgcttgtacaatagatgttgattcctacaataccaatgaatactaaaatctgttcccggg

SEQ ID NO: 895 - protein, 367 aa, Arabidopsis thaliana
  peptide (1)..(367): Ceres Seq. ID no. 13487892
  misc_feature (13)..(356): Pfam Name: Pfam Description:  FMN-dependent dehydrogenase
  misc_feature (1)..(367): NCBI GI NO: 15229497 NR Description: glycolate oxidase [Arabidopsis thaliana]
  misc_feature (1)..(367): NCBI GI NO: 15231850 NR Description: glycolate oxidase -related [Arabidopsis thaliana]
  misc_feature (1)..(367): NCBI GI NO: 16226772 NR Description: AT3g14420/MOA2_2 [Arabidopsis thaliana]
  misc_feature (1)..(367): NCBI GI NO: 7431428 NR Description: (S)-2-hydroxy-acid oxidase (EC 1
  misc_feature (1)..(367): NCBI GI NO: 1773330 NR Description: glycolate oxidase [Mesembryanthemum crystallinum]
  misc_feature (1)..(367): NCBI GI NO: 27549566 NR Description: glycolate oxidase [Zantedeschia aethiopica]
  misc_feature (1)..(366): NCBI GI NO: 228403 NR Description: glycolate oxidase
  misc_feature (1)..(367): NCBI GI NO: 121530 NR Description:
  misc_feature (1)..(367): NCBI GI NO: 999542 NR Description: Chain A, Glycolate Oxidase (E
  misc_feature (1)..(359): NCBI GI NO: 2554675 NR Description: Three-Dimensional Structure Of Glycolate Oxidase With BoundActive-Site Inhibitors
MEITNVTEYDAIAKAKLPKMVYDYYASGAEDQWTLQENRNAFARILFRPRILIDVNKIDMATTVLGFKISMPIMVAPTAFQKMAHPDGEYATARAASAAGTIMTLSSWATSSVEEVASTGPGIRFFQLYVYKNRKVVEQLVRRAEKAGFKAIALTVDTPRLGRRESDIKNRFTLPPNLTLKNFEGLDLGKMDEANDSGLASYVAGQIDRTLSWKDIQWLQTITNMPILVKGVLTGEDARIAIQAGAAGIIVSNHGARQLDYVPATISALEEVVKATQGRVPVFLDGGVRRGTDVFKALALGASGIFIGRPVVFALAAEGEAGVKKVLQMLRDEFELTMALSGCRSLSEITRNHIVTEWDTPRHLPRL

SEQ ID NO: 896 - protein, 348 aa, Arabidopsis thaliana
  peptide (1)..(348): Ceres Seq. ID no. 13487893
  misc_feature (1)..(337): Pfam Name: Pfam Description:  FMN-dependent dehydrogenase
  misc_feature (1)..(348): NCBI GI NO: 15229497 NR Description: glycolate oxidase [Arabidopsis thaliana]
  misc_feature (1)..(348): NCBI GI NO: 15231850 NR Description: glycolate oxidase -related [Arabidopsis thaliana]
  misc_feature (1)..(348): NCBI GI NO: 16226772 NR Description: AT3g14420/MOA2_2 [Arabidopsis thaliana]
  misc_feature (1)..(348): NCBI GI NO: 7431428 NR Description: (S)-2-hydroxy-acid oxidase (EC 1
  misc_feature (1)..(348): NCBI GI NO: 1773330 NR Description: glycolate oxidase [Mesembryanthemum crystallinum]
  misc_feature (1)..(348): NCBI GI NO: 27549566 NR Description: glycolate oxidase [Zantedeschia aethiopica]
  misc_feature (1)..(347): NCBI GI NO: 228403 NR Description: glycolate oxidase
  misc_feature (1)..(348): NCBI GI NO: 121530 NR Description:
  misc_feature (1)..(348): NCBI GI NO: 999542 NR Description: Chain A, Glycolate Oxidase (E
  misc_feature (1)..(340): NCBI GI NO: 2554675 NR Description: Three-Dimensional Structure Of Glycolate Oxidase With BoundActive-Site Inhibitors
MVYDYYASGAEDQWTLQENRNAFARILFRPRILIDVNKIDMATTVLGFKISMPIMVAPTAFQKMAHPDGEYATARAASAAGTIMTLSSWATSSVEEVASTGPGIRFFQLYVYKNRKVVEQLVRRAEKAGFKAIALTVDTPRLGRRESDIKNRFTLPPNLTLKNFEGLDLGKMDEANDSGLASYVAGQIDRTLSWKDIQWLQTITNMPILVKGVLTGEDARIAIQAGAAGIIVSNHGARQLDYVPATISALEEVVKATQGRVPVFLDGGVRRGTDVFKALALGASGIFIGRPVVFALAAEGEAGVKKVLQMLRDEFELTMALSGCRSLSEITRNHIVTEWDTPRHLPRL

SEQ ID NO: 897 - protein, 308 aa, Arabidopsis thaliana
  peptide (1)..(308): Ceres Seq. ID no. 13487894
  misc_feature (1)..(297): Pfam Name: Pfam Description:  FMN-dependent dehydrogenase
  misc_feature (1)..(308): NCBI GI NO: 15229497 NR Description: glycolate oxidase [Arabidopsis thaliana]
  misc_feature (1)..(308): NCBI GI NO: 15231850 NR Description: glycolate oxidase -related [Arabidopsis thaliana]
  misc_feature (1)..(308): NCBI GI NO: 16226772 NR Description: AT3g14420/MOA2_2 [Arabidopsis thaliana]
  misc_feature (1)..(308): NCBI GI NO: 7431428 NR Description: (S)-2-hydroxy-acid oxidase (EC 1
  misc_feature (1)..(308): NCBI GI NO: 1773330 NR Description: glycolate oxidase [Mesembryanthemum crystallinum]
  misc_feature (1)..(308): NCBI GI NO: 27549566 NR Description: glycolate oxidase [Zantedeschia aethiopica]
  misc_feature (1)..(307): NCBI GI NO: 228403 NR Description: glycolate oxidase
  misc_feature (1)..(308): NCBI GI NO: 121530 NR Description:
  misc_feature (1)..(308): NCBI GI NO: 999542 NR Description: Chain A, Glycolate Oxidase (E
  misc_feature (1)..(300): NCBI GI NO: 2554675 NR Description: Three-Dimensional Structure Of Glycolate Oxidase With BoundActive-Site Inhibitors
MATTVLGFKISMPIMVAPTAFQKMAHPDGEYATARAASAAGTIMTLSSWATSSVEEVASTGPGIRFFQLYVYKNRKVVEQLVRRAEKAGFKAIALTVDTPRLGRRESDIKNRFTLPPNLTLKNFEGLDLGKMDEANDSGLASYVAGQIDRTLSWKDIQWLQTITNMPILVKGVLTGEDARIAIQAGAAGIIVSNHGARQLDYVPATISALEEVVKATQGRVPVFLDGGVRRGTDVFKALALGASGIFIGRPVVFALAAEGEAGVKKVLQMLRDEFELTMALSGCRSLSEITRNHIVTEWDTPRHLPRL

SEQ ID NO: 898 - DNA, 749 bp, Arabidopsis thaliana
  misc_feature (1)..(749): Ceres Seq. ID no. 12337355
atcgtcatcgtgaaatgtgcagctccggaaataaataatcactaaaataaccagatccgatctactgccccggtttctcgccggagtctccatcctgtaaccggcgatcctctttctgctcagttatggaagacgtgaaagggaaggagattattgatgatgctcctattgacagcaaggtttcagatgaaatggagagtgaggaaaatgcgatcaagaaaaagtatggaggattgttgcctaagaagattcctttgatatctaaggaccatgaacgtgcgttttttgattctgctgattgggctttaggcaagcaaaaaggacagaagccgaaaggacctttggaagctctccgcccaaaactgcagccaaccccgcaacagcaaccaagagcaagacgaatggcttattcttcaggcgaaactgaagactctgagactgataacaacgaagctccggatgaccaagcctgcgcatcagctgtcgatagtaccaatttaaaggacgatggaggcgcaaaagacaacatcaaatcatgaacaacatatagatatctcttgaggagcgcaaacaaacaacatcacaagtcaatttacagaagaataagcgaccaggtttgctttgcaacggttgtaatatcaagtctcttaccttatcatacttgggactgcaaatctgtatcacttacaaacctcgtggcttgaaacgtctattggacgattgcaaattatttgctttaatgatccatc

SEQ ID NO: 899 - protein, 137 aa, Arabidopsis thaliana
  peptide (1)..(137): Ceres Seq. ID no. 12337356
  misc_feature (1)..(137): NCBI GI NO: 18409295 NR Description: expressed protein; protein id: At1g69510
  misc_feature (1)..(104): NCBI GI NO: 34902768 NR Description: unnamed protein product
  misc_feature (30)..(127): NCBI GI NO: 4164473 NR Description: negatively light-regulated protein
  misc_feature (1)..(99): NCBI GI NO: 18424791 NR Description: expressed protein; protein id: At5g64130
  misc_feature (35)..(109): NCBI GI NO: 100535 NR Description: hypothetical protein - swollen duckweed (fragment)
  misc_feature (35)..(102): NCBI GI NO: 100536 NR Description: hypothetical protein - swollen duckweed (fragment)
  misc_feature (38)..(99): NCBI GI NO: 10176961 NR Description: gene_id:MHJ24.11~unknown protein
  misc_feature (16)..(105): NCBI GI NO: 18414599 NR Description: Expressed protein; protein id: At4g16146
  misc_feature (16)..(105): NCBI GI NO: 21592601 NR Description: unknown [Arabidopsis thaliana]
  misc_feature (16)..(105): NCBI GI NO: 26453128 NR Description: unknown protein [Arabidopsis thaliana]
MEDVKGKEIIDDAPIDSKVSDEMESEENAIKKKYGGLLPKKIPLISKDHERAFFDSADWALGKQKGQKPKGPLEALRPKLQPTPQQQPRARRMAYSSGETEDSETDNNEAPDDQACASAVDSTNLKDDGGAKDNIKS

SEQ ID NO: 900 - protein, 115 aa, Arabidopsis thaliana
  peptide (1)..(115): Ceres Seq. ID no. 12337357
  misc_feature (1)..(115): NCBI GI NO: 18409295 NR Description: expressed protein; protein id: At1g69510
  misc_feature (1)..(82): NCBI GI NO: 34902768 NR Description: unnamed protein product
  misc_feature (8)..(105): NCBI GI NO: 4164473 NR Description: negatively light-regulated protein
  misc_feature (1)..(77): NCBI GI NO: 18424791 NR Description: expressed protein; protein id: At5g64130
  misc_feature (13)..(87): NCBI GI NO: 100535 NR Description: hypothetical protein - swollen duckweed (fragment)
  misc_feature (13)..(80): NCBI GI NO: 100536 NR Description: hypothetical protein - swollen duckweed (fragment)
  misc_feature (16)..(77): NCBI GI NO: 10176961 NR Description: gene_id:MHJ24.11~unknown protein
  misc_feature (1)..(83): NCBI GI NO: 18414599 NR Description: Expressed protein; protein id: At4g16146
  misc_feature (1)..(83): NCBI GI NO: 21592601 NR Description: unknown [Arabidopsis thaliana]
  misc_feature (1)..(83): NCBI GI NO: 26453128 NR Description: unknown protein [Arabidopsis thaliana]
MESEENAIKKKYGGLLPKKIPLISKDHERAFFDSADWALGKQKGQKPKGPLEALRPKLQPTPQQQPRARRMAYSSGETEDSETDNNEAPDDQACASAVDSTNLKDDGGAKDNIKS

SEQ ID NO: 901 - DNA, 1303 bp, Arabidopsis thaliana
  misc_feature (1)..(1303): Ceres Seq. ID no. 12379218
attctcagctttgccgttttcatcgattaaagagagagaggcttcgttcgccgtccgtcgtagaaatggggttcaagaggaagaaagatgatggtgatggtgaggaaatggaatctgatgttcgtggaaagtctactttcagtgggggtgagaagaggaatgtgatacttccttcgatgattaagaacaaagataagagatcaaaagtgtatgcgaagcagaagcatgagaagaaattggagaagcagaagaagattagagctcgtgatgctgctgagaaacgagctttagagcttggagaagagcctccacaaaagatgattccgaagacgattgagaatacaagagaatctgatgaaactgtttgcagacctgacgatgaagaattgtttgcggatattgatgctgatgagtttaatccagttctgagacgtgagattgcacctaaggtcttgctcacaacatgtcgtttcaattccactagaggacctgctttaatatctgagttgctttcggtgataccaaactctcattatcaaaagagaggaacctatgatttgaagaagattgtagaatacgcaacgaagaaagattttacatctcttattgttgttcatacaaatcgtagagaacctgatgcgcttcttatcatcggtttgccaaatggtcctactgctcatttcaaattgtcaaatcttgttctaaggaaggatattaagaatcacggaaatcctacaagccatcaaccagaactggttttgaataactttacaacgcgtttagggaatcgtgttgggagattttttcaatcactcttccctccggatcctaatttccgtggtaggagagttgtaacattccacaaccagcgtgactttatatttttcagacatcaccgttacatatttgagacaaaggaaagcaagagtgataaaggaaaagaagagacaataaaacctcgtcttcaggaatgcggtcctcgattcacgcttaagctagttactctacagcatggaacttttgacaccaaaggtggagaatttgaatgggttcataagcctgaaatggacacgagcaggagaaggttcttcttataaattctgctgtcttccgagtttcaccaagttttgtgtttattttgcattttcgaattttccctacctccgtccaaaattgtatgtctttaaaacttctcatttcttttttcaatatagccatgagccatcgaaacaatcgtaagagtacttgtttcaacaatataggccctcgttttttactaagctatatatagttggttaaactc

SEQ ID NO: 902 - protein, 364 aa, Arabidopsis thaliana
  peptide (1)..(364): Ceres Seq. ID no. 12379219
  misc_feature (22)..(364): NCBI GI NO: 18411672 NR Description: expressed protein; protein id: At4g01560
  misc_feature (26)..(364): NCBI GI NO: 7485389 NR Description: hypothetical protein F11O4
  misc_feature (22)..(211): NCBI GI NO: 7485389 NR Description: hypothetical protein F11O4
  misc_feature (25)..(364): NCBI GI NO: 27371215 NR Description: Similar to RNA processing factor 1
  misc_feature (58)..(364): NCBI GI NO: 33440502 NR Description: Unknown (protein for IMAGE:5694049) [Mus musculus]
  misc_feature (58)..(364): NCBI GI NO: 13376605 NR Description: RNA processing factor 1 [Homo sapiens]
  misc_feature (58)..(364): NCBI GI NO: 17225079 NR Description: RNA processing factor 1 [Homo sapiens]
  misc_feature (100)..(364): NCBI GI NO: 11360239 NR Description: hypothetical protein DKFZp761G0415
  misc_feature (50)..(364): NCBI GI NO: 17534031 NR Description: IMP4 family (45.2 kD) [Caenorhabditis elegans]
  misc_feature (50)..(364): NCBI GI NO: 39597550 NR Description: Hypothetical protein CBG03232
SQLCRFHRLKRERLRSPSVVEMGFKRKKDDGDGEEMESDVRGKSTFSGGEKRNVILPSMIKNKDKRSKVYAKQKHEKKLEKQKKIRARDAAEKRALELGEEPPQKMIPKTIENTRESDETVCRPDDEELFADIDADEFNPVLRREIAPKVLLTTCRFNSTRGPALISELLSVIPNSHYQKRGTYDLKKIVEYATKKDFTSLIVVHTNRREPDALLIIGLPNGPTAHFKLSNLVLRKDIKNHGNPTSHQPELVLNNFTTRLGNRVGRFFQSLFPPDPNFRGRRVVTFHNQRDFIFFRHHRYIFETKESKSDKGKEETIKPRLQECGPRFTLKLVTLQHGTFDTKGGEFEWVHKPEMDTSRRRFFL

SEQ ID NO: 903 - protein, 343 aa, Arabidopsis thaliana
  peptide (1)..(343): Ceres Seq. ID no. 12379220
  misc_feature (1)..(343): NCBI GI NO: 18411672 NR Description: expressed protein; protein id: At4g01560
  misc_feature (5)..(343): NCBI GI NO: 7485389 NR Description: hypothetical protein F11O4
  misc_feature (1)..(190): NCBI GI NO: 7485389 NR Description: hypothetical protein F11O4
  misc_feature (4)..(343): NCBI GI NO: 27371215 NR Description: Similar to RNA processing factor 1
  misc_feature (37)..(343): NCBI GI NO: 33440502 NR Description: Unknown (protein for IMAGE:5694049) [Mus musculus]
  misc_feature (37)..(343): NCBI GI NO: 13376605 NR Description: RNA processing factor 1 [Homo sapiens]
  misc_feature (37)..(343): NCBI GI NO: 17225079 NR Description: RNA processing factor 1 [Homo sapiens]
  misc_feature (79)..(343): NCBI GI NO: 11360239 NR Description: hypothetical protein DKFZp761G0415
  misc_feature (29)..(343): NCBI GI NO: 17534031 NR Description: IMP4 family (45.2 kD) [Caenorhabditis elegans]
  misc_feature (29)..(343): NCBI GI NO: 39597550 NR Description: Hypothetical protein CBG03232
MGFKRKKDDGDGEEMESDVRGKSTFSGGEKRNVILPSMIKNKDKRSKVYAKQKHEKKLEKQKKIRARDAAEKRALELGEEPPQKMIPKTIENTRESDETVCRPDDEELFADIDADEFNPVLRREIAPKVLLTTCRFNSTRGPALISELLSVIPNSHYQKRGTYDLKKIVEYATKKDFTSLIVVHTNRREPDALLIIGLPNGPTAHFKLSNLVLRKDIKNHGNPTSHQPELVLNNFTTRLGNRVGRFFQSLFPPDPNFRGRRVVTFHNQRDFIFFRHHRYIFETKESKSDKGKEETIKPRLQECGPRFTLKLVTLQHGTFDTKGGEFEWVHKPEMDTSRRRFFL

SEQ ID NO: 904 - protein, 329 aa, Arabidopsis thaliana
  peptide (1)..(329): Ceres Seq. ID no. 12379221
  misc_feature (1)..(329): NCBI GI NO: 18411672 NR Description: expressed protein; protein id: At4g01560
  misc_feature (1)..(329): NCBI GI NO: 7485389 NR Description: hypothetical protein F11O4
  misc_feature (1)..(176): NCBI GI NO: 7485389 NR Description: hypothetical protein F11O4
  misc_feature (1)..(329): NCBI GI NO: 27371215 NR Description: Similar to RNA processing factor 1
  misc_feature (23)..(329): NCBI GI NO: 33440502 NR Description: Unknown (protein for IMAGE:5694049) [Mus musculus]
  misc_feature (23)..(329): NCBI GI NO: 13376605 NR Description: RNA processing factor 1 [Homo sapiens]
  misc_feature (23)..(329): NCBI GI NO: 17225079 NR Description: RNA processing factor 1 [Homo sapiens]
  misc_feature (65)..(329): NCBI GI NO: 11360239 NR Description: hypothetical protein DKFZp761G0415
  misc_feature (15)..(329): NCBI GI NO: 17534031 NR Description: IMP4 family (45.2 kD) [Caenorhabditis elegans]
  misc_feature (15)..(329): NCBI GI NO: 39597550 NR Description: Hypothetical protein CBG03232
MESDVRGKSTFSGGEKRNVILPSMIKNKDKRSKVYAKQKHEKKLEKQKKIRARDAAEKRALELGEEPPQKMIPKTIENTRESDETVCRPDDEELFADIDADEFNPVLRREIAPKVLLTTCRFNSTRGPALISELLSVIPNSHYQKRGTYDLKKIVEYATKKDFTSLIVVHTNRREPDALLIIGLPNGPTAHFKLSNLVLRKDIKNHGNPTSHQPELVLNNFTTRLGNRVGRFFQSLFPPDPNFRGRRVVTFHNQRDFIFFRHHRYIFETKESKSDKGKEETIKPRLQECGPRFTLKLVTLQHGTFDTKGGEFEWVHKPEMDTSRRRFFL

SEQ ID NO: 905 - DNA, 1362 bp, Arabidopsis thaliana
  misc_feature (1)..(1362): Ceres Seq. ID no. 12334496
aatttcattcgttctttatcaacaacactctctctcttctctatcaacactttctttcatctctcgccggaaaaacccataaccacaacaatggccaccgaaacccaaatccgaatcggagtaatgggttgcgccgatatcgctcgaaaagtctctcgagcaatccacctcgctcccaacgccacaatctccggcgtagcaagccggtctttagaaaaagccaaagcctttgccaccgccaataactacccagaatcaaccaaaatccacggctcttacgaatctcttctcgaagatccagagatcgatgcgctctatgttcctctccccactagtctccacgttgagtgggctattaaagcagctgagaaagggaaacatatccttttggagaagcctgttgctatgaacgtaactgagtttgataagattgttgatgcttgtgaagctaatggtgttcagattatggatggtactatgtgggttcataatcctagaactgctttgcttaaagagtttctttctgattctgaacgttttggtcagcttaaaactgtacagagttgtttctcatttgctggagatgaagattttcttaaaaacgatatccgtgtgaaacctggtcttgacgggcttggtgcgctaggagatgcggggtggtacgcgatcagagcaactcttttagctaataactttgagcttccgaaaactgtgactgctttccccggtgctgtgttgaatgaagcaggattgatactttcctgtggagcatctttgagttgggaagatggacgaactgcaactatatattgttcattcttggctaacttaacaatggagataactgccattggaacgaaaggcacactccgtgtacacgacttcattatcccgtataaggagactgaggcgtcgtttaccacgagcactaaagcttggttcaatgaccttgtgactgcgtgggttagtcccccgagtgagcatacggttaagacagagcttccacaagaggcatgtatggtgagagagtttgctcgattggttggagaaatcaagaacaatggtgcaaagcctgatgggtactggcctagtattagccgaaagacgcagctagtggttgatgctgttaaagagtctgttgataaaaactatcaacagattagtctctctggtcgttgaaggaaaggactcagactataaatgttgtcgtgtgttctctcctctctcgctctctatgttcaaacttcgatcaaccgtttaagtgtttgttaccacttaccaatatgttctgtcttctgctgtgtccgcctgtatgtatgttaattgttttagactccaattactagccttcaattactaagc

SEQ ID NO: 906 - protein, 392 aa, Arabidopsis thaliana
  peptide (1)..(392): Ceres Seq. ID no. 12334497
  misc_feature (37)..(159): Pfam Name: Pfam Description:  Oxidoreductase family
  misc_feature (31)..(392): NCBI GI NO: 15233990 NR Description: AX110P -like protein; protein id: At4g09670
  misc_feature (55)..(392): NCBI GI NO: 21954073 NR Description: putative AX110P protein [Arabidopsis thaliana]
  misc_feature (31)..(392): NCBI GI NO: 18399170 NR Description: expressed protein; protein id: At1g34200
  misc_feature (31)..(392): NCBI GI NO: 25518452 NR Description: hypothetical protein F23M19.12
  misc_feature (37)..(380): NCBI GI NO: 7488933 NR Description: protein AX110P - carrot
  misc_feature (22)..(345): NCBI GI NO: 37534168 NR Description: putative oxidoreductase
  misc_feature (33)..(389): NCBI GI NO: 15218937 NR Description: oxidoreductase, putative; protein id: At1g66130.1
  misc_feature (21)..(376): NCBI GI NO: 17549134 NR Description: CONSERVED HYPOTHETICAL PROTEIN
  misc_feature (37)..(299): NCBI GI NO: 15616405 NR Description: oxidoreductase [Bacillus halodurans]
  misc_feature (38)..(379): NCBI GI NO: 5852136 NR Description: putative oxidoreductase [Leishmania major]
NFIRSLSTTLSLFSINTFFHLSPEKPITTTMATETQIRIGVMGCADIARKVSRAIHLAPNATISGVASRSLEKAKAFATANNYPESTKIHGSYESLLEDPEIDALYVPLPTSLHVEWAIKAAEKGKHILLEKPVAMNVTEFDKIVDACEANGVQIMDGTMWVHNPRTALLKEFLSDSERFGQLKTVQSCFSFAGDEDFLKNDIRVKPGLDGLGALGDAGWYAIRATLLANNFELPKTVTAFPGAVLNEAGLILSCGASLSWEDGRTATIYCSFLANLTMEITAIGTKGTLRVHDFIIPYKETEASFTTSTKAWFNDLVTAWVSPPSEHTVKTELPQEACMVREFARLVGEIKNNGAKPDGYWPSISRKTQLVVDAVKESVDKNYQQISLSGR

SEQ ID NO: 907 - protein, 362 aa, Arabidopsis thaliana
  peptide (1)..(362): Ceres Seq. ID no. 12334498
  misc_feature (7)..(129): Pfam Name: Pfam Description:  Oxidoreductase family
  misc_feature (1)..(362): NCBI GI NO: 15233990 NR Description: AX110P -like protein; protein id: At4g09670
  misc_feature (25)..(362): NCBI GI NO: 21954073 NR Description: putative AX110P protein [Arabidopsis thaliana]
  misc_feature (1)..(362): NCBI GI NO: 18399170 NR Description: expressed protein; protein id: At1g34200
  misc_feature (1)..(362): NCBI GI NO: 25518452 NR Description: hypothetical protein F23M19.12
  misc_feature (7)..(350): NCBI GI NO: 7488933 NR Description: protein AX110P - carrot
  misc_feature (1)..(315): NCBI GI NO: 37534168 NR Description: putative oxidoreductase
  misc_feature (3)..(359): NCBI GI NO: 15218937 NR Description: oxidoreductase, putative; protein id: At1g66130.1
  misc_feature (1)..(346): NCBI GI NO: 17549134 NR Description: CONSERVED HYPOTHETICAL PROTEIN
  misc_feature (7)..(269): NCBI GI NO: 15616405 NR Description: oxidoreductase [Bacillus halodurans]
  misc_feature (8)..(349): NCBI GI NO: 5852136 NR Description: putative oxidoreductase [Leishmania major]
MATETQIRIGVMGCADIARKVSRAIHLAPNATISGVASRSLEKAKAFATANNYPESTKIHGSYESLLEDPEIDALYVPLPTSLHVEWAIKAAEKGKHILLEKPVAMNVTEFDKIVDACEANGVQIMDGTMWVHNPRTALLKEFLSDSERFGQLKTVQSCFSFAGDEDFLKNDIRVKPGLDGLGALGDAGWYAIRATLLANNFELPKTVTAFPGAVLNEAGLILSCGASLSWEDGRTATIYCSFLANLTMEITAIGTKGTLRVHDFIIPYKETEASFTTSTKAWFNDLVTAWVSPPSEHTVKTELPQEACMVREFARLVGEIKNNGAKPDGYWPSISRKTQLVVDAVKESVDKNYQQISLSGR

SEQ ID NO: 908 - protein, 351 aa, Arabidopsis thaliana
  peptide (1)..(351): Ceres Seq. ID no. 12334499
  misc_feature (1)..(118): Pfam Name: Pfam Description:  Oxidoreductase family
  misc_feature (1)..(351): NCBI GI NO: 15233990 NR Description: AX110P -like protein; protein id: At4g09670
  misc_feature (14)..(351): NCBI GI NO: 21954073 NR Description: putative AX110P protein [Arabidopsis thaliana]
  misc_feature (1)..(351): NCBI GI NO: 18399170 NR Description: expressed protein; protein id: At1g34200
  misc_feature (1)..(351): NCBI GI NO: 25518452 NR Description: hypothetical protein F23M19.12
  misc_feature (1)..(339): NCBI GI NO: 7488933 NR Description: protein AX110P - carrot
  misc_feature (1)..(304): NCBI GI NO: 37534168 NR Description: putative oxidoreductase
  misc_feature (1)..(348): NCBI GI NO: 15218937 NR Description: oxidoreductase, putative; protein id: At1g66130.1
  misc_feature (1)..(335): NCBI GI NO: 17549134 NR Description: CONSERVED HYPOTHETICAL PROTEIN
  misc_feature (1)..(258): NCBI GI NO: 15616405 NR Description: oxidoreductase [Bacillus halodurans]
  misc_feature (1)..(338): NCBI GI NO: 5852136 NR Description: putative oxidoreductase [Leishmania major]
MGCADIARKVSRAIHLAPNATISGVASRSLEKAKAFATANNYPESTKIHGSYESLLEDPEIDALYVPLPTSLHVEWAIKAAEKGKHILLEKPVAMNVTEFDKIVDACEANGVQIMDGTMWVHNPRTALLKEFLSDSERFGQLKTVQSCFSFAGDEDFLKNDIRVKPGLDGLGALGDAGWYAIRATLLANNFELPKTVTAFPGAVLNEAGLILSCGASLSWEDGRTATIYCSFLANLTMEITAIGTKGTLRVHDFIIPYKETEASFTTSTKAWFNDLVTAWVSPPSEHTVKTELPQEACMVREFARLVGEIKNNGAKPDGYWPSISRKTQLVVDAVKESVDKNYQQISLSGR

SEQ ID NO: 909 - DNA, 1486 bp, Arabidopsis thaliana
  misc_feature (1)..(1486): Ceres Seq. ID no. 12335066
atatagggttacatcttccttagcttgaatacaaaagaaaagctcaagtttgtttctcgtttctatggatattcttcttccttatgctagcctctctggtcttcttcttcttcgttcgtttcagcgaatcacatttgatctatgacacatctatacaaggaattagctttcatcatcaagtctctctctctcgaaaactctcctttggtttcgtttgatctgagaaaagaagaaattcaaatattgataactgtggatgggtgcaccaaagcagaagtggacaccggaagaagaagcagctcttaaagctggagttcttaagcatgggactgggaagtggcgtaccatactctcggatactgagtttagtttaatccttaagtctcgctctaatgttgatcttaaggacaaatggagaaatataagcgtgacagctttatggggttcaaggaagaaggctaaacttgcgcttaagaggactccaccaggtactaaacaggatgataacaacacagctcttaccattgtggctttgactaatgatgatgaacgtgcaaaaccaacttcccccggaggttctggtggtggatcaccacgcacttgtgcttctaagagatcaattacaagtttggataagatcatctttgaggcaattaccaacttgagggaactacgcggttctgacagaacatcaatctttctgtatatagaggagaatttcaagactccaccgaatatgaaaaggcatgtcgcagtacgattaaagcatttatcatcgaatggaacattagttaagataaagcacaagtacaggttttcttctaattttattcccgcaggtgcaagacagaaggctcctcaactctttctggaaggaaacaacaagaaagacccaacaaaacccgaggagaacggtgccaacagtctcactaaattccgagtagacggtgaattatatatgataaaaggcatgacagctcaagaagctgcagaggctgcagcaagagcagttgcagaggcagaatttgctatcacagaggctgaacaagcagcaaaagaggcagaaagagcagaagcagaagctgaagctgctcagatatttgcaaaggcagccatgaaagctttgaagttcaggatccgtaatcatccttggtgaaacagaaagaaatagccatcatggggaagttctgtaacaaagcaagccataaaatatatatacttagtgggtttactggtttcttaagagtgccgatcttgaatcaggcgatatctcatcacctgcagagttttttaagtttccaaacctatctgctctctttttttggttagtaacagtgtaaatccgcagtttgatcatatgtatgttctttctccgaatctgagattctgtataactgatcttttattgtatgtggatgatctgtttagtaaccttgaaactattttgaagtgagatgagtaagcaaaaaaattgagattttgttct

SEQ ID NO: 910 - protein, 299 aa, Arabidopsis thaliana
  peptide (1)..(299): Ceres Seq. ID no. 12335067
  misc_feature (121)..(189): Pfam Name: Pfam Description:  linker histone H1 and H5 family
  misc_feature (1)..(299): NCBI GI NO: 15240783 NR Description: putative protein; protein id: At5g67580
  misc_feature (1)..(299): NCBI GI NO: 18481426 NR Description: telomere repeat binding factor 2
  misc_feature (1)..(296): NCBI GI NO: 15229625 NR Description: MYB -like protein; protein id: At3g49850
  misc_feature (1)..(293): NCBI GI NO: 18402853 NR Description: DNA-binding protein PcMYB1, putative
  misc_feature (1)..(293): NCBI GI NO: 25405344 NR Description: hypothetical protein F2J10.16
  misc_feature (1)..(293): NCBI GI NO: 21593573 NR Description: DNA-binding protein PcMYB1, putative
  misc_feature (1)..(293): NCBI GI NO: 18481420 NR Description: telomere repeat binding factor 1
  misc_feature (1)..(293): NCBI GI NO: 34105723 NR Description: Single myb histone 6 [Zea mays subsp. mays]
  misc_feature (1)..(297): NCBI GI NO: 34912214 NR Description: putative telomere repeat binding factor
  misc_feature (1)..(296): NCBI GI NO: 33286863 NR Description: Single myb histone 1 [Zea mays subsp. mays]
MGAPKQKWTPEEEAALKAGVLKHGTGKWRTILSDTEFSLILKSRSNVDLKDKWRNISVTALWGSRKKAKLALKRTPPGTKQDDNNTALTIVALTNDDERAKPTSPGGSGGGSPRTCASKRSITSLDKIIFEAITNLRELRGSDRTSIFLYIEENFKTPPNMKRHVAVRLKHLSSNGTLVKIKHKYRFSSNFIPAGARQKAPQLFLEGNNKKDPTKPEENGANSLTKFRVDGELYMIKGMTAQEAAEAAARAVAEAEFAITEAEQAAKEAERAEAEAEAAQIFAKAAMKALKFRIRNHPW

SEQ ID NO: 911 - DNA, 1146 bp, Arabidopsis thaliana
  misc_feature (1)..(1146): Ceres Seq. ID no. 13499978
ggggaagaagaaaactctccttctttttgtaacttttgcttcacctctctcttcttctcttgttctattttttttcccgattcaagcaaaattcatcaagacttgtcaatttgaaaaaatgtcgcaatcaaccgtagatgttccgccaaagggtgggtttagcttcgatctgtgtaagagaaatgatatgcttacacaaaagggtcttaaagctccgtcttttttgaagactggaacaaccattgttggtttgattttcaaggatggtgtgatactaggggcagatacccgagcaactgaggggccaattgttgctgataagaactgtgagaagattcactatatggcaccaaacatatattgctgtggtgcaggaactgcggctgatactgaagcagtcactgatatggtcagctcacagctgcgattgcatcgttaccagactggtcgagactctcgggtcattactgctttgacccttctcaaaaaacatcttttcagctaccaaggtcatgtctctgctgctcttgtactcggtggagttgatatcactggtccacatctgcatactatatacccacacggttcaactgacactcttccattcgccacaatgggttcgggttctcttgctgctatgtctgtgtttgaggcaaagtataaagaaggcctaactagggatgaaggaattaagctggtcgctgaatccatatgctcgggtatattcaatgacctgggtagtggtagcaacgtggacatctgcgtgatcacaaaggggaacaaggaatatctcaggaactacatggaaccaaacccaagaacctatgtcagcagcaaaggctattccttcaccaagaaaactgaggttcttctcaccaaaatcaccccattgctggagcgagtcgaaatcacagaagttggtgaagctatggaggaataattcaatcaatctcatatatcttcttttgcattgatctacatcaaggctctgtgtactctcatgatctcatcttcccagtcttgtcttcttcccatgtttaaggatcattcaaatcttgttactcctctctctccatcttagatttcaatagagagggtaagactcgagagacttcgtcctttcgaaataaaaaaacaactttccct

SEQ ID NO: 912 - protein, 312 aa, Arabidopsis thaliana
  peptide (1)..(312): Ceres Seq. ID no. 13499979
  misc_feature (75)..(256): Pfam Name: Pfam Description:  Proteasome A-type and B-type
  misc_feature (40)..(312): NCBI GI NO: 18405364 NR Description: 20S proteasome beta subunit B (PBB1)
  misc_feature (40)..(312): NCBI GI NO: 2511578 NR Description: multicatalytic endopeptidase
  misc_feature (40)..(312): NCBI GI NO: 15237451 NR Description: 20S proteasome beta subunit B (PBB2)
  misc_feature (40)..(287): NCBI GI NO: 30688785 NR Description: 20S proteasome beta subunit B (PBB1)
  misc_feature (40)..(312): NCBI GI NO: 20260224 NR Description: 20S proteasome beta subunit PBB2
  misc_feature (40)..(312): NCBI GI NO: 21593337 NR Description: 20S proteasome beta subunit PBB2
  misc_feature (40)..(312): NCBI GI NO: 8671504 NR Description: beta 2 subunit of 20S proteasome
  misc_feature (96)..(312): NCBI GI NO: 2511576 NR Description: multicatalytic endopeptidase
  misc_feature (49)..(302): NCBI GI NO: 24664391 NR Description: Proteasome beta2 subunit CG3329-PA
  misc_feature (41)..(224): NCBI GI NO: 14594921 NR Description: putative beta proteasome subunit
GKKKTLLLFVTFASPLSSSLVLFFFPIQAKFIKTCQFEKMSQSTVDVPPKGGFSFDLCKRNDMLTQKGLKAPSFLKTGTTIVGLIFKDGVILGADTRATEGPIVADKNCEKIHYMAPNIYCCGAGTAADTEAVTDMVSSQLRLHRYQTGRDSRVITALTLLKKHLFSYQGHVSAALVLGGVDITGPHLHTIYPHGSTDTLPFATMGSGSLAAMSVFEAKYKEGLTRDEGIKLVAESICSGIFNDLGSGSNVDICVITKGNKEYLRNYMEPNPRTYVSSKGYSFTKKTEVLLTKITPLLERVEITEVGEAMEE

SEQ ID NO: 913 - protein, 273 aa, Arabidopsis thaliana
  peptide (1)..(273): Ceres Seq. ID no. 13499980
  misc_feature (36)..(217): Pfam Name: Pfam Description:  Proteasome A-type and B-type
  misc_feature (1)..(273): NCBI GI NO: 18405364 NR Description: 20S proteasome beta subunit B (PBB1)
  misc_feature (1)..(273): NCBI GI NO: 2511578 NR Description: multicatalytic endopeptidase
  misc_feature (1)..(273): NCBI GI NO: 15237451 NR Description: 20S proteasome beta subunit B (PBB2)
  misc_feature (1)..(248): NCBI GI NO: 30688785 NR Description: 20S proteasome beta subunit B (PBB1)
  misc_feature (1)..(273): NCBI GI NO: 20260224 NR Description: 20S proteasome beta subunit PBB2
  misc_feature (1)..(273): NCBI GI NO: 21593337 NR Description: 20S proteasome beta subunit PBB2
  misc_feature (1)..(273): NCBI GI NO: 8671504 NR Description: beta 2 subunit of 20S proteasome
  misc_feature (57)..(273): NCBI GI NO: 2511576 NR Description: multicatalytic endopeptidase
  misc_feature (10)..(263): NCBI GI NO: 24664391 NR Description: Proteasome beta2 subunit CG3329-PA
  misc_feature (2)..(185): NCBI GI NO: 14594921 NR Description: putative beta proteasome subunit
MSQSTVDVPPKGGFSFDLCKRNDMLTQKGLKAPSFLKTGTTIVGLIFKDGVILGADTRATEGPIVADKNCEKIHYMAPNIYCCGAGTAADTEAVTDMVSSQLRLHRYQTGRDSRVITALTLLKKHLFSYQGHVSAALVLGGVDITGPHLHTIYPHGSTDTLPFATMGSGSLAAMSVFEAKYKEGLTRDEGIKLVAESICSGIFNDLGSGSNVDICVITKGNKEYLRNYMEPNPRTYVSSKGYSFTKKTEVLLTKITPLLERVEITEVGEAMEE

SEQ ID NO: 914 - protein, 250 aa, Arabidopsis thaliana
  peptide (1)..(250): Ceres Seq. ID no. 13499981
  misc_feature (13)..(194): Pfam Name: Pfam Description:  Proteasome A-type and B-type
  misc_feature (1)..(250): NCBI GI NO: 18405364 NR Description: 20S proteasome beta subunit B (PBB1)
  misc_feature (1)..(250): NCBI GI NO: 2511578 NR Description: multicatalytic endopeptidase
  misc_feature (1)..(250): NCBI GI NO: 15237451 NR Description: 20S proteasome beta subunit B (PBB2)
  misc_feature (1)..(225): NCBI GI NO: 30688785 NR Description: 20S proteasome beta subunit B (PBB1)
  misc_feature (1)..(250): NCBI GI NO: 20260224 NR Description: 20S proteasome beta subunit PBB2
  misc_feature (1)..(250): NCBI GI NO: 21593337 NR Description: 20S proteasome beta subunit PBB2
  misc_feature (1)..(250): NCBI GI NO: 8671504 NR Description: beta 2 subunit of 20S proteasome
  misc_feature (34)..(250): NCBI GI NO: 2511576 NR Description: multicatalytic endopeptidase
  misc_feature (1)..(240): NCBI GI NO: 24664391 NR Description: Proteasome beta2 subunit CG3329-PA
  misc_feature (1)..(162): NCBI GI NO: 14594921 NR Description: putative beta proteasome subunit
MLTQKGLKAPSFLKTGTTIVGLIFKDGVILGADTRATEGPIVADKNCEKIHYMAPNIYCCGAGTAADTEAVTDMVSSQLRLHRYQTGRDSRVITALTLLKKHLFSYQGHVSAALVLGGVDITGPHLHTIYPHGSTDTLPFATMGSGSLAAMSVFEAKYKEGLTRDEGIKLVAESICSGIFNDLGSGSNVDICVITKGNKEYLRNYMEPNPRTYVSSKGYSFTKKTEVLLTKITPLLERVEITEVGEAMEE

SEQ ID NO: 915 - DNA, 1230 bp, Arabidopsis thaliana
  misc_feature (1)..(1230): Ceres Seq. ID no. 12488185
atttttttttcgtcccattttgttctttctactgtcgccgtaaaggatattcaaaagcggtagaggcggcgatggcggatcttttaccacctcttacggcggcacaagtcgatgctaagactaaagtcgatgagaaagtcgattactcgaacctcccttctcctgttccctatgaggaactccaccgtgaagctctcatgtctttaaagtcggacaattttgagggtttacgcttcgactttaccagggcgttgaatcagaagttttctctcagtcatagtgtaatgatggggccaaccgaagttcctgctcagtcacctgaaactactatcaaaattccaacagcccattatgagtttggtgccaattattatgacccaaagttgctgctcatcggaagggtaatgactgatggtagactaaatgcgagactgaaagcagatttaactgataagttagttgtgaaggcgaatgctctgataacaaatgaggaacatatgtcacaagcaatgttcaactttgattacatgggatcagactacagagctcagcttcaacttggacagagtgccctaattggagcaacttatatccagagtgttacaaaccatttatccttgggtggtgaaattttctgggctggtgtgcctcggaagtcgggaataggctatgctgctagatacgagacagataaaatggttgcttctggtcaagttgctagcacgggtgctgttgttatgaactatgttcagaagatttcagataaggtgtcacttgccactgatttcatgtacaactacttttcaagagatgtaacagctagtgtgggttatgactatatgcttagacaggctcgtgtgcggggtaagatcgattcaaacggtgttgcatccgctctccttgaagaaagattgagtatgggactcaattttcttctttctgcagagctggatcataagaagaaggactacaagtttggtttcggattaacagttggttaaaagaccgaataaaaaccggcacacaataagcctggcgcacagagcagattgcagcagtagtggtttcagctgcgaggatttcggttaaaatttattctatttcagtttaggctttttggtgaagttgggaagataaacggtaacgatgttgtgttgttatttgaggtttaggatttgtttccaagaaccattttataaaagaagaagaagcaaatgaggtttttgtttt

SEQ ID NO: 916 - protein, 332 aa, Arabidopsis thaliana
  peptide (1)..(332): Ceres Seq. ID no. 12488186
  misc_feature (53)..(326): Pfam Name: Pfam Description:  Eukaryotic porin
  misc_feature (24)..(332): NCBI GI NO: 15231008 NR Description: membrane import protein, putative
  misc_feature (160)..(332): NCBI GI NO: 11994775 NR Description: membrane import protein-like
  misc_feature (24)..(128): NCBI GI NO: 11994775 NR Description: membrane import protein-like
  misc_feature (24)..(329): NCBI GI NO: 15222963 NR Description: hypothetical protein; protein id: At1g50400.1
  misc_feature (160)..(329): NCBI GI NO: 13162531 NR Description: Hypothetical protein [Arabidopsis thaliana]
  misc_feature (24)..(128): NCBI GI NO: 13162531 NR Description: Hypothetical protein [Arabidopsis thaliana]
  misc_feature (160)..(329): NCBI GI NO: 25405370 NR Description: hypothetical protein F14I3.2
  misc_feature (96)..(128): NCBI GI NO: 25405370 NR Description: hypothetical protein F14I3.2
  misc_feature (241)..(332): NCBI GI NO: 2982293 NR Description: ISP42-like protein [Picea mariana]
  misc_feature (236)..(332): NCBI GI NO: 34903264 NR Description: unnamed protein product
FFFVPFCSFYCRRKGYSKAVEAAMADLLPPLTAAQVDAKTKVDEKVDYSNLPSPVPYEELHREALMSLKSDNFEGLRFDFTRALNQKFSLSHSVMMGPTEVPAQSPETTIKIPTAHYEFGANYYDPKLLLIGRVMTDGRLNARLKADLTDKLVVKANALITNEEHMSQAMFNFDYMGSDYRAQLQLGQSALIGATYIQSVTNHLSLGGEIFWAGVPRKSGIGYAARYETDKMVASGQVASTGAVVMNYVQKISDKVSLATDFMYNYFSRDVTASVGYDYMLRQARVRGKIDSNGVASALLEERLSMGLNFLLSAELDHKKKDYKFGFGLTVG

SEQ ID NO: 917 - protein, 309 aa, Arabidopsis thaliana
  peptide (1)..(309): Ceres Seq. ID no. 12488187
  misc_feature (30)..(303): Pfam Name: Pfam Description:  Eukaryotic porin
  misc_feature (1)..(309): NCBI GI NO: 15231008 NR Description: membrane import protein, putative
  misc_feature (137)..(309): NCBI GI NO: 11994775 NR Description: membrane import protein-like
  misc_feature (1)..(105): NCBI GI NO: 11994775 NR Description: membrane import protein-like
  misc_feature (1)..(306): NCBI GI NO: 15222963 NR Description: hypothetical protein; protein id: At1g50400.1
  misc_feature (137)..(306): NCBI GI NO: 13162531 NR Description: Hypothetical protein [Arabidopsis thaliana]
  misc_feature (1)..(105): NCBI GI NO: 13162531 NR Description: Hypothetical protein [Arabidopsis thaliana]
  misc_feature (137)..(306): NCBI GI NO: 25405370 NR Description: hypothetical protein F14I3.2
  misc_feature (73)..(105): NCBI GI NO: 25405370 NR Description: hypothetical protein F14I3.2
  misc_feature (218)..(309): NCBI GI NO: 2982293 NR Description: ISP42-like protein [Picea mariana]
  misc_feature (213)..(309): NCBI GI NO: 34903264 NR Description: unnamed protein product
MADLLPPLTAAQVDAKTKVDEKVDYSNLPSPVPYEELHREALMSLKSDNFEGLRFDFTRALNQKFSLSHSVMMGPTEVPAQSPETTIKIPTAHYEFGANYYDPKLLLIGRVMTDGRLNARLKADLTDKLVVKANALITNEEHMSQAMFNFDYMGSDYRAQLQLGQSALIGATYIQSVTNHLSLGGEIFWAGVPRKSGIGYAARYETDKMVASGQVASTGAVVMNYVQKISDKVSLATDFMYNYFSRDVTASVGYDYMLRQARVRGKIDSNGVASALLEERLSMGLNFLLSAELDHKKKDYKFGFGLTVG

SEQ ID NO: 918 - protein, 267 aa, Arabidopsis thaliana
  peptide (1)..(267): Ceres Seq. ID no. 12488188
  misc_feature (1)..(261): Pfam Name: Pfam Description:  Eukaryotic porin
  misc_feature (1)..(267): NCBI GI NO: 15231008 NR Description: membrane import protein, putative
  misc_feature (95)..(267): NCBI GI NO: 11994775 NR Description: membrane import protein-like
  misc_feature (1)..(63): NCBI GI NO: 11994775 NR Description: membrane import protein-like
  misc_feature (1)..(264): NCBI GI NO: 15222963 NR Description: hypothetical protein; protein id: At1g50400.1
  misc_feature (95)..(264): NCBI GI NO: 13162531 NR Description: Hypothetical protein [Arabidopsis thaliana]
  misc_feature (1)..(63): NCBI GI NO: 13162531 NR Description: Hypothetical protein [Arabidopsis thaliana]
  misc_feature (95)..(264): NCBI GI NO: 25405370 NR Description: hypothetical protein F14I3.2
  misc_feature (31)..(63): NCBI GI NO: 25405370 NR Description: hypothetical protein F14I3.2
  misc_feature (176)..(267): NCBI GI NO: 2982293 NR Description: ISP42-like protein [Picea mariana]
  misc_feature (171)..(267): NCBI GI NO: 34903264 NR Description: unnamed protein product
MSLKSDNFEGLRFDFTRALNQKFSLSHSVMMGPTEVPAQSPETTIKIPTAHYEFGANYYDPKLLLIGRVMTDGRLNARLKADLTDKLVVKANALITNEEHMSQAMFNFDYMGSDYRAQLQLGQSALIGATYIQSVTNHLSLGGEIFWAGVPRKSGIGYAARYETDKMVASGQVASTGAVVMNYVQKISDKVSLATDFMYNYFSRDVTASVGYDYMLRQARVRGKIDSNGVASALLEERLSMGLNFLLSAELDHKKKDYKFGFGLTVG

SEQ ID NO: 919 - DNA, 920 bp, Arabidopsis thaliana
  misc_feature (1)..(920): Ceres Seq. ID no. 12334492
actcagagacttgttgtgaagttgaaactctctgaccgtagctttcttatccttcattcaggttcactactatgtacagtctcacattcaaatgaatgagtaccgggatcgtgttgtattgccatctgcttcaaagaaacagggacgaccaatttgcacttgtttgaaaattttggatatgtctggtttaaagctttcagctttaagtcaaattaagttaatgactgctataacaacaatagatgatttgaactatccagagaagacagagacatactatgttgtcaatgtcccgtacatattctctgcttgttggaaaaccataaagcctctgttgcaagagagaacaaagaagaagattcaagttctgaaaggttgcgggaaagatgagttgctaaagataatggactatgagtctctcccacatttctgtagaagagaagggtctggatctggtaggcatatctcaaatggaacagtagacaattgtttctctctggatcactctttccaccaagacctttatgattatgtcaagcagcaggctctggttaaaggatcaggtgcaccgatcagacatggttcagtccacgttaagttccctgagccagacaccgaaggcaacaagatcttcgataccttagaaaatgagttccagaagcttggaaatgaccagaagatctgagtgatctacaacccttataacacgaattgcccataagaaaccggaatttgtctctggttgatgagcagtatttaagataagaatcaatcacctttacttgtattactagtttcgcttgcatcagctcgatgcaggttttgtttaaaaagaagatggaacacaatttcctcggaatggatcttttgatctagtaccattatatatatagaactcatttctatttatgtccttttgc

SEQ ID NO: 920 - protein, 197 aa, Arabidopsis thaliana
  peptide (1)..(197): Ceres Seq. ID no. 12334493
  misc_feature (7)..(111): Pfam Name: Pfam Description:  CRAL/TRIO domain
  misc_feature (1)..(197): NCBI GI NO: 15222786 NR Description: polyphosphoinositide binding protein, putative
  misc_feature (1)..(197): NCBI GI NO: 25295905 NR Description: protein F14J16.8 [imported] - Arabidopsis thaliana
  misc_feature (1)..(193): NCBI GI NO: 7488694 NR Description: phosphatidylinositol-phosphatidylcholine transfer proteinSEC14 homolog Ssh1
  misc_feature (1)..(193): NCBI GI NO: 15238794 NR Description: putative protein; protein id: At5g47730.1
  misc_feature (1)..(93): NCBI GI NO: 14532536 NR Description: AT5g47730/MCA23_5 [Arabidopsis thaliana]
  misc_feature (10)..(161): NCBI GI NO: 1346953 NR Description: Retinal-binding protein (RALBP)
  misc_feature (1)..(113): NCBI GI NO: 25412048 NR Description: hypothetical protein At2g21540
  misc_feature (1)..(111): NCBI GI NO: 1173368 NR Description: SEC14 cytosolic factor
  misc_feature (13)..(125): NCBI GI NO: 39590884 NR Description: Hypothetical protein CBG10148
  misc_feature (13)..(125): NCBI GI NO: 280549 NR Description: hypothetical protein T23G5
MNEYRDRVVLPSASKKQGRPICTCLKILDMSGLKLSALSQIKLMTAITTIDDLNYPEKTETYYVVNVPYIFSACWKTIKPLLQERTKKKIQVLKGCGKDELLKIMDYESLPHFCRREGSGSGRHISNGTVDNCFSLDHSFHQDLYDYVKQQALVKGSGAPIRHGSVHVKFPEPDTEGNKIFDTLENEFQKLGNDQKI

SEQ ID NO: 921 - protein, 168 aa, Arabidopsis thaliana
  peptide (1)..(168): Ceres Seq. ID no. 12334494
  misc_feature (1)..(82): Pfam Name: Pfam Description:  CRAL/TRIO domain
  misc_feature (1)..(168): NCBI GI NO: 15222786 NR Description: polyphosphoinositide binding protein, putative
  misc_feature (1)..(168): NCBI GI NO: 25295905 NR Description: protein F14J16.8 [imported] - Arabidopsis thaliana
  misc_feature (1)..(164): NCBI GI NO: 7488694 NR Description: phosphatidylinositol-phosphatidylcholine transfer proteinSEC14 homolog Ssh1
  misc_feature (1)..(164): NCBI GI NO: 15238794 NR Description: putative protein; protein id: At5g47730.1
  misc_feature (1)..(64): NCBI GI NO: 14532536 NR Description: AT5g47730/MCA23_5 [Arabidopsis thaliana]
  misc_feature (1)..(132): NCBI GI NO: 1346953 NR Description: Retinal-binding protein (RALBP)
  misc_feature (1)..(84): NCBI GI NO: 25412048 NR Description: hypothetical protein At2g21540
  misc_feature (1)..(82): NCBI GI NO: 1173368 NR Description: SEC14 cytosolic factor
  misc_feature (1)..(96): NCBI GI NO: 39590884 NR Description: Hypothetical protein CBG10148
  misc_feature (1)..(96): NCBI GI NO: 280549 NR Description: hypothetical protein T23G5
MSGLKLSALSQIKLMTAITTIDDLNYPEKTETYYVVNVPYIFSACWKTIKPLLQERTKKKIQVLKGCGKDELLKIMDYESLPHFCRREGSGSGRHISNGTVDNCFSLDHSFHQDLYDYVKQQALVKGSGAPIRHGSVHVKFPEPDTEGNKIFDTLENEFQKLGNDQKI

SEQ ID NO: 922 - protein, 154 aa, Arabidopsis thaliana
  peptide (1)..(154): Ceres Seq. ID no. 12334495
  misc_feature (1)..(68): Pfam Name: Pfam Description:  CRAL/TRIO domain
  misc_feature (1)..(154): NCBI GI NO: 15222786 NR Description: polyphosphoinositide binding protein, putative
  misc_feature (1)..(154): NCBI GI NO: 25295905 NR Description: protein F14J16.8 [imported] - Arabidopsis thaliana
  misc_feature (1)..(150): NCBI GI NO: 7488694 NR Description: phosphatidylinositol-phosphatidylcholine transfer proteinSEC14 homolog Ssh1
  misc_feature (1)..(150): NCBI GI NO: 15238794 NR Description: putative protein; protein id: At5g47730.1
  misc_feature (1)..(50): NCBI GI NO: 14532536 NR Description: AT5g47730/MCA23_5 [Arabidopsis thaliana]
  misc_feature (1)..(118): NCBI GI NO: 1346953 NR Description: Retinal-binding protein (RALBP)
  misc_feature (1)..(70): NCBI GI NO: 25412048 NR Description: hypothetical protein At2g21540
  misc_feature (1)..(68): NCBI GI NO: 1173368 NR Description: SEC14 cytosolic factor
  misc_feature (1)..(82): NCBI GI NO: 39590884 NR Description: Hypothetical protein CBG10148
  misc_feature (1)..(82): NCBI GI NO: 280549 NR Description: hypothetical protein T23G5
MTAITTIDDLNYPEKTETYYVVNVPYIFSACWKTIKPLLQERTKKKIQVLKGCGKDELLKIMDYESLPHFCRREGSGSGRHISNGTVDNCFSLDHSFHQDLYDYVKQQALVKGSGAPIRHGSVHVKFPEPDTEGNKIFDTLENEFQKLGNDQKI

SEQ ID NO: 923 - DNA, 1176 bp, Arabidopsis thaliana
  misc_feature (1)..(1176): Ceres Seq. ID no. 13592325
gaccatttcttttccatgactttcctcttatcaagaacatttatttctctcactctcagaccttcttgttcgatttccatggcgaatttaacgacgaacgctaaatctcgcctgagaggtgttgtattcgatatggacggaaccctgactgttccggtcatcgatttcgccgcaatgtatagagctgttcttggtgaagatgcttacaagcgaatcaaagcagagagccctagtgggattgatattctgcatcatattgagtcgtggagtcctgataaacagcagaaggcgtatgaaatcattgctgattatgagaaacaaggaatagataagcttcaaatcatgcctggtactgctgaactatgtggcttccttgattccaaaaagataaagagggggctaattacacgcaatgttcaaaaggcaatcgacatcttccatcaacgttttgaggttatcttttctccagcactaggcagagagtttcgtccatataaaccaaacccagacccgctgttgcatatatgttctacatgggacatccaacctaatgaagtcatgatggttggtgacagcttaaaagatgatgtgagtgacagacatgatgacaagcctttggtcaaccctttctccatagcaaatcgataagcaatgcaatgaaagaagcttaaacaatggatcttctcatgccattgcttaaagattttctatgtggaaaggatgcctaccaacttttcagactatttttctcacatctttactgaagattacaactgggaatcgatctttcttttctcgattctgcagatagcatgtgggaaacgagctggagccttcacttgcttgctagatgaaaccggaaggtatggaccagacgatttttctgtttccggtctgcaacctgattttaaggttgattccttgtccaaaatccagaacctattggagacgaacttcgacctgaacccgtagtttttccaagttcctcatcttgtagtttcagtgaccaaattagtgtcctactcaacacagtatctgttcaggatagccataaatgtcaaaccacggaattctatgcactggctatctttaagttgcacaattgtgtccctgcatggtcgtctagcgaacatgtgtgtgagggcaaacattgttgtttgttaaatccaaaatttc

SEQ ID NO: 924 - protein, 215 aa, Arabidopsis thaliana
  peptide (1)..(215): Ceres Seq. ID no. 13592326
  misc_feature (38)..(198): Pfam Name: Pfam Description:  haloacid dehalogenase-like hydrolase
  misc_feature (6)..(198): NCBI GI NO: 20196855 NR Description: unknown protein [Arabidopsis thaliana]
  misc_feature (27)..(198): NCBI GI NO: 30685622 NR Description: haloacid dehalogenase-like hydrolase family
  misc_feature (13)..(198): NCBI GI NO: 25408252 NR Description: hypothetical protein At2g33250
  misc_feature (38)..(200): NCBI GI NO: 6324705 NR Description: Hypothetical ORF; Yor131cp
  misc_feature (27)..(195): NCBI GI NO: 24375526 NR Description: hydrolase, haloacid dehalogenase-like family
  misc_feature (42)..(195): NCBI GI NO: 39995800 NR Description: HAD-superfamily hydrolase, subfamily IA, variant 1
  misc_feature (36)..(205): NCBI GI NO: 27366476 NR Description: Predicted phosphatases [Vibrio vulnificus CMCP6]
  misc_feature (38)..(191): NCBI GI NO: 26991442 NR Description: hydrolase, haloacid dehalogenase-like family
  misc_feature (37)..(195): NCBI GI NO: 28900419 NR Description: hypothetical protein
  misc_feature (68)..(181): NCBI GI NO: 21622506 NR Description: conserved hypothetical protein [Neurospora crassa]
DHFFSMTFLLSRTFISLTLRPSCSISMANLTTNAKSRLRGVVFDMDGTLTVPVIDFAAMYRAVLGEDAYKRIKAESPSGIDILHHIESWSPDKQQKAYEIIADYEKQGIDKLQIMPGTAELCGFLDSKKIKRGLITRNVQKAIDIFHQRFEVIFSPALGREFRPYKPNPDPLLHICSTWDIQPNEVMMVGDSLKDDVSDRHDDKPLVNPFSIANR

SEQ ID NO: 925 - protein, 210 aa, Arabidopsis thaliana
  peptide (1)..(210): Ceres Seq. ID no. 13592327
  misc_feature (33)..(193): Pfam Name: Pfam Description:  haloacid dehalogenase-like hydrolase
  misc_feature (1)..(193): NCBI GI NO: 20196855 NR Description: unknown protein [Arabidopsis thaliana]
  misc_feature (22)..(193): NCBI GI NO: 30685622 NR Description: haloacid dehalogenase-like hydrolase family
  misc_feature (8)..(193): NCBI GI NO: 25408252 NR Description: hypothetical protein At2g33250
  misc_feature (33)..(195): NCBI GI NO: 6324705 NR Description: Hypothetical ORF; Yor131cp
  misc_feature (22)..(190): NCBI GI NO: 24375526 NR Description: hydrolase, haloacid dehalogenase-like family
  misc_feature (37)..(190): NCBI GI NO: 39995800 NR Description: HAD-superfamily hydrolase, subfamily IA, variant 1
  misc_feature (31)..(200): NCBI GI NO: 27366476 NR Description: Predicted phosphatases [Vibrio vulnificus CMCP6]
  misc_feature (33)..(186): NCBI GI NO: 26991442 NR Description: hydrolase, haloacid dehalogenase-like family
  misc_feature (32)..(190): NCBI GI NO: 28900419 NR Description: hypothetical protein
  misc_feature (63)..(176): NCBI GI NO: 21622506 NR Description: conserved hypothetical protein [Neurospora crassa]
MTFLLSRTFISLTLRPSCSISMANLTTNAKSRLRGVVFDMDGTLTVPVIDFAAMYRAVLGEDAYKRIKAESPSGIDILHHIESWSPDKQQKAYEIIADYEKQGIDKLQIMPGTAELCGFLDSKKIKRGLITRNVQKAIDIFHQRFEVIFSPALGREFRPYKPNPDPLLHICSTWDIQPNEVMMVGDSLKDDVSDRHDDKPLVNPFSIANR

SEQ ID NO: 926 - protein, 189 aa, Arabidopsis thaliana
  peptide (1)..(189): Ceres Seq. ID no. 13592328
  misc_feature (12)..(172): Pfam Name: Pfam Description:  haloacid dehalogenase-like hydrolase
  misc_feature (1)..(172): NCBI GI NO: 20196855 NR Description: unknown protein [Arabidopsis thaliana]
  misc_feature (1)..(172): NCBI GI NO: 30685622 NR Description: haloacid dehalogenase-like hydrolase family
  misc_feature (1)..(172): NCBI GI NO: 25408252 NR Description: hypothetical protein At2g33250
  misc_feature (12)..(174): NCBI GI NO: 6324705 NR Description: Hypothetical ORF; Yor131cp
  misc_feature (1)..(169): NCBI GI NO: 24375526 NR Description: hydrolase, haloacid dehalogenase-like family
  misc_feature (16)..(169): NCBI GI NO: 39995800 NR Description: HAD-superfamily hydrolase, subfamily IA, variant 1
  misc_feature (10)..(179): NCBI GI NO: 27366476 NR Description: Predicted phosphatases [Vibrio vulnificus CMCP6]
  misc_feature (12)..(165): NCBI GI NO: 26991442 NR Description: hydrolase, haloacid dehalogenase-like family
  misc_feature (11)..(169): NCBI GI NO: 28900419 NR Description: hypothetical protein
  misc_feature (42)..(155): NCBI GI NO: 21622506 NR Description: conserved hypothetical protein [Neurospora crassa]
MANLTTNAKSRLRGVVFDMDGTLTVPVIDFAAMYRAVLGEDAYKRIKAESPSGIDILHHIESWSPDKQQKAYEIIADYEKQGIDKLQIMPGTAELCGFLDSKKIKRGLITRNVQKAIDIFHQRFEVIFSPALGREFRPYKPNPDPLLHICSTWDIQPNEVMMVGDSLKDDVSDRHDDKPLVNPFSIANR

SEQ ID NO: 927 - DNA, 1284 bp, Arabidopsis thaliana
  misc_feature (1)..(1284): Ceres Seq. ID no. 12348687
agattagatcttggttccaaatttcactcttttcctctaaaacgcatttatcactttccctcattaaacacaaaaactcattcatcgtcctctctcgcttgacctacaacacccgattctctaatcgaaaccgtttctctctttttgatcagatctcagatctttccctctttgattcttcttccttagatcgattctctctagaaacaacaatggcgtctgggcgtgaagagttcgtatacatggctaagctcgcggagcaagcggagaggtacgaagagatggtagagtttatggagaaagtctccgccgccgttgatggcgatgaactcaccgtagaagagcgaaatcttctctccgtcgcttataagaatgtgattggtgctcgccgtgcctcgtggcgtatcatttcatcgatcgagcagaaggaagagagccgtggtaacgatgaccacgtcacggcgatccgtgaatataggtctaagatcgagacggaactctccggaatctgcgacggaatccttaagttgcttgactctagactcatccctgccgctgcttctggtgattccaaggtcttttaccttaagatgaagggagattatcacaggtacttggctgagtttaagactggtcaagagaggaaagacgccgccgaacatacactcgccgcttacaaatctgctcaggatattgctaatgcagagcttgctccaacacacccaattcgtcttggtcttgcattgaacttctctgtgttctattacgagatcctcaattctcctgatcgtgcctgtaacctcgccaaacaggcctttgatgaggcgattgcagagttggacactcttggtgaagagtcatacaaagacagtaccttgatcatgcagcttcttcgtgacaatctcactctctggacatctgatatgcaggatgatgctgcggatgagatcaaggaagcagcagcgccaaaaccgaccgaggaacagcagtgatcttttgagtgaaactgctagttttcttctagggtttggaatttcttctctttctcgtccatatgtttttcttaatccatctaagaggtcgctcttgccatttcgctcatcttcaaaagcttattcattcatcatatttgtggcaagtctgaaccatcaatcatctttttatctctttttaatttattttctcttttcttatttctttgttgttatcgatttcaatgtctgtgtaatcgaaacttgctttcttttctcatcaatttgaagatcataaagtctcttgtctctt

SEQ ID NO: 928 - protein, 329 aa, Arabidopsis thaliana
  peptide (1)..(329): Ceres Seq. ID no. 12348688
  misc_feature (75)..(312): Pfam Name: Pfam Description:  14-3-3 protein
  misc_feature (71)..(329): NCBI GI NO: 18411901 NR Description: 14-3-3 protein GF14 omega
  misc_feature (71)..(329): NCBI GI NO: 487791 NR Description: GF14omega isoform
  misc_feature (73)..(329): NCBI GI NO: 13447104 NR Description: GF14 omega [Brassica napus]
  misc_feature (72)..(329): NCBI GI NO: 18399524 NR Description: 14-3-3 protein GF14 phi
  misc_feature (72)..(327): NCBI GI NO: 14532442 NR Description: At1g35160/T32G9_30 [Arabidopsis thaliana]
  misc_feature (72)..(329): NCBI GI NO: 18413181 NR Description: 14-3-3 protein GF14 chi
  misc_feature (71)..(329): NCBI GI NO: 1361987 NR Description: 14-3-3 protein homolog GF14 chi chain
  misc_feature (72)..(329): NCBI GI NO: 1702986 NR Description: 14-3-3-like protein GF14 chi
  misc_feature (72)..(329): NCBI GI NO: 20340229 NR Description: 14-3-3-like protein [Thellungiella halophila]
  misc_feature (73)..(329): NCBI GI NO: 8099063 NR Description: 14-3-3 protein [Populus x canescens]
IRSWFQISLFSSKTHLSLSLIKHKNSFIVLSRLTYNTRFSNRNRFSLFDQISDLSLFDSSSLDRFSLETTMASGREEFVYMAKLAEQAERYEEMVEFMEKVSAAVDGDELTVEERNLLSVAYKNVIGARRASWRIISSIEQKEESRGNDDHVTAIREYRSKIETELSGICDGILKLLDSRLIPAAASGDSKVFYLKMKGDYHRYLAEFKTGQERKDAAEHTLAAYKSAQDIANAELAPTHPIRLGLALNFSVFYYEILNSPDRACNLAKQAFDEAIAELDTLGEESYKDSTLIMQLLRDNLTLWTSDMQDDAADEIKEAAAPKPTEEQQ

SEQ ID NO: 929 - protein, 259 aa, Arabidopsis thaliana
  peptide (1)..(259): Ceres Seq. ID no. 12348689
  misc_feature (5)..(242): Pfam Name: Pfam Description:  14-3-3 protein
  misc_feature (1)..(259): NCBI GI NO: 18411901 NR Description: 14-3-3 protein GF14 omega
  misc_feature (1)..(259): NCBI GI NO: 487791 NR Description: GF14omega isoform
  misc_feature (3)..(259): NCBI GI NO: 13447104 NR Description: GF14 omega [Brassica napus]
  misc_feature (2)..(259): NCBI GI NO: 18399524 NR Description: 14-3-3 protein GF14 phi
  misc_feature (2)..(257): NCBI GI NO: 14532442 NR Description: At1g35160/T32G9_30 [Arabidopsis thaliana]
  misc_feature (2)..(259): NCBI GI NO: 18413181 NR Description: 14-3-3 protein GF14 chi
  misc_feature (1)..(259): NCBI GI NO: 1361987 NR Description: 14-3-3 protein homolog GF14 chi chain
  misc_feature (2)..(259): NCBI GI NO: 1702986 NR Description: 14-3-3-like protein GF14 chi
  misc_feature (2)..(259): NCBI GI NO: 20340229 NR Description: 14-3-3-like protein [Thellungiella halophila]
  misc_feature (3)..(259): NCBI GI NO: 8099063 NR Description: 14-3-3 protein [Populus x canescens]
MASGREEFVYMAKLAEQAERYEEMVEFMEKVSAAVDGDELTVEERNLLSVAYKNVIGARRASWRIISSIEQKEESRGNDDHVTAIREYRSKIETELSGICDGILKLLDSRLIPAAASGDSKVFYLKMKGDYHRYLAEFKTGQERKDAAEHTLAAYKSAQDIANAELAPTHPIRLGLALNFSVFYYEILNSPDRACNLAKQAFDEAIAELDTLGEESYKDSTLIMQLLRDNLTLWTSDMQDDAADEIKEAAAPKPTEEQQ

SEQ ID NO: 930 - protein, 249 aa, Arabidopsis thaliana
  peptide (1)..(249): Ceres Seq. ID no. 12348690
  misc_feature (1)..(232): Pfam Name: Pfam Description:  14-3-3 protein
  misc_feature (1)..(249): NCBI GI NO: 18411901 NR Description: 14-3-3 protein GF14 omega
  misc_feature (1)..(249): NCBI GI NO: 487791 NR Description: GF14omega isoform
  misc_feature (1)..(249): NCBI GI NO: 13447104 NR Description: GF14 omega [Brassica napus]
  misc_feature (1)..(249): NCBI GI NO: 18399524 NR Description: 14-3-3 protein GF14 phi
  misc_feature (1)..(247): NCBI GI NO: 14532442 NR Description: At1g35160/T32G9_30 [Arabidopsis thaliana]
  misc_feature (1)..(249): NCBI GI NO: 18413181 NR Description: 14-3-3 protein GF14 chi
  misc_feature (1)..(249): NCBI GI NO: 1361987 NR Description: 14-3-3 protein homolog GF14 chi chain
  misc_feature (1)..(249): NCBI GI NO: 1702986 NR Description: 14-3-3-like protein GF14 chi
  misc_feature (1)..(249): NCBI GI NO: 20340229 NR Description: 14-3-3-like protein [Thellungiella halophila]
  misc_feature (1)..(249): NCBI GI NO: 8099063 NR Description: 14-3-3 protein [Populus x canescens]
MAKLAEQAERYEEMVEFMEKVSAAVDGDELTVEERNLLSVAYKNVIGARRASWRIISSIEQKEESRGNDDHVTAIREYRSKIETELSGICDGILKLLDSRLIPAAASGDSKVFYLKMKGDYHRYLAEFKTGQERKDAAEHTLAAYKSAQDIANAELAPTHPIRLGLALNFSVFYYEILNSPDRACNLAKQAFDEAIAELDTLGEESYKDSTLIMQLLRDNLTLWTSDMQDDAADEIKEAAAPKPTEEQQ

SEQ ID NO: 931 - DNA, 861 bp, Arabidopsis thaliana
  misc_feature (1)..(861): Ceres Seq. ID no. 12372082
aaaaaagggactgtggagaaacactttagcacggtgcgacaagatggcgagctcagtgacgctgcttctatggagtcttcttcttctcggtacactaagcgctattcaggccaaaaagtctaaggaaaacttaaaggagatcacacacaaggtttattttgatgttgaaattgatgggaaagcagctggtcgtattgtcatgggtctatttggcaagacagtccccaaaactgtagagaatttccgagctttatgcactggggagaaaggaataggtaagaatgggaaggcgctccattacaaggggagttcatttcataggatcataccaagctttatgctccaaggaggcgattttacacatggaaatggaatgggaggagaatctatctatggtgagaagtttgctgatgagaacttcaaactcaagcatactggtccagggttcttatcaatggcaaatgccggtcaagataccaacggatcacagtttttcatcacaactgtaacaaccagctggttggatgggcgacatgtggtattcgggaaggtagtgacaggaatggatgtggtgtacaaagtcgaagctgaaggaaatcagagtggaactcctaagagtaaagtggtgattgtagacagtggtgagcttcccctgtaactcaacaactctagttttctccatctgatcatccattgatgtgagctctagtgtgcttgatgacttttgtgttaaaacgagtgtcttggttactttatgaaagattctaccggctttatttctttcgtctgctttctagctcgagctatgtctgactttatacacaaatgtctttcagtagcaaaaattctgcacttatgccg

SEQ ID NO: 932 - protein, 218 aa, Arabidopsis thaliana
  peptide (1)..(218): Ceres Seq. ID no. 12372083
  misc_feature (15)..(218): NCBI GI NO: 15237739 NR Description: cyclophilin ROC7; protein id: At5g58710
  misc_feature (15)..(218): NCBI GI NO: 11270326 NR Description: peptidylprolyl isomerase (EC 5.2.1.8) CYP5
  misc_feature (15)..(218): NCBI GI NO: 15227674 NR Description: cyclophilin; protein id: At2g29960
  misc_feature (15)..(218): NCBI GI NO: 21554007 NR Description: cyclophilin [Arabidopsis thaliana]
  misc_feature (5)..(218): NCBI GI NO: 32351008 NR Description: cyclophilin [Triticum aestivum]
  misc_feature (42)..(218): NCBI GI NO: 18410386 NR Description: cyclophilin-like protein; protein id: At3g55920
  misc_feature (27)..(216): NCBI GI NO: 5731960 NR Description: cyclophilin B [Dictyostelium discoideum]
  misc_feature (50)..(216): NCBI GI NO: 17566266 NR Description: CYcloPhilin family CYP-7 (18.4 kD) (cyp-7)
  misc_feature (42)..(218): NCBI GI NO: 11270308 NR Description: peptidylprolyl isomerase (EC 5.2.1.8) F27K19.100
  misc_feature (50)..(216): NCBI GI NO: 863016 NR Description: cyclophilin
KKGLWRNTLARCDKMASSVTLLLWSLLLLGTLSAIQAKKSKENLKEITHKVYFDVEIDGKAAGRIVMGLFGKTVPKTVENFRALCTGEKGIGKNGKALHYKGSSFHRIIPSFMLQGGDFTHGNGMGGESIYGEKFADENFKLKHTGPGFLSMANAGQDTNGSQFFITTVTTSWLDGRHVVFGKVVTGMDVVYKVEAEGNQSGTPKSKVVIVDSGELPL

SEQ ID NO: 933 - protein, 204 aa, Arabidopsis thaliana
  peptide (1)..(204): Ceres Seq. ID no. 12372084
  misc_feature (1)..(204): NCBI GI NO: 15237739 NR Description: cyclophilin ROC7; protein id: At5g58710
  misc_feature (1)..(204): NCBI GI NO: 11270326 NR Description: peptidylprolyl isomerase (EC 5.2.1.8) CYP5
  misc_feature (1)..(204): NCBI GI NO: 15227674 NR Description: cyclophilin; protein id: At2g29960
  misc_feature (1)..(204): NCBI GI NO: 21554007 NR Description: cyclophilin [Arabidopsis thaliana]
  misc_feature (1)..(204): NCBI GI NO: 32351008 NR Description: cyclophilin [Triticum aestivum]
  misc_feature (28)..(204): NCBI GI NO: 18410386 NR Description: cyclophilin-like protein; protein id: At3g55920
  misc_feature (13)..(202): NCBI GI NO: 5731960 NR Description: cyclophilin B [Dictyostelium discoideum]
  misc_feature (36)..(202): NCBI GI NO: 17566266 NR Description: CYcloPhilin family CYP-7 (18.4 kD) (cyp-7)
  misc_feature (28)..(204): NCBI GI NO: 11270308 NR Description: peptidylprolyl isomerase (EC 5.2.1.8) F27K19.100
  misc_feature (36)..(202): NCBI GI NO: 863016 NR Description: cyclophilin
MASSVTLLLWSLLLLGTLSAIQAKKSKENLKEITHKVYFDVEIDGKAAGRIVMGLFGKTVPKTVENFRALCTGEKGIGKNGKALHYKGSSFHRIIPSFMLQGGDFTHGNGMGGESIYGEKFADENFKLKHTGPGFLSMANAGQDTNGSQFFITTVTTSWLDGRHVVFGKVVTGMDVVYKVEAEGNQSGTPKSKVVIVDSGELPL

SEQ ID NO: 934 - protein, 152 aa, Arabidopsis thaliana
  peptide (1)..(152): Ceres Seq. ID no. 12372085
  misc_feature (1)..(152): NCBI GI NO: 15237739 NR Description: cyclophilin ROC7; protein id: At5g58710
  misc_feature (1)..(152): NCBI GI NO: 11270326 NR Description: peptidylprolyl isomerase (EC 5.2.1.8) CYP5
  misc_feature (1)..(152): NCBI GI NO: 15227674 NR Description: cyclophilin; protein id: At2g29960
  misc_feature (1)..(152): NCBI GI NO: 21554007 NR Description: cyclophilin [Arabidopsis thaliana]
  misc_feature (1)..(152): NCBI GI NO: 32351008 NR Description: cyclophilin [Triticum aestivum]
  misc_feature (1)..(152): NCBI GI NO: 18410386 NR Description: cyclophilin-like protein; protein id: At3g55920
  misc_feature (1)..(150): NCBI GI NO: 5731960 NR Description: cyclophilin B [Dictyostelium discoideum]
  misc_feature (1)..(150): NCBI GI NO: 17566266 NR Description: CYcloPhilin family CYP-7 (18.4 kD) (cyp-7)
  misc_feature (1)..(152): NCBI GI NO: 11270308 NR Description: peptidylprolyl isomerase (EC 5.2.1.8) F27K19.100
  misc_feature (1)..(150): NCBI GI NO: 863016 NR Description: cyclophilin
MGLFGKTVPKTVENFRALCTGEKGIGKNGKALHYKGSSFHRIIPSFMLQGGDFTHGNGMGGESIYGEKFADENFKLKHTGPGFLSMANAGQDTNGSQFFITTVTTSWLDGRHVVFGKVVTGMDVVYKVEAEGNQSGTPKSKVVIVDSGELPL

SEQ ID NO: 935 - DNA, 1354 bp, Arabidopsis thaliana
  misc_feature (1)..(1354): Ceres Seq. ID no. 13487647
gttttatcttttgatagttctgattgtaattagattttggtaggtcacttgtatagagagatcagtaaaataagaaggatgagttggtgtgatggttcagatgataactacgatcttaatcttgaaagagtatcgaacactgatcatccatcggttcaactcaaagaccaatctcaatcatgtgtaacgagccgtccagattccaagattagcgctgaaactcctatcacgagttgtccttcttgcggacacaagctccatcatcaccaagacgaccaggttggtagcatcaaagatttaccaagcttaccggcaggagtcaaattcgatccgtcggataaagagatccttatgcatttggaggcgaaggtatcatccgataagcgaaaacttcatccgttgattgatgaatttatacctacgcttgaaggagagaatggaatttgttatacgcatcctgagaaacttcctggagtaagcaaggacgggcaagtacggcacttcttccaccggccatcaaaggcttatacgaccggaacacgaaaacgaagaaaagtgagcacagatgaggaaggccatgaaacaaggtggcacaaaacaggcaagactcgacctgttttgtctcaatcaggagaaaccggtttcaagaagatcctagtgctctacaccaactatggtcgccagaagaagcctgagaagacgaattgggtgatgcatcagtatcatttaggtagcagcgaggacgaaaaagacggtgaaccagtcctctctaaagtcttctaccaaacacagcctaggcaatgcggttcgatggaacctaaaccgaaaaatctcgtaaacctaaaccggtttagttatgaaaatattcaggccggtttcgggtatgagcatggtggtaaaagtgaagagacgacgcaggtgattcgagagttggtagttcgtgaaggcgatgggtcatgttcgtttcttagttttacttgtgatgcaagtaagggtaaagaaagcttcatgaagaatcaatagaacataacatatataatatatataaatggaggtgctttgttggagtaaagatgaggaaaagaatgagagagcacatattctttgtgtgtaggtgttgggtaactatcatagtaatctacctcaaagcttttgggagattttaggttttaaccttttttattattaaattgggggcgtaactttaacctcgagacatgactgatatttgtttatatttctattcttctagataaaatatgtcaaaacaatactgtaatagctcgtctttcaattattgtaacaaatatttcaagtaataatgaaattaaaaatggataaaataggactttgg

SEQ ID NO: 936 - protein, 314 aa, Arabidopsis thaliana
  peptide (1)..(314): Ceres Seq. ID no. 13487648
  misc_feature (77)..(218): Pfam Name: NAM Pfam Description: No apical meristem
  misc_feature (1)..(314): NCBI GI NO: 18396807 NR Description: No apical meristem (NAM) protein family
  misc_feature (1)..(314): NCBI GI NO: 21554371 NR Description: NAM protein, putative [Arabidopsis thaliana]
  misc_feature (64)..(314): NCBI GI NO: 6560767 NR Description: F3M18.9 [Arabidopsis thaliana]
  misc_feature (1)..(265): NCBI GI NO: 34911014 NR Description: OJ1125_C04.12
  misc_feature (46)..(243): NCBI GI NO: 15235314 NR Description: No apical meristem (NAM) protein family
  misc_feature (41)..(242): NCBI GI NO: 15233497 NR Description: No apical meristem (NAM) protein family
  misc_feature (53)..(244): NCBI GI NO: 15241889 NR Description: No apical meristem (NAM) protein family
  misc_feature (32)..(242): NCBI GI NO: 34906416 NR Description: P0710E05.22
  misc_feature (22)..(241): NCBI GI NO: 12320749 NR Description: unknown protein [Arabidopsis thaliana]
  misc_feature (22)..(241): NCBI GI NO: 30689293 NR Description: No apical meristem (NAM) protein family
MSWCDGSDDNYDLNLERVSNTDHPSVQLKDQSQSCVTSRPDSKISAETPITSCPSCGHKLHHHQDDQVGSIKDLPSLPAGVKFDPSDKEILMHLEAKVSSDKRKLHPLIDEFIPTLEGENGICYTHPEKLPGVSKDGQVRHFFHRPSKAYTTGTRKRRKVSTDEEGHETRWHKTGKTRPVLSQSGETGFKKILVLYTNYGRQKKPEKTNWVMHQYHLGSSEDEKDGEPVLSKVFYQTQPRQCGSMEPKPKNLVNLNRFSYENIQAGFGYEHGGKSEETTQVIRELVVREGDGSCSFLSFTCDASKGKESFMKNQ

SEQ ID NO: 937 - protein, 223 aa, Arabidopsis thaliana
  peptide (1)..(223): Ceres Seq. ID no. 13487649
  misc_feature (1)..(127): Pfam Name: NAM Pfam Description: No apical meristem
  misc_feature (1)..(223): NCBI GI NO: 18396807 NR Description: No apical meristem (NAM) protein family
  misc_feature (1)..(223): NCBI GI NO: 21554371 NR Description: NAM protein, putative [Arabidopsis thaliana]
  misc_feature (1)..(223): NCBI GI NO: 6560767 NR Description: F3M18.9 [Arabidopsis thaliana]
  misc_feature (1)..(174): NCBI GI NO: 34911014 NR Description: OJ1125_C04.12
  misc_feature (1)..(152): NCBI GI NO: 15235314 NR Description: No apical meristem (NAM) protein family
  misc_feature (1)..(151): NCBI GI NO: 15233497 NR Description: No apical meristem (NAM) protein family
  misc_feature (1)..(153): NCBI GI NO: 15241889 NR Description: No apical meristem (NAM) protein family
  misc_feature (1)..(151): NCBI GI NO: 34906416 NR Description: P0710E05.22
  misc_feature (1)..(150): NCBI GI NO: 12320749 NR Description: unknown protein [Arabidopsis thaliana]
  misc_feature (1)..(150): NCBI GI NO: 30689293 NR Description: No apical meristem (NAM) protein family
MHLEAKVSSDKRKLHPLIDEFIPTLEGENGICYTHPEKLPGVSKDGQVRHFFHRPSKAYTTGTRKRRKVSTDEEGHETRWHKTGKTRPVLSQSGETGFKKILVLYTNYGRQKKPEKTNWVMHQYHLGSSEDEKDGEPVLSKVFYQTQPRQCGSMEPKPKNLVNLNRFSYENIQAGFGYEHGGKSEETTQVIRELVVREGDGSCSFLSFTCDASKGKESFMKNQ

SEQ ID NO: 938 - DNA, 1086 bp, Arabidopsis thaliana
  misc_feature (1)..(1086): Ceres Seq. ID no. 12580498
agaattagatatttccgacacgaggcaaattcctagtggctcatggcgtcatcatctgatcacacggcgaagataatcgacggcaaggcgattgctcataccatcagatcagagatcgccgaggaagttcgcggtctatctgagaaacacggcaaggtcccaggactagctgtagttattgttgggagccgaaaggattcacagacctatgtgaatacgaagaggaaagcgtgcgctgaggttgggattaagtcatttgacgtgggcctaccagaggaagtttctgaagctgatcttattagcaaagttcatgaactaaattcaaatccggatgtccatggcatattagttcaactcccattgccgaaacatattaatgaggagaatatattgggtgcaatcagcattgataaagatgtcgatggcttccatcctttgaatattggtaagctagccatgaaaggcagagaacccctcttccttccttgcaccccaaagggatgtttggaactcctagctagaagcggcgtaaagataaaggggcaacgagcagttgttgtaggtcggagtaacattgttggtttgcccgtttcacttcttttgctcaaggctgatgctactgtcacaactgtacattctcacaccaaggatcctgaggctatcatacgggaagctgacattgttattgctgcatgcggacaagcccacatgattaagggcaactggataaagccaggggctgcagtaattgatgttggaactaatgcagtcagcgacccgagcaagaaatcaggataccggttggttggagatgttgatttcgcagaagcttcaaaagttgcaggtttcataactccggtccctggtggtgtaggcccaatgacagtggcaatgcttctcaggaacaccgtagacggtgccaagcgtgtctttggcgagtaaaacaatctactgtatgtaataaagaaaccaagagtttctccattctgtaattgtgtacttggcttgacgatatttttccactcaaataaattgaaattggcgttccctttggattaaaaaaaaaaaaaaaaaaaaaaaacaaaa

SEQ ID NO: 939 - protein, 299 aa, Arabidopsis thaliana
  peptide (1)..(299): Ceres Seq. ID no. 12580499
  misc_feature (129)..(297): Pfam Name: P Pfam Description: Tetrahydrofolate dehydrogenase/cyclohydrolase
  misc_feature (1)..(299): NCBI GI NO: 21553669 NR Description: 5
  misc_feature (1)..(299): NCBI GI NO: 15230449 NR Description: 5
  misc_feature (9)..(299): NCBI GI NO: 11252953 NR Description: methylenetetrahydrofolate dehydrogenase
  misc_feature (9)..(295): NCBI GI NO: 12083525 NR Description: similar to Pisum sativum methylenetetrahydrofolatedehydrogenase
  misc_feature (3)..(296): NCBI GI NO: 15236888 NR Description: putative tetrahydrofolate synthase
  misc_feature (11)..(297): NCBI GI NO: 25284864 NR Description: methylenetetrahydrofolate dehydrogenase
  misc_feature (11)..(297): NCBI GI NO: 30687594 NR Description: tetrahydrofolate dehydrogenase/cyclohydrolase
  misc_feature (9)..(295): NCBI GI NO: 9992889 NR Description: C1-THFS protein [Yarrowia lipolytica]
  misc_feature (9)..(297): NCBI GI NO: 32405166 NR Description: hypothetical protein [Neurospora crassa]
  misc_feature (9)..(295): NCBI GI NO: 23001349 NR Description: hypothetical protein [Magnetococcus sp. MC-1]
MASSSDHTAKIIDGKAIAHTIRSEIAEEVRGLSEKHGKVPGLAVVIVGSRKDSQTYVNTKRKACAEVGIKSFDVGLPEEVSEADLISKVHELNSNPDVHGILVQLPLPKHINEENILGAISIDKDVDGFHPLNIGKLAMKGREPLFLPCTPKGCLELLARSGVKIKGQRAVVVGRSNIVGLPVSLLLLKADATVTTVHSHTKDPEAIIREADIVIAACGQAHMIKGNWIKPGAAVIDVGTNAVSDPSKKSGYRLVGDVDFAEASKVAGFITPVPGGVGPMTVAMLLRNTVDGAKRVFGE

SEQ ID NO: 940 - protein, 161 aa, Arabidopsis thaliana
  peptide (1)..(161): Ceres Seq. ID no. 12580500
  misc_feature (1)..(159): Pfam Name: P Pfam Description: Tetrahydrofolate dehydrogenase/cyclohydrolase
  misc_feature (1)..(161): NCBI GI NO: 21553669 NR Description: 5
  misc_feature (1)..(161): NCBI GI NO: 15230449 NR Description: 5
  misc_feature (1)..(161): NCBI GI NO: 11252953 NR Description: methylenetetrahydrofolate dehydrogenase
  misc_feature (1)..(157): NCBI GI NO: 12083525 NR Description: similar to Pisum sativum methylenetetrahydrofolatedehydrogenase
  misc_feature (1)..(158): NCBI GI NO: 15236888 NR Description: putative tetrahydrofolate synthase
  misc_feature (1)..(159): NCBI GI NO: 25284864 NR Description: methylenetetrahydrofolate dehydrogenase
  misc_feature (1)..(159): NCBI GI NO: 30687594 NR Description: tetrahydrofolate dehydrogenase/cyclohydrolase
  misc_feature (1)..(157): NCBI GI NO: 9992889 NR Description: C1-THFS protein [Yarrowia lipolytica]
  misc_feature (1)..(159): NCBI GI NO: 32405166 NR Description: hypothetical protein [Neurospora crassa]
  misc_feature (1)..(157): NCBI GI NO: 23001349 NR Description: hypothetical protein [Magnetococcus sp. MC-1]
MKGREPLFLPCTPKGCLELLARSGVKIKGQRAVVVGRSNIVGLPVSLLLLKADATVTTVHSHTKDPEAIIREADIVIAACGQAHMIKGNWIKPGAAVIDVGTNAVSDPSKKSGYRLVGDVDFAEASKVAGFITPVPGGVGPMTVAMLLRNTVDGAKRVFGE

SEQ ID NO: 941 - DNA, 948 bp, Arabidopsis thaliana
  misc_feature (1)..(948): Ceres Seq. ID no. 13488006
atagccagatagagagatcctggagaaagcttaaacctaacaatttctctcagagtgttatcatcaaaagattcttggtctccgatccagtcacctgaagattctccgagcttcttttgaccacacactttcaatggcggatgctgtgaacgctcaaactccatcgctctccgagcaatatcatttggagaaagaagtgaagcaagacacaagtgcaaagcctgttgaagtgaaagaggtggcaccagaagttactacacaagctgaagaggttaagacggagcaagctaaggaagaatctcctgttgaggaagcggtttctgtagttgaagagaagtctgaatctgctcctgaatcaacggaagtggcttctgaggctcctgctgcagcggaagacaatgctgaagagactcctgctgctgctgaagaaaataatgacgaaaacgctagtgaagaagttgctgaagaaacccctgatgagatcaagcttgagacagctcctgctgatttccgtttccctacaacaaaccaaacaaggcattgtttcactcgctacgttgaatatcacagatgtgtagctgctaagggtgatgatgctccagaatgcgataagtttgcaaagttttatcgatctctttgccccagcgaatgggttgataggtggaacgagcaaagagaaaatggaacattccctggtcctctaccctgaagaaaaatcatattgccatcattcctcttttgctgttaccttcatgagattacactgcagagtttaataagattttacaaaaccagcacttctggttcccatcatcataaaatgtgagaatttaacaaaactttatgaatctcaaatttttctcttatataagtttttgaggatcatctgatttttctgaattgttgttcttcctgattatgctttactatggcaagcttcaaattctt

SEQ ID NO: 942 - protein, 191 aa, Arabidopsis thaliana
  peptide (1)..(191): Ceres Seq. ID no. 13488007
  misc_feature (116)..(189): Pfam Name: Pfam Description:  Cytochrome oxidase c subunit VIb
  misc_feature (1)..(191): NCBI GI NO: 15219886 NR Description: cytochrome c oxidase subunit -related
  misc_feature (1)..(191): NCBI GI NO: 21554378 NR Description: cytochrome c oxidase subunit, putative
  misc_feature (28)..(190): NCBI GI NO: 4586449 NR Description: cytochrome c oxidase subunit 6b-1
  misc_feature (30)..(190): NCBI GI NO: 34906824 NR Description: putative cytochrome c oxidase subunit 6b-1
  misc_feature (39)..(190): NCBI GI NO: 22204116 NR Description: putative cytochrome c oxidase subunit
  misc_feature (115)..(190): NCBI GI NO: 18424030 NR Description: expressed protein [Arabidopsis thaliana]
  misc_feature (115)..(190): NCBI GI NO: 21592329 NR Description: cytochrome c oxidase subunit 6b
  misc_feature (116)..(190): NCBI GI NO: 9967162 NR Description: cytochrome c oxidase subunit 6b
  misc_feature (117)..(190): NCBI GI NO: 15234375 NR Description: hypothetical protein [Arabidopsis thaliana]
  misc_feature (117)..(189): NCBI GI NO: 32401320 NR Description: cytochrome c oxidase subunit 6b-1
MADAVNAQTPSLSEQYHLEKEVKQDTSAKPVEVKEVAPEVTTQAEEVKTEQAKEESPVEEAVSVVEEKSESAPESTEVASEAPAAAEDNAEETPAAAEENNDENASEEVAEETPDEIKLETAPADFRFPTTNQTRHCFTRYVEYHRCVAAKGDDAPECDKFAKFYRSLCPSEWVDRWNEQRENGTFPGPLP

SEQ ID NO: 943 - DNA, 751 bp, Arabidopsis thaliana
  misc_feature (1)..(751): Ceres Seq. ID no. 12340049
atttgctcattagagaacagagaaaaaaaaaacaatggcaactcaagccgccgggatcttcaactccgccataacaaccgccgcaacctccggcgtcaagaaactccactttttctcaacaacccaccgtcccaaatccctctccttcaccaaaaccgcaatccgctccgagaaaacagattcctccgccgccgctgctgcagcccccgccacgaaagaagctcccgtgggattcacgccaccgcagctagacccaaacacaccgtctccgatcttcgctggaagcaccggtggtcttctacgtaaagcgcaagtggaagagttctacgttatcacgtggaactcaccgaaagaacagatctttgagatgccgacagggaggagcagcgatcatgagagaaggtccgaatcttctgaagctagcgaggaaagagcagtgtttagctttggggacaaggcttagatccaagtacaagatcacttaccagttttacagagtgtttcctaacggtgaggttcaatatcttcatcctaaagatggtgtttatccagagaaggcgaatccaggaagagaaggtgttggtctcaacatgagatctattgggaaaaatgttagtcccattgaagttaagtttactggcaaacaaagttatgatttgtaagatctgtaaactaaaaaaaccaaaaactatgttcatgtggtgatgattatgactatgtttcatgttaatttttaatggattttgttttg

SEQ ID NO: 944 - protein, 142 aa, Arabidopsis thaliana
  peptide (1)..(142): Ceres Seq. ID no. 12340050
  misc_feature (1)..(115): NCBI GI NO: 15235503 NR Description: putative photosystem I reaction center subunit IIprecursor
  misc_feature (1)..(115): NCBI GI NO: 21595031 NR Description: putative photosystem I reaction center subunit II precursor
  misc_feature (1)..(115): NCBI GI NO: 15218708 NR Description: putative photosystem I reaction center subunit IIprecursor
  misc_feature (1)..(115): NCBI GI NO: 5732201 NR Description: photosystem I subunit II precursor
  misc_feature (1)..(115): NCBI GI NO: 72680 NR Description: photosystem I chain II precursor - spinach
  misc_feature (1)..(115): NCBI GI NO: 21293 NR Description: 20 kDa protein (AA 1-212) [Spinacia oleracea]
  misc_feature (1)..(115): NCBI GI NO: 19855891 NR Description: Photosystem I reaction center subunit II
  misc_feature (1)..(115): NCBI GI NO: 417544 NR Description: Photosystem I reaction center subunit II
  misc_feature (1)..(115): NCBI GI NO: 34787117 NR Description: putative photosystem I reaction centre PSI-D subunitprecursor
  misc_feature (1)..(115): NCBI GI NO: 131166 NR Description: Photosystem I reaction center subunit II
MATQAAGIFNSAITTAATSGVKKLHFFSTTHRPKSLSFTKTAIRSEKTDSSAAAAAAPATKEAPVGFTPPQLDPNTPSPIFAGSTGGLLRKAQVEEFYVITWNSPKEQIFEMPTGRSSDHERRSESSEASEERAVFSFGDKA

SEQ ID NO: 945 - protein, 101 aa, Arabidopsis thaliana
  peptide (1)..(101): Ceres Seq. ID no. 12340051
ICSLENREKKNNGNSSRRDLQLRHNNRRNLRRQETPLFLNNPPSQIPLLHQNRNPLRENRFLRRRCCSPRHERSSRGIHATAARPKHTVSDLRWKHRWSST

SEQ ID NO: 946 - protein, 89 aa, Arabidopsis thaliana
  peptide (1)..(89): Ceres Seq. ID no. 12340052
  misc_feature (1)..(88): Pfam Name: Pfam Description:  PsaD
  misc_feature (1)..(89): NCBI GI NO: 15235503 NR Description: putative photosystem I reaction center subunit IIprecursor
  misc_feature (1)..(89): NCBI GI NO: 21595031 NR Description: putative photosystem I reaction center subunit II precursor
  misc_feature (1)..(89): NCBI GI NO: 15218708 NR Description: putative photosystem I reaction center subunit IIprecursor
  misc_feature (1)..(89): NCBI GI NO: 5732201 NR Description: photosystem I subunit II precursor
  misc_feature (1)..(89): NCBI GI NO: 72680 NR Description: photosystem I chain II precursor - spinach
  misc_feature (1)..(89): NCBI GI NO: 21293 NR Description: 20 kDa protein (AA 1-212) [Spinacia oleracea]
  misc_feature (1)..(89): NCBI GI NO: 19855891 NR Description: Photosystem I reaction center subunit II
  misc_feature (1)..(89): NCBI GI NO: 417544 NR Description: Photosystem I reaction center subunit II
  misc_feature (1)..(89): NCBI GI NO: 34787117 NR Description: putative photosystem I reaction centre PSI-D subunitprecursor
  misc_feature (1)..(89): NCBI GI NO: 131166 NR Description: Photosystem I reaction center subunit II
MREGPNLLKLARKEQCLALGTRLRSKYKITYQFYRVFPNGEVQYLHPKDGVYPEKANPGREGVGLNMRSIGKNVSPIEVKFTGKQSYDL

SEQ ID NO: 947 - DNA, 885 bp, Arabidopsis thaliana
  misc_feature (1)..(885): Ceres Seq. ID no. 13492248
aaaaaaaaaataatatcgagacgagacgggtttgtttcttctctctatctctatatctaccaaaatcctttgccccccgaatctagttctctcgatcgaccctgtgacgatggctaataaccaagcaagccttcttctgcagaaacagcttaaagatctgtgtaagaaacctgttgatggtttctctgctggcctcgttgatgagaagaacgttttccaatggagcgtctctattatgggtcctcctgatactttgtatgaaggtggcttttttaatgcaattatgtcgtttccggagaattatccagtttcaccaccaactgtgacgtttacctcggagatgtggcatcctaatgtttattctgatggaaaagtttgcatttctattcttcatcctcctggtgatgatcctcatggatacgagcttgcctctgaacgttggacccctgtccatacggtagaaagcattgtgttgagtatcatatcgatgctctcaggtcccaacgatgagtcaccagcgaatgtggaagctgcaaaggaatggagagacaacagagcagagtttaggaagaaagtgagtcgctgtgtgagaagatcgcaagagatgctatgaacatctctccagcgtttttttcgtgttgtagaaatatcgattctaatcttatgagaaagcctaagcagaaccaaccatcttcaagcagcagccagatgaatctgactttgcaaaagcttctctttctttttcctttttgggttttgttctctaaggtttggtttggaatattggtgtggaatcaaatccgctccatattttaggattatattattgcactcgttaatggattcgtttgatctggctttttaactttattctggttttgggtt

SEQ ID NO: 948 - protein, 167 aa, Arabidopsis thaliana
  peptide (1)..(167): Ceres Seq. ID no. 13492249
  misc_feature (1)..(167): NCBI GI NO: 18410268 NR Description: ubiquitin-conjugating enzyme 14 (UBC14)
  misc_feature (1)..(166): NCBI GI NO: 19347846 NR Description: putative E2, ubiquitin-conjugating enzyme UBC7
  misc_feature (1)..(166): NCBI GI NO: 28973769 NR Description: putative E2, ubiquitin-conjugating enzyme UBC7
  misc_feature (4)..(166): NCBI GI NO: 31088843 NR Description: Ubiquitin-conjugating enzyme E2 7
  misc_feature (3)..(166): NCBI GI NO: 18408206 NR Description: ubiquitin-conjugating enzyme 13 (UBC13)
  misc_feature (4)..(167): NCBI GI NO: 34908132 NR Description: putative Ubiquitin carrier protein UBC7
  misc_feature (4)..(167): NCBI GI NO: 7437989 NR Description: ubiquitin-conjugating enzyme E2 - maize
  misc_feature (5)..(166): NCBI GI NO: 7437988 NR Description: ubiquitin-conjugating enzyme - maize
  misc_feature (34)..(166): NCBI GI NO: 18424219 NR Description: ubiquitin-conjugating enzyme 7 (UBC7)
  misc_feature (21)..(167): NCBI GI NO: 136647 NR Description: Ubiquitin-conjugating enzyme E2 7
MANNQASLLLQKQLKDLCKKPVDGFSAGLVDEKNVFQWSVSIMGPPDTLYEGGFFNAIMSFPENYPVSPPTVTFTSEMWHPNVYSDGKVCISILHPPGDDPHGYELASERWTPVHTVESIVLSIISMLSGPNDESPANVEAAKEWRDNRAEFRKKVSRCVRRSQEML

SEQ ID NO: 949 - protein, 125 aa, Arabidopsis thaliana
  peptide (1)..(125): Ceres Seq. ID no. 13492250
  misc_feature (1)..(125): NCBI GI NO: 18410268 NR Description: ubiquitin-conjugating enzyme 14 (UBC14)
  misc_feature (1)..(124): NCBI GI NO: 19347846 NR Description: putative E2, ubiquitin-conjugating enzyme UBC7
  misc_feature (1)..(124): NCBI GI NO: 28973769 NR Description: putative E2, ubiquitin-conjugating enzyme UBC7
  misc_feature (1)..(124): NCBI GI NO: 31088843 NR Description: Ubiquitin-conjugating enzyme E2 7
  misc_feature (1)..(124): NCBI GI NO: 18408206 NR Description: ubiquitin-conjugating enzyme 13 (UBC13)
  misc_feature (1)..(125): NCBI GI NO: 34908132 NR Description: putative Ubiquitin carrier protein UBC7
  misc_feature (1)..(125): NCBI GI NO: 7437989 NR Description: ubiquitin-conjugating enzyme E2 - maize
  misc_feature (1)..(124): NCBI GI NO: 7437988 NR Description: ubiquitin-conjugating enzyme - maize
  misc_feature (1)..(124): NCBI GI NO: 18424219 NR Description: ubiquitin-conjugating enzyme 7 (UBC7)
  misc_feature (1)..(125): NCBI GI NO: 136647 NR Description: Ubiquitin-conjugating enzyme E2 7
MGPPDTLYEGGFFNAIMSFPENYPVSPPTVTFTSEMWHPNVYSDGKVCISILHPPGDDPHGYELASERWTPVHTVESIVLSIISMLSGPNDESPANVEAAKEWRDNRAEFRKKVSRCVRRSQEML

SEQ ID NO: 950 - protein, 109 aa, Arabidopsis thaliana
  peptide (1)..(109): Ceres Seq. ID no. 13492251
  misc_feature (1)..(109): NCBI GI NO: 18410268 NR Description: ubiquitin-conjugating enzyme 14 (UBC14)
  misc_feature (1)..(108): NCBI GI NO: 19347846 NR Description: putative E2, ubiquitin-conjugating enzyme UBC7
  misc_feature (1)..(108): NCBI GI NO: 28973769 NR Description: putative E2, ubiquitin-conjugating enzyme UBC7
  misc_feature (1)..(108): NCBI GI NO: 31088843 NR Description: Ubiquitin-conjugating enzyme E2 7
  misc_feature (1)..(108): NCBI GI NO: 18408206 NR Description: ubiquitin-conjugating enzyme 13 (UBC13)
  misc_feature (1)..(109): NCBI GI NO: 34908132 NR Description: putative Ubiquitin carrier protein UBC7
  misc_feature (1)..(109): NCBI GI NO: 7437989 NR Description: ubiquitin-conjugating enzyme E2 - maize
  misc_feature (1)..(108): NCBI GI NO: 7437988 NR Description: ubiquitin-conjugating enzyme - maize
  misc_feature (1)..(108): NCBI GI NO: 18424219 NR Description: ubiquitin-conjugating enzyme 7 (UBC7)
  misc_feature (1)..(109): NCBI GI NO: 136647 NR Description: Ubiquitin-conjugating enzyme E2 7
MSFPENYPVSPPTVTFTSEMWHPNVYSDGKVCISILHPPGDDPHGYELASERWTPVHTVESIVLSIISMLSGPNDESPANVEAAKEWRDNRAEFRKKVSRCVRRSQEML

SEQ ID NO: 951 - DNA, 1348 bp, Arabidopsis thaliana
  misc_feature (1)..(1348): Ceres Seq. ID no. 12579524
acggagattgtaacaaggaaaccgccgtcgccggatctgatagtgcatatccatgaagtagaagacgaagaaacttactttctgatcttagaacggagtatatgtacagaagattcgcgtccctcaatttttgatctcaagggtcgggtttacctttttttccttcttatttttggtggctttgcgttttctcattcgacgatttctggatttggggatttcaaaaccatgaggaagaagctcgatactcggttcccagctgctcgtattaaaaagattatgcaagctgatgaggatgttggcaagatagctttggcagtgcctgtcttagtctcaaaatctttggagttgttcttgcaagacctttgtgatcgtacatatgaaattacccttgaaagaggtgccaagactgtgagctcattgcacctaaaacattgtgtggaaagatataacgtgtttgattttctgagggaagttgtgagtaaggtgcctgactatggccattcccaagggcaatttcatatgtacgatcacaaaggtcttggaagaacaagaagatgtctggtggtgtacttggtggtgctacagctgcttgggttgtgtttgaattgatggagtaccatcttctcactctgctttgccacgtgatgattgttgttctcgctgtgctgtttttgtggtctaatgccactatgttcattaacaagtccccaccaaagattcctgaagttcatatccctgaagaacctattcttcagcttgcgtctgggctcagaatcgagatcaaccgtggattctcttctctccgtgaaattgcatcaggaagggatctcaagaaattcctcattgctattgccgggttatgggttctctcaatcttgggcggttgcttcgacttcttgacattggcatacatagctcttgtgttgctcttcacggttcctcttgcctacgacaagtatgaagacaaagtcgacccattaggtgagaaagcaatgatcgagctcaagaagcagtatgcagtgttggatgagaaggtgttgagcaagatcccacttgggccgttgaagaacaagaagaaagattaggggtttacacaaggttgtccgtggctagcaaaacgggtgttgtgaaatggtatcgaagtaatgtgttttgggcgtttttttaggtggctctttcggttatgtgaatgaacttggaattttcctgactggtttgttctgttgtttatgtcattgttgatcagcgtcgagggataaaagtagtgatatttcttctctctctaagcctctatataactaagaatttcaagatatttgaattttgcaatctcgtggttaatgtt

SEQ ID NO: 952 - protein, 203 aa, Arabidopsis thaliana
  peptide (1)..(203): Ceres Seq. ID no. 12579525
  misc_feature (83)..(147): Pfam Name: CBF/NF-Y Pfam Description: Histone-like transcription factor
  misc_feature (77)..(186): NCBI GI NO: 30682195 NR Description: transcription factor Hap5a, putative
  misc_feature (88)..(186): NCBI GI NO: 12321975 NR Description: unknown protein; 69004-67516
  misc_feature (77)..(186): NCBI GI NO: 18481626 NR Description: repressor protein [Zea mays]
  misc_feature (77)..(188): NCBI GI NO: 18481624 NR Description: repressor protein [Oryza sativa]
  misc_feature (78)..(186): NCBI GI NO: 18426973 NR Description: DR1-associated protein 1
  misc_feature (78)..(186): NCBI GI NO: 21313424 NR Description: RIKEN cDNA 2310074H19 [Mus musculus]
  misc_feature (78)..(186): NCBI GI NO: 27661225 NR Description: similar to RIKEN cDNA 2310074H19
  misc_feature (78)..(165): NCBI GI NO: 28279647 NR Description: Similar to Dr1 associated protein 1
  misc_feature (78)..(165): NCBI GI NO: 10242351 NR Description: NC2alpha [Drosophila melanogaster]
  misc_feature (78)..(165): NCBI GI NO: 24657218 NR Description: CG10318-PA [Drosophila melanogaster]
TEIVTRKPPSPDLIVHIHEVEDEETYFLILERSICTEDSRPSIFDLKGRVYLFFLLIFGGFAFSHSTISGFGDFKTMRKKLDTRFPAARIKKIMQADEDVGKIALAVPVLVSKSLELFLQDLCDRTYEITLERGAKTVSSLHLKHCVERYNVFDFLREVVSKVPDYGHSQGQFHMYDHKGLGRTRRCLVVYLVVLQLLGLCLN

SEQ ID NO: 953 - protein, 176 aa, Arabidopsis thaliana
  peptide (1)..(176): Ceres Seq. ID no. 12579526
  misc_feature (1)..(176): NCBI GI NO: 15236556 NR Description: putative protein; protein id: At4g23630
  misc_feature (1)..(176): NCBI GI NO: 15237093 NR Description: putative protein; protein id: At4g11220
  misc_feature (1)..(176): NCBI GI NO: 15238125 NR Description: putative protein; protein id: At5g41600
  misc_feature (1)..(174): NCBI GI NO: 34909318 NR Description: OSJNBb0021A09.5
  misc_feature (1)..(174): NCBI GI NO: 34904202 NR Description: P0492F05.25
  misc_feature (1)..(176): NCBI GI NO: 15222616 NR Description: hypothetical protein; protein id: At1g64090
  misc_feature (1)..(175): NCBI GI NO: 18406991 NR Description: expressed protein; protein id: At2g46170
  misc_feature (1)..(166): NCBI GI NO: 15234108 NR Description: hypothetical protein; protein id: At4g01230.1
  misc_feature (1)..(176): NCBI GI NO: 34897094 NR Description: unknown protein
  misc_feature (1)..(176): NCBI GI NO: 18398810 NR Description: expressed protein; protein id: At3g10260
MSGGVLGGATAAWVVFELMEYHLLTLLCHVMIVVLAVLFLWSNATMFINKSPPKIPEVHIPEEPILQLASGLRIEINRGFSSLREIASGRDLKKFLIAIAGLWVLSILGGCFDFLTLAYIALVLLFTVPLAYDKYEDKVDPLGEKAMIELKKQYAVLDEKVLSKIPLGPLKNKKKD

SEQ ID NO: 954 - protein, 158 aa, Arabidopsis thaliana
  peptide (1)..(158): Ceres Seq. ID no. 12579527
  misc_feature (1)..(158): NCBI GI NO: 15236556 NR Description: putative protein; protein id: At4g23630
  misc_feature (1)..(158): NCBI GI NO: 15237093 NR Description: putative protein; protein id: At4g11220
  misc_feature (1)..(158): NCBI GI NO: 15238125 NR Description: putative protein; protein id: At5g41600
  misc_feature (1)..(156): NCBI GI NO: 34909318 NR Description: OSJNBb0021A09.5
  misc_feature (1)..(156): NCBI GI NO: 34904202 NR Description: P0492F05.25
  misc_feature (1)..(158): NCBI GI NO: 15222616 NR Description: hypothetical protein; protein id: At1g64090
  misc_feature (1)..(157): NCBI GI NO: 18406991 NR Description: expressed protein; protein id: At2g46170
  misc_feature (1)..(148): NCBI GI NO: 15234108 NR Description: hypothetical protein; protein id: At4g01230.1
  misc_feature (1)..(158): NCBI GI NO: 34897094 NR Description: unknown protein
  misc_feature (1)..(158): NCBI GI NO: 18398810 NR Description: expressed protein; protein id: At3g10260
MEYHLLTLLCHVMIVVLAVLFLWSNATMFINKSPPKIPEVHIPEEPILQLASGLRIEINRGFSSLREIASGRDLKKFLIAIAGLWVLSILGGCFDFLTLAYIALVLLFTVPLAYDKYEDKVDPLGEKAMIELKKQYAVLDEKVLSKIPLGPLKNKKKD

SEQ ID NO: 955 - DNA, 939 bp, Arabidopsis thaliana
  misc_feature (1)..(939): Ceres Seq. ID no. 12393372
ataaaaaataagtaaccaagaaaataagtaacggcttcttcgatcatttatatgtttatcctaaacttataagaaagcttaataatttcagtgttctcactcatttccaatctgtgatatatttctcatgtctcatcagacagtagcgctagcctctaaggctaagtctcctaaacccaaaagaggaaagttagataaggataaaatgactgcattggagaaacatgtttccttcttcgacaggaacaaagacggcaccgtttatccatgggaaacctaccaaggatttagagcgctcgggacagggcgtcttttggcggcttttgttgctatattcatcaacatgggactcagcaagaaaactcgtccgggaaagggattctcgccgttgtttccaatagacgtgaagaatagtcacctttgcatgcacggtagtgacaccgacgtctatgacgatgacggaagatttgtggaatcaaaattcgaggagatattcaacaagcatgctcgcacacataaagatgctctcactgcagaggaaattcaaaaaatgcttaagactaacagggatcctttcgatatcacaggatggctttcagattatggagaatggaaaatattacatacgttagctcaagacaaaaatggtttgttatcggaaaagagcgtcagggccatctacgatggtagccttttccaccaactggagaaaaaaagatcatcttcttcctctcgtggcaagaaacaaaaactaccttaaatgtttacgtgaatcttcttatattgttatgtggagatcacataactttcgtggtttataattatataattttgtcaaataacttttgtaatgaataattacatagatcaaacactctttaaataattattgtgtatattgaaaaaaaaaaacttatcaaagtatacttcatttaagtc

SEQ ID NO: 956 - protein, 210 aa, Arabidopsis thaliana
  peptide (1)..(210): Ceres Seq. ID no. 12393373
  misc_feature (27)..(195): Pfam Name: Pfam Description:  Caleosin related protein
  misc_feature (27)..(210): NCBI GI NO: 15220687 NR Description: pollen coat EF-hand protein; protein id: At1g23240
  misc_feature (20)..(210): NCBI GI NO: 9295714 NR Description: F26F24.9 [Arabidopsis thaliana]
  misc_feature (30)..(203): NCBI GI NO: 18409649 NR Description: Ca2+-binding EF-hand common family protein
  misc_feature (30)..(203): NCBI GI NO: 21593851 NR Description: unknown [Arabidopsis thaliana]
  misc_feature (21)..(201): NCBI GI NO: 18409651 NR Description: Ca2+-binding EF-hand common family protein
  misc_feature (21)..(201): NCBI GI NO: 21617961 NR Description: unknown [Arabidopsis thaliana]
  misc_feature (52)..(210): NCBI GI NO: 15220688 NR Description: Ca2+-binding EF-hand common family protein
  misc_feature (7)..(200): NCBI GI NO: 34902470 NR Description: Putative abscisic acid-induced protein - rice
  misc_feature (20)..(203): NCBI GI NO: 37652831 NR Description: calcium binding protein [Fagus sylvatica]
  misc_feature (27)..(197): NCBI GI NO: 34538473 NR Description: caleosin 1 [Hordeum vulgare]
MSHQTVALASKAKSPKPKRGKLDKDKMTALEKHVSFFDRNKDGTVYPWETYQGFRALGTGRLLAAFVAIFINMGLSKKTRPGKGFSPLFPIDVKNSHLCMHGSDTDVYDDDGRFVESKFEEIFNKHARTHKDALTAEEIQKMLKTNRDPFDITGWLSDYGEWKILHTLAQDKNGLLSEKSVRAIYDGSLFHQLEKKRSSSSSRGKKQKLP

SEQ ID NO: 957 - protein, 184 aa, Arabidopsis thaliana
  peptide (1)..(184): Ceres Seq. ID no. 12393374
  misc_feature (1)..(169): Pfam Name: Pfam Description:  Caleosin related protein
  misc_feature (1)..(184): NCBI GI NO: 15220687 NR Description: pollen coat EF-hand protein; protein id: At1g23240
  misc_feature (1)..(184): NCBI GI NO: 9295714 NR Description: F26F24.9 [Arabidopsis thaliana]
  misc_feature (4)..(177): NCBI GI NO: 18409649 NR Description: Ca2+-binding EF-hand common family protein
  misc_feature (4)..(177): NCBI GI NO: 21593851 NR Description: unknown [Arabidopsis thaliana]
  misc_feature (1)..(175): NCBI GI NO: 18409651 NR Description: Ca2+-binding EF-hand common family protein
  misc_feature (1)..(175): NCBI GI NO: 21617961 NR Description: unknown [Arabidopsis thaliana]
  misc_feature (26)..(184): NCBI GI NO: 15220688 NR Description: Ca2+-binding EF-hand common family protein
  misc_feature (1)..(174): NCBI GI NO: 34902470 NR Description: Putative abscisic acid-induced protein - rice
  misc_feature (1)..(177): NCBI GI NO: 37652831 NR Description: calcium binding protein [Fagus sylvatica]
  misc_feature (1)..(171): NCBI GI NO: 34538473 NR Description: caleosin 1 [Hordeum vulgare]
MTALEKHVSFFDRNKDGTVYPWETYQGFRALGTGRLLAAFVAIFINMGLSKKTRPGKGFSPLFPIDVKNSHLCMHGSDTDVYDDDGRFVESKFEEIFNKHARTHKDALTAEEIQKMLKTNRDPFDITGWLSDYGEWKILHTLAQDKNGLLSEKSVRAIYDGSLFHQLEKKRSSSSSRGKKQKLP

SEQ ID NO: 958 - protein, 138 aa, Arabidopsis thaliana
  peptide (1)..(138): Ceres Seq. ID no. 12393375
  misc_feature (1)..(123): Pfam Name: Pfam Description:  Caleosin related protein
  misc_feature (1)..(138): NCBI GI NO: 15220687 NR Description: pollen coat EF-hand protein; protein id: At1g23240
  misc_feature (1)..(138): NCBI GI NO: 9295714 NR Description: F26F24.9 [Arabidopsis thaliana]
  misc_feature (1)..(131): NCBI GI NO: 18409649 NR Description: Ca2+-binding EF-hand common family protein
  misc_feature (1)..(131): NCBI GI NO: 21593851 NR Description: unknown [Arabidopsis thaliana]
  misc_feature (1)..(129): NCBI GI NO: 18409651 NR Description: Ca2+-binding EF-hand common family protein
  misc_feature (1)..(129): NCBI GI NO: 21617961 NR Description: unknown [Arabidopsis thaliana]
  misc_feature (1)..(138): NCBI GI NO: 15220688 NR Description: Ca2+-binding EF-hand common family protein
  misc_feature (1)..(128): NCBI GI NO: 34902470 NR Description: Putative abscisic acid-induced protein - rice
  misc_feature (1)..(131): NCBI GI NO: 37652831 NR Description: calcium binding protein [Fagus sylvatica]
  misc_feature (1)..(125): NCBI GI NO: 34538473 NR Description: caleosin 1 [Hordeum vulgare]
MGLSKKTRPGKGFSPLFPIDVKNSHLCMHGSDTDVYDDDGRFVESKFEEIFNKHARTHKDALTAEEIQKMLKTNRDPFDITGWLSDYGEWKILHTLAQDKNGLLSEKSVRAIYDGSLFHQLEKKRSSSSSRGKKQKLP

SEQ ID NO: 959 - DNA, 562 bp, Arabidopsis thaliana
  misc_feature (1)..(562): Ceres Seq. ID no. 12420983
  misc_feature (339)..(339): n is a, c, t, g, unknown, or other
atttcattttcgttttcactttctccgaacatccaaaagcttgtagcttgctcctcaaatcttcttgaaaaatgaaggttgccgctgctttcctcctcgccgttttgggcggaaacgctaatccttcagccgagaatatcaaagatatcatcggagctgttggtgctgatgttgatggagagagcattgagcttctattgaaagaagtgagtggtaaggacattgctgagctgattgcttctggtagggagaaattagcgtctgtgccatctggtggtggtgtggctgtttcagctgctccatcaagcggtggtggtggtgctgctgctgctgcccctncggagaagaaagaagccaagaaggaagagaaagaagagtctgatgatgacatgggattcagtctcttcgagtaaggtttttgtccccacggaaaggagtcgagatttgattttttgttctcttagtggttctggtttttgctcctctttgtagttcggtgttattaaagattcttggattacgaattttactcgttagataatgaagcaagaagagttttttc

SEQ ID NO: 960 - protein, 113 aa, Arabidopsis thaliana
  peptide (1)..(113): Ceres Seq. ID no. 12420984
  misc_feature (17)..(112): Pfam Name: Pfam Description:  60s Acidic ribosomal protein
  misc_feature (1)..(113): NCBI GI NO: 15230454 NR Description: acidic ribosomal protein P2 -like
  misc_feature (1)..(113): NCBI GI NO: 15226231 NR Description: 60S acidic ribosomal protein P2
  misc_feature (1)..(113): NCBI GI NO: 24473796 NR Description: 60s acidic ribosomal protein [Prunus dulcis]
  misc_feature (1)..(113): NCBI GI NO: 15226230 NR Description: 60S acidic ribosomal protein P2
  misc_feature (1)..(113): NCBI GI NO: 21593095 NR Description: 60S acidic ribosomal protein P2
  misc_feature (1)..(113): NCBI GI NO: 730583 NR Description: 60S acidic ribosomal protein P2
  misc_feature (1)..(113): NCBI GI NO: 32400796 NR Description: acidic ribosomal protein [Triticum aestivum]
  misc_feature (1)..(113): NCBI GI NO: 1173073 NR Description: 60S ACIDIC RIBOSOMAL PROTEIN P2A (P2)
  misc_feature (1)..(113): NCBI GI NO: 4204372 NR Description: acidic ribosomal protein P2a-2 [Zea mays]
  misc_feature (1)..(113): NCBI GI NO: 899610 NR Description: acidic ribosomal protein P2
  misc_feature (90)..(90): Xaa is any aa, unknown or other
MKVAAAFLLAVLGGNANPSAENIKDIIGAVGADVDGESIELLLKEVSGKDIAELIASGREKLASVPSGGGVAVSAAPSSGGGGAAAAAPXEKKEAKKEEKEESDDDMGFSLFE

SEQ ID NO: 961 - DNA, 895 bp, Arabidopsis thaliana
  misc_feature (1)..(895): Ceres Seq. ID no. 12324013
gagatagagagaaagagaagcagttcggagaaacaatggcggtagaagacactcccaaatctgttgtaacggaagaagctaagcctaattcaatagagaatccgattgatcgataccatgaggaaggtgatgatgccgaagaaggagagatcgccggaggagaaggagacggaaacgttgacgaatcgagcaaatccggtgttcctgaatcgcatcctctggaacattcatggactttctggttcgataatcctgctgtgaaatcgaaacaaacctcttggggaagttccttgcgacccgtgtttacgttttcaactgttgaggaattttggagtttgtacaacaacatgaagcatccgagcaagttagctcacggagctgacttctactgtttcaaacacatcattgaacctaagtgggaggatcctatttgtgctaatggaggaaaatggactatgactttccctaaggagaagtctgataagagctggctctacactttgcttgcattgattggagagcagtttgatcatggagatgaaatatgtggagcagttgtcaacattagaggaaagcaagaaaggatatctatttggactaaaaatgcttcaaacgaagctgctcaggtgagcattggaaaacaatggaaggagtttctcgattacaacaacagcataggtttcatcatccatgaggatgcgaagaagctcgacaggaatgcaaagaacgcttacaccgcttgaaacctctcaaatctttgcattgtttcaattacagttttgtatgtgagagatctctatttatctaaacatgacttgacagtctgtctttgctagtgttgattgttcacgaagctctaacatttcatttagtaatatattagtatggttcttca

SEQ ID NO: 962 - protein, 246 aa, Arabidopsis thaliana
  peptide (1)..(246): Ceres Seq. ID no. 12324014
  misc_feature (17)..(246): Pfam Name: Pfam Description:  Eukaryotic initiation factor 4E
  misc_feature (12)..(246): NCBI GI NO: 15236735 NR Description: translation initiation factor eIF4E
  misc_feature (19)..(244): NCBI GI NO: 37813067 NR Description: eukaryotic translation initiation factor 4E
  misc_feature (40)..(245): NCBI GI NO: 32698524 NR Description: eukaryotic translation initiation factor 4E
  misc_feature (25)..(245): NCBI GI NO: 34905982 NR Description: eukaryotic translation initiation factor 4E
  misc_feature (12)..(245): NCBI GI NO: 25176242 NR Description: eucaryotic initiation factor 4E [Capsicum annuum]
  misc_feature (12)..(245): NCBI GI NO: 38565045 NR Description: eukaryotic translation initiation factor 4E
  misc_feature (12)..(245): NCBI GI NO: 25176246 NR Description: eucaryotic initiation factor 4E [Capsicum annuum]
  misc_feature (12)..(245): NCBI GI NO: 25176244 NR Description: eucaryotic initiation factor 4E [Capsicum annuum]
  misc_feature (40)..(245): NCBI GI NO: 7862169 NR Description: eIF4E [Lycopersicon esculentum]
  misc_feature (12)..(245): NCBI GI NO: 38565051 NR Description: eukaryotic translation initiation factor 4E
DREKEKQFGETMAVEDTPKSVVTEEAKPNSIENPIDRYHEEGDDAEEGEIAGGEGDGNVDESSKSGVPESHPLEHSWTFWFDNPAVKSKQTSWGSSLRPVFTFSTVEEFWSLYNNMKHPSKLAHGADFYCFKHIIEPKWEDPICANGGKWTMTFPKEKSDKSWLYTLLALIGEQFDHGDEICGAVVNIRGKQERISIWTKNASNEAAQVSIGKQWKEFLDYNNSIGFIIHEDAKKLDRNAKNAYTA

SEQ ID NO: 963 - protein, 235 aa, Arabidopsis thaliana
  peptide (1)..(235): Ceres Seq. ID no. 12324015
  misc_feature (6)..(235): Pfam Name: Pfam Description:  Eukaryotic initiation factor 4E
  misc_feature (1)..(235): NCBI GI NO: 15236735 NR Description: translation initiation factor eIF4E
  misc_feature (8)..(233): NCBI GI NO: 37813067 NR Description: eukaryotic translation initiation factor 4E
  misc_feature (29)..(234): NCBI GI NO: 32698524 NR Description: eukaryotic translation initiation factor 4E
  misc_feature (14)..(234): NCBI GI NO: 34905982 NR Description: eukaryotic translation initiation factor 4E
  misc_feature (1)..(234): NCBI GI NO: 25176242 NR Description: eucaryotic initiation factor 4E [Capsicum annuum]
  misc_feature (1)..(234): NCBI GI NO: 38565045 NR Description: eukaryotic translation initiation factor 4E
  misc_feature (1)..(234): NCBI GI NO: 25176246 NR Description: eucaryotic initiation factor 4E [Capsicum annuum]
  misc_feature (1)..(234): NCBI GI NO: 25176244 NR Description: eucaryotic initiation factor 4E [Capsicum annuum]
  misc_feature (29)..(234): NCBI GI NO: 7862169 NR Description: eIF4E [Lycopersicon esculentum]
  misc_feature (1)..(234): NCBI GI NO: 38565051 NR Description: eukaryotic translation initiation factor 4E
MAVEDTPKSVVTEEAKPNSIENPIDRYHEEGDDAEEGEIAGGEGDGNVDESSKSGVPESHPLEHSWTFWFDNPAVKSKQTSWGSSLRPVFTFSTVEEFWSLYNNMKHPSKLAHGADFYCFKHIIEPKWEDPICANGGKWTMTFPKEKSDKSWLYTLLALIGEQFDHGDEICGAVVNIRGKQERISIWTKNASNEAAQVSIGKQWKEFLDYNNSIGFIIHEDAKKLDRNAKNAYTA

SEQ ID NO: 964 - protein, 131 aa, Arabidopsis thaliana
  peptide (1)..(131): Ceres Seq. ID no. 12324016
  misc_feature (1)..(131): Pfam Name: Pfam Description:  Eukaryotic initiation factor 4E
  misc_feature (1)..(131): NCBI GI NO: 15236735 NR Description: translation initiation factor eIF4E
  misc_feature (1)..(129): NCBI GI NO: 37813067 NR Description: eukaryotic translation initiation factor 4E
  misc_feature (1)..(130): NCBI GI NO: 32698524 NR Description: eukaryotic translation initiation factor 4E
  misc_feature (1)..(130): NCBI GI NO: 34905982 NR Description: eukaryotic translation initiation factor 4E
  misc_feature (1)..(130): NCBI GI NO: 25176242 NR Description: eucaryotic initiation factor 4E [Capsicum annuum]
  misc_feature (1)..(130): NCBI GI NO: 38565045 NR Description: eukaryotic translation initiation factor 4E
  misc_feature (1)..(130): NCBI GI NO: 25176246 NR Description: eucaryotic initiation factor 4E [Capsicum annuum]
  misc_feature (1)..(130): NCBI GI NO: 25176244 NR Description: eucaryotic initiation factor 4E [Capsicum annuum]
  misc_feature (1)..(130): NCBI GI NO: 7862169 NR Description: eIF4E [Lycopersicon esculentum]
  misc_feature (1)..(130): NCBI GI NO: 38565051 NR Description: eukaryotic translation initiation factor 4E
MKHPSKLAHGADFYCFKHIIEPKWEDPICANGGKWTMTFPKEKSDKSWLYTLLALIGEQFDHGDEICGAVVNIRGKQERISIWTKNASNEAAQVSIGKQWKEFLDYNNSIGFIIHEDAKKLDRNAKNAYTA

SEQ ID NO: 965 - DNA, 1325 bp, Arabidopsis thaliana
  misc_feature (1)..(1325): Ceres Seq. ID no. 12562714
acgaaaggaaaatatgagtgaggagaagaggaagcaacacttcgtgctagtacatggtgcgtgccacggcgcatggtgctggtacaaggttaagcctcttctcgaggctttgggccatcgtgtaaccgccttagacctagctgcttccggtatagacacaaccaggtcaatcactgacatttctacatgtgaacaatattctgagccattgatgcagctaatgacttcattgccgaatgatgagaaggttgtactcgttggtcatagctttggaggtttgagtttagccttagccatggataagtttcccgataaaatctctgtctctgtcttcgtgactgcattcatgcccgacaccaaacactcaccatcgttcgtcgaggaaaaggtatatatctctttttaaagcagccaaattttgtgttctgttcttaaatccaccacctggaagtctagacggtcaaaacaacgtggtcgtccatttttagccaaaaccgttacaagattgtagccaaaattattacaaaaattgatcaacataacggttccttttggtctatatgtccgattgttcagtctagtcggacaaaatcgagatttccatttcgcagtcttttataacttgtggcttatatactataaccaattaaccatagatcatgtgttagacaatctaatgtccaagtagtgtcactttcgtggtgatgagttagtaatttgttttaacatgtttcattttcatggttgttacttcgttagaatttttaaaggtagttaattgtaataaacgtgaaaataaatatgattttttcgtaattactatgaaaaagtttgcaagcagcatgacaccagaaggatggatgggctctgagctcgagacatatggttcagataattccggcttgtctgtgttcttcagcaccgacttcatgaagcaccgtctctaccaactttctcctgtggaggatcttgagcttggattgcttctaaagaggcctagttcattgtttattaatgaattatcgaagatggagaacttttcttagaaagggtatggatctgttcctcgagcttacattgtgtgcaaagaggacaacattatctcggaagaccatcaacgatggatgatccataattatccggcgaatttagtgattgagatggaagagacggatcatatgccaatgttttgcaaacctcaagtactaagtgaccatctattggcaatcgctgacaatttctcttaaataatattttgatgaaaatgtatttggagtggatacaataaaaatgtgttctaaattaatggatctttatgaaggtcc

SEQ ID NO: 966 - protein, 134 aa, Arabidopsis thaliana
  peptide (1)..(134): Ceres Seq. ID no. 12562715
  misc_feature (39)..(129): Pfam Name: Pfam Description:  alpha/beta hydrolase fold
  misc_feature (5)..(129): NCBI GI NO: 21554666 NR Description: putative acetone-cyanohydrin lyase
  misc_feature (5)..(129): NCBI GI NO: 15227863 NR Description: putative acetone-cyanohydrin lyase
  misc_feature (5)..(129): NCBI GI NO: 15227867 NR Description: putative acetone-cyanohydrin lyase
  misc_feature (5)..(129): NCBI GI NO: 27754457 NR Description: putative acetone-cyanohydrin lyase
  misc_feature (6)..(129): NCBI GI NO: 15227861 NR Description: putative acetone-cyanohydrin lyase
  misc_feature (5)..(130): NCBI GI NO: 15227865 NR Description: putative acetone-cyanohydrin lyase
  misc_feature (11)..(129): NCBI GI NO: 14279437 NR Description: ethylene-induced esterase [Citrus sinensis]
  misc_feature (9)..(129): NCBI GI NO: 40549303 NR Description: salicylic acid-binding protein 2
  misc_feature (12)..(129): NCBI GI NO: 15235445 NR Description: hydroxynitrile lyase like protein
  misc_feature (7)..(130): NCBI GI NO: 15227859 NR Description: putative acetone-cyanohydrin lyase
RKENMSEEKRKQHFVLVHGACHGAWCWYKVKPLLEALGHRVTALDLAASGIDTTRSITDISTCEQYSEPLMQLMTSLPNDEKVVLVGHSFGGLSLALAMDKFPDKISVSVFVTAFMPDTKHSPSFVEEKVYISF

SEQ ID NO: 967 - protein, 130 aa, Arabidopsis thaliana
  peptide (1)..(130): Ceres Seq. ID no. 12562716
  misc_feature (35)..(125): Pfam Name: Pfam Description:  alpha/beta hydrolase fold
  misc_feature (1)..(125): NCBI GI NO: 21554666 NR Description: putative acetone-cyanohydrin lyase
  misc_feature (1)..(125): NCBI GI NO: 15227863 NR Description: putative acetone-cyanohydrin lyase
  misc_feature (1)..(125): NCBI GI NO: 15227867 NR Description: putative acetone-cyanohydrin lyase
  misc_feature (1)..(125): NCBI GI NO: 27754457 NR Description: putative acetone-cyanohydrin lyase
  misc_feature (2)..(125): NCBI GI NO: 15227861 NR Description: putative acetone-cyanohydrin lyase
  misc_feature (1)..(126): NCBI GI NO: 15227865 NR Description: putative acetone-cyanohydrin lyase
  misc_feature (7)..(125): NCBI GI NO: 14279437 NR Description: ethylene-induced esterase [Citrus sinensis]
  misc_feature (5)..(125): NCBI GI NO: 40549303 NR Description: salicylic acid-binding protein 2
  misc_feature (8)..(125): NCBI GI NO: 15235445 NR Description: hydroxynitrile lyase like protein
  misc_feature (3)..(126): NCBI GI NO: 15227859 NR Description: putative acetone-cyanohydrin lyase
MSEEKRKQHFVLVHGACHGAWCWYKVKPLLEALGHRVTALDLAASGIDTTRSITDISTCEQYSEPLMQLMTSLPNDEKVVLVGHSFGGLSLALAMDKFPDKISVSVFVTAFMPDTKHSPSFVEEKVYISF

SEQ ID NO: 968 - protein, 101 aa, Arabidopsis thaliana
  peptide (1)..(101): Ceres Seq. ID no. 12562717
  misc_feature (29)..(101): Pfam Name: Pfam Description:  alpha/beta hydrolase fold
  misc_feature (29)..(101): NCBI GI NO: 21554666 NR Description: putative acetone-cyanohydrin lyase
  misc_feature (29)..(101): NCBI GI NO: 15227863 NR Description: putative acetone-cyanohydrin lyase
  misc_feature (28)..(101): NCBI GI NO: 15227867 NR Description: putative acetone-cyanohydrin lyase
  misc_feature (28)..(101): NCBI GI NO: 27754457 NR Description: putative acetone-cyanohydrin lyase
  misc_feature (28)..(101): NCBI GI NO: 15227861 NR Description: putative acetone-cyanohydrin lyase
  misc_feature (30)..(101): NCBI GI NO: 15227865 NR Description: putative acetone-cyanohydrin lyase
  misc_feature (28)..(101): NCBI GI NO: 14279437 NR Description: ethylene-induced esterase [Citrus sinensis]
  misc_feature (36)..(101): NCBI GI NO: 40549303 NR Description: salicylic acid-binding protein 2
  misc_feature (29)..(101): NCBI GI NO: 15235445 NR Description: hydroxynitrile lyase like protein
  misc_feature (29)..(101): NCBI GI NO: 15227859 NR Description: putative acetone-cyanohydrin lyase
MVVTSLEFLKVVNCNKRENKYDFFVITMKKFASSMTPEGWMGSELETYGSDNSGLSVFFSTDFMKHRLYQLSPVEDLELGLLLKRPSSLFINELSKMENFS

SEQ ID NO: 969 - DNA, 739 bp, Arabidopsis thaliana
  misc_feature (1)..(739): Ceres Seq. ID no. 12394077
acactactctaaccgttttttttcttctctcaaatctcaaatctcaaaatctcaatttcttcaacaatgtcatcgaagaacggagttgttcgtagctgtttaggatcaatggacgacatcaaaaaagtcttccaacgattcgacaaaaacggcgacgggaaaatctccgtcgacgagctcaaagaagtgatccgcgctctctcaccaacagcatcaccagaagaaacagtaacgatgatgaaacaattcgatctagacggtaacggattcatagatctggacgaattcgtcgcgcttttccaaatcggaatcggaggaggaggtaataatcgaaacgacgtaagcgatttgaaagaagcgtttgagttatatgatttggatggtaatggaaggatctcggcgaaagagcttcattcagtgatgaagaatttgggtgagaagtgctctgttcaagattgtaagaagatgattagtaaagttgatattgatggtgatggttgcgttaattttgatgagtttaagaagatgatgagcaatggtggtggtgcatgaggatttggaagatttcgccggagattagattagtcgacggtgatgattcgtattagcagattaattttagtgacggcgattaaaaaccctagaagtatgtggtgattgatgaatattgattttaactatataaggttgtttctatatcttctgctctttttataattaatatgctttgttgagtgtt

SEQ ID NO: 970 - protein, 161 aa, Arabidopsis thaliana
  peptide (1)..(161): Ceres Seq. ID no. 12394078
  misc_feature (130)..(158): Pfam Name: Pfam Description:  EF hand
  misc_feature (1)..(161): NCBI GI NO: 15240340 NR Description: CALMODULIN-RELATED PROTEIN 2, TOUCH-INDUCED
  misc_feature (3)..(161): NCBI GI NO: 21618074 NR Description: calmodulin-related protein [Arabidopsis thaliana]
  misc_feature (3)..(161): NCBI GI NO: 18408502 NR Description: calmodulin-related protein; protein id: At1g66400
  misc_feature (15)..(157): NCBI GI NO: 14589311 NR Description: calcium binding protein [Sesbania rostrata]
  misc_feature (20)..(156): NCBI GI NO: 13397927 NR Description: putative calmodulin-related protein
  misc_feature (18)..(156): NCBI GI NO: 15237969 NR Description: calmodulin-like protein; protein id: At5g17470.1
  misc_feature (1)..(161): NCBI GI NO: 34895640 NR Description: OSJNBa0083M16.33
  misc_feature (16)..(160): NCBI GI NO: 6901654 NR Description: calcium-binding protein [Olea europaea]
  misc_feature (16)..(160): NCBI GI NO: 14423648 NR Description: Calcium-binding allergen Ole e 8 (PCA18/PCA23)
  misc_feature (1)..(158): NCBI GI NO: 15221781 NR Description: putative calmodulin; protein id: At1g24620.1
MSSKNGVVRSCLGSMDDIKKVFQRFDKNGDGKISVDELKEVIRALSPTASPEETVTMMKQFDLDGNGFIDLDEFVALFQIGIGGGGNNRNDVSDLKEAFELYDLDGNGRISAKELHSVMKNLGEKCSVQDCKKMISKVDIDGDGCVNFDEFKKMMSNGGGA

SEQ ID NO: 971 - protein, 147 aa, Arabidopsis thaliana
  peptide (1)..(147): Ceres Seq. ID no. 12394079
  misc_feature (116)..(144): Pfam Name: Pfam Description:  EF hand
  misc_feature (1)..(147): NCBI GI NO: 15240340 NR Description: CALMODULIN-RELATED PROTEIN 2, TOUCH-INDUCED
  misc_feature (1)..(147): NCBI GI NO: 21618074 NR Description: calmodulin-related protein [Arabidopsis thaliana]
  misc_feature (1)..(147): NCBI GI NO: 18408502 NR Description: calmodulin-related protein; protein id: At1g66400
  misc_feature (1)..(143): NCBI GI NO: 14589311 NR Description: calcium binding protein [Sesbania rostrata]
  misc_feature (6)..(142): NCBI GI NO: 13397927 NR Description: putative calmodulin-related protein
  misc_feature (4)..(142): NCBI GI NO: 15237969 NR Description: calmodulin-like protein; protein id: At5g17470.1
  misc_feature (1)..(147): NCBI GI NO: 34895640 NR Description: OSJNBa0083M16.33
  misc_feature (2)..(146): NCBI GI NO: 6901654 NR Description: calcium-binding protein [Olea europaea]
  misc_feature (2)..(146): NCBI GI NO: 14423648 NR Description: Calcium-binding allergen Ole e 8 (PCA18/PCA23)
  misc_feature (1)..(144): NCBI GI NO: 15221781 NR Description: putative calmodulin; protein id: At1g24620.1
MDDIKKVFQRFDKNGDGKISVDELKEVIRALSPTASPEETVTMMKQFDLDGNGFIDLDEFVALFQIGIGGGGNNRNDVSDLKEAFELYDLDGNGRISAKELHSVMKNLGEKCSVQDCKKMISKVDIDGDGCVNFDEFKKMMSNGGGA

SEQ ID NO: 972 - protein, 105 aa, Arabidopsis thaliana
  peptide (1)..(105): Ceres Seq. ID no. 12394080
  misc_feature (74)..(102): Pfam Name: Pfam Description:  EF hand
  misc_feature (1)..(105): NCBI GI NO: 15240340 NR Description: CALMODULIN-RELATED PROTEIN 2, TOUCH-INDUCED
  misc_feature (1)..(105): NCBI GI NO: 21618074 NR Description: calmodulin-related protein [Arabidopsis thaliana]
  misc_feature (1)..(105): NCBI GI NO: 18408502 NR Description: calmodulin-related protein; protein id: At1g66400
  misc_feature (1)..(101): NCBI GI NO: 14589311 NR Description: calcium binding protein [Sesbania rostrata]
  misc_feature (1)..(100): NCBI GI NO: 13397927 NR Description: putative calmodulin-related protein
  misc_feature (1)..(100): NCBI GI NO: 15237969 NR Description: calmodulin-like protein; protein id: At5g17470.1
  misc_feature (1)..(105): NCBI GI NO: 34895640 NR Description: OSJNBa0083M16.33
  misc_feature (1)..(104): NCBI GI NO: 6901654 NR Description: calcium-binding protein [Olea europaea]
  misc_feature (1)..(104): NCBI GI NO: 14423648 NR Description: Calcium-binding allergen Ole e 8 (PCA18/PCA23)
  misc_feature (1)..(102): NCBI GI NO: 15221781 NR Description: putative calmodulin; protein id: At1g24620.1
MMKQFDLDGNGFIDLDEFVALFQIGIGGGGNNRNDVSDLKEAFELYDLDGNGRISAKELHSVMKNLGEKCSVQDCKKMISKVDIDGDGCVNFDEFKKMMSNGGGA

SEQ ID NO: 973 - DNA, 1434 bp, Arabidopsis thaliana
  misc_feature (1)..(1434): Ceres Seq. ID no. 12421633
atataaactcgaatccatcacaaagcctattcaagttaagagaaaagaaaaaaaaaaaccgttcttggaagatgggtttcaaactcaactctcttttccttcttctttcgcttctcatactcacaatcttgtccggagccgaccaagccttggcttacgtcaagaaaccacatgtgagccaacgcaacaaaacggcgttagcagccgtcgccggaagaggaggaggaaaagagatgttgaaagggaggaagcagacgagtggttgtaacttgtttcaagggagatgggttttcgatgcttcttaccctttctacgattcatccacgtgccctttcatcgacggtgagttcgactgtctcaaattcggccgaccagacaaacagttccttaagtactcttggcagcctgattcatgcaccgtcccaaggtttgatggggaagcgtttttgaagaaatggagagggaaacgagtgatgttcgtgggtgactcactgagtctaaacatgtgggaatcgttggcatgtatgatacattcgtcggttccaaacactaagaccacttttctcaagcgaaccccactctcctctctcactttccaggaatatgacgtcacactattcctataccgaacaccatacctagtggacatctccaaagaaagtgtcgggcgtgtgcttaaccttggagccattgaagatggagctgatgcttggaaaaatatggacctcctcgtcttcaattcttggcactggtggactcacacaggagtacagtctcaagggtgggattttataagagatgggtcttcactgatgagagacatggaccgccttgatgctttcaacaaaggactcaccacttggggtcaatgggttgatcaaaatgttaatgtttcgcaaacccgagtcttcttccaaggcatttctcccactcactacatgggaagggaatggaacgagccgaggaaaacttgcaacgggcagatgcaaccgttgaccggatcaacatacccaggtggttcacttcctgcagcaagcattgtgtctcgagtattaagcacgatgagaacgcccgtttacttactcgacatcacaactctatctcaactgagaaaagatgctcatccatctacatatggaggcgatggcggaacggattgcagtcactggtgccttcctggcttgccggatacttggaaccagcttctctatgcagctctttcgatgtgaaagcttgactcaatacacacttgcatgtatattacattcttggcagtccaaaggggaaaaaaagaagaagaaacgactgacattttacttggagagaatttgaagattagaaagagtatatgacgataaagttgtaaagtgttttatattctttactcttgggtggttacaaatcataatctaatcgacttcgattgtgattacc

SEQ ID NO: 974 - protein, 408 aa, Arabidopsis thaliana
  peptide (1)..(408): Ceres Seq. ID no. 12421634
  misc_feature (24)..(408): NCBI GI NO: 18403435 NR Description: expressed protein; protein id: At2g34070
  misc_feature (24)..(408): NCBI GI NO: 18396930 NR Description: expressed protein; protein id: At1g29050
  misc_feature (247)..(408): NCBI GI NO: 25408325 NR Description: hypothetical protein At2g34070
  misc_feature (24)..(178): NCBI GI NO: 25408325 NR Description: hypothetical protein At2g34070
  misc_feature (32)..(408): NCBI GI NO: 25366741 NR Description: F28N24.24 protein - Arabidopsis thaliana
  misc_feature (23)..(406): NCBI GI NO: 34911864 NR Description: OSJNBb0032K15.9
  misc_feature (82)..(406): NCBI GI NO: 18406003 NR Description: expressed protein; protein id: At2g42570
  misc_feature (88)..(407): NCBI GI NO: 21593142 NR Description: unknown [Arabidopsis thaliana]
  misc_feature (88)..(407): NCBI GI NO: 28393769 NR Description: unknown protein [Arabidopsis thaliana]
  misc_feature (197)..(407): NCBI GI NO: 34904010 NR Description: unnamed protein product
INSNPSQSLFKLREKKKKNRSWKMGFKLNSLFLLLSLLILTILSGADQALAYVKKPHVSQRNKTALAAVAGRGGGKEMLKGRKQTSGCNLFQGRWVFDASYPFYDSSTCPFIDGEFDCLKFGRPDKQFLKYSWQPDSCTVPRFDGEAFLKKWRGKRVMFVGDSLSLNMWESLACMIHSSVPNTKTTFLKRTPLSSLTFQEYDVTLFLYRTPYLVDISKESVGRVLNLGAIEDGADAWKNMDLLVFNSWHWWTHTGVQSQGWDFIRDGSSLMRDMDRLDAFNKGLTTWGQWVDQNVNVSQTRVFFQGISPTHYMGREWNEPRKTCNGQMQPLTGSTYPGGSLPAASIVSRVLSTMRTPVYLLDITTLSQLRKDAHPSTYGGDGGTDCSHWCLPGLPDTWNQLLYAALSM

SEQ ID NO: 975 - protein, 385 aa, Arabidopsis thaliana
  peptide (1)..(385): Ceres Seq. ID no. 12421635
  misc_feature (1)..(385): NCBI GI NO: 18403435 NR Description: expressed protein; protein id: At2g34070
  misc_feature (1)..(385): NCBI GI NO: 18396930 NR Description: expressed protein; protein id: At1g29050
  misc_feature (224)..(385): NCBI GI NO: 25408325 NR Description: hypothetical protein At2g34070
  misc_feature (1)..(155): NCBI GI NO: 25408325 NR Description: hypothetical protein At2g34070
  misc_feature (9)..(385): NCBI GI NO: 25366741 NR Description: F28N24.24 protein - Arabidopsis thaliana
  misc_feature (1)..(383): NCBI GI NO: 34911864 NR Description: OSJNBb0032K15.9
  misc_feature (59)..(383): NCBI GI NO: 18406003 NR Description: expressed protein; protein id: At2g42570
  misc_feature (65)..(384): NCBI GI NO: 21593142 NR Description: unknown [Arabidopsis thaliana]
  misc_feature (65)..(384): NCBI GI NO: 28393769 NR Description: unknown protein [Arabidopsis thaliana]
  misc_feature (174)..(384): NCBI GI NO: 34904010 NR Description: unnamed protein product
MGFKLNSLFLLLSLLILTILSGADQALAYVKKPHVSQRNKTALAAVAGRGGGKEMLKGRKQTSGCNLFQGRWVFDASYPFYDSSTCPFIDGEFDCLKFGRPDKQFLKYSWQPDSCTVPRFDGEAFLKKWRGKRVMFVGDSLSLNMWESLACMIHSSVPNTKTTFLKRTPLSSLTFQEYDVTLFLYRTPYLVDISKESVGRVLNLGAIEDGADAWKNMDLLVFNSWHWWTHTGVQSQGWDFIRDGSSLMRDMDRLDAFNKGLTTWGQWVDQNVNVSQTRVFFQGISPTHYMGREWNEPRKTCNGQMQPLTGSTYPGGSLPAASIVSRVLSTMRTPVYLLDITTLSQLRKDAHPSTYGGDGGTDCSHWCLPGLPDTWNQLLYAALSM

SEQ ID NO: 976 - protein, 331 aa, Arabidopsis thaliana
  peptide (1)..(331): Ceres Seq. ID no. 12421636
  misc_feature (1)..(331): NCBI GI NO: 18403435 NR Description: expressed protein; protein id: At2g34070
  misc_feature (1)..(331): NCBI GI NO: 18396930 NR Description: expressed protein; protein id: At1g29050
  misc_feature (170)..(331): NCBI GI NO: 25408325 NR Description: hypothetical protein At2g34070
  misc_feature (1)..(101): NCBI GI NO: 25408325 NR Description: hypothetical protein At2g34070
  misc_feature (1)..(331): NCBI GI NO: 25366741 NR Description: F28N24.24 protein - Arabidopsis thaliana
  misc_feature (1)..(329): NCBI GI NO: 34911864 NR Description: OSJNBb0032K15.9
  misc_feature (5)..(329): NCBI GI NO: 18406003 NR Description: expressed protein; protein id: At2g42570
  misc_feature (11)..(330): NCBI GI NO: 21593142 NR Description: unknown [Arabidopsis thaliana]
  misc_feature (11)..(330): NCBI GI NO: 28393769 NR Description: unknown protein [Arabidopsis thaliana]
  misc_feature (120)..(330): NCBI GI NO: 34904010 NR Description: unnamed protein product
MLKGRKQTSGCNLFQGRWVFDASYPFYDSSTCPFIDGEFDCLKFGRPDKQFLKYSWQPDSCTVPRFDGEAFLKKWRGKRVMFVGDSLSLNMWESLACMIHSSVPNTKTTFLKRTPLSSLTFQEYDVTLFLYRTPYLVDISKESVGRVLNLGAIEDGADAWKNMDLLVFNSWHWWTHTGVQSQGWDFIRDGSSLMRDMDRLDAFNKGLTTWGQWVDQNVNVSQTRVFFQGISPTHYMGREWNEPRKTCNGQMQPLTGSTYPGGSLPAASIVSRVLSTMRTPVYLLDITTLSQLRKDAHPSTYGGDGGTDCSHWCLPGLPDTWNQLLYAALSM

SEQ ID NO: 977 - DNA, 1460 bp, Arabidopsis thaliana
  misc_feature (1)..(1460): Ceres Seq. ID no. 12370574
ataatttactaaatatcactttctagtctcttctctttactttggtcgtccacaatgaaaggaggcagcctctcgtttctcttcgttctcctaatcgccaccatcacttccgtcatttgcttcagtgacgggatgttaccaaacggcgactttgaactaggaccaaaaccatcggacatgaaaggaacgcaagtaataaacaagaaggcgattcctagctgggagctttcaggcttcgtcgaatacataaagtccggtcaaaaacaaggagacatgcttctcgtagtcccggccggaaagttcgcaatccggctaggcaacgaggcatcgatcaaacaaagacttaacgttacaaaaggaatgtattactcactgacgttcagtgccgcaaggacatgtgcccaagacgaacggctcaacatatcggtggcacctgactcaggcgttattcctatacagacggtgtacagtagcagtggatgggacctttacgcatgggcgttccaagccgagagtaacgtggcagagatcgtgattcataatcctggtgaggaggaagatcctgcttgtggaccactcattgatggtgtggcaatcaaagctctataccctcctcggcccaccaataagaatatattgaagaacggaggatttgaagaaggtccctacgtactcccaaacgcaacaaccggcgttctggttcctccctttatagaagatgaccactctcctttacccgcgtggatggtcgaatcactcaaagccatcaaatacgttgatgtcgagcatttctcggtcccacaaggccgtcgagccgtggagctagtggcaggcaaagaaagcgcaatcgctcaggtagctaggaccgttgtgggaaaaacttacgtgctttcgtttgcggttggagatgctaacaatgcttgccaaggatcgatggtggtcgaggcatttgcgggaaaagacactctaaaggtaccttatgagtctcgaggcaaaggagggttcaaacgcgcttctctacggtttgtggcggtttcgacccgcacaagagttatgttttacagcacattttactcgatgagaagcgatgatttctcatcactgtgtgggcccgtgatcgatgatgttaagctcctcagtgctcgtaagccgtaagatggccattgttttatttctaaggttcttcgtataagccagtgtggttttttatataaatatgattttcttaatctctaatgcttttgaaatgagatgagtaatactgaaagggtgtttgtggtgtagggttttatataaggcaaaaaggtcttgcttatatatattttcttgtatgagaaggctaaagaaatgttgtctgtttttactaaattgggttctttcaaggagatcgggtgattgtgagaataaaaatgtaatacagatatatatggtagagaggaatgaggataataatttaactg

SEQ ID NO: 978 - protein, 366 aa, Arabidopsis thaliana
  peptide (1)..(366): Ceres Seq. ID no. 12370575
  misc_feature (42)..(364): Pfam Name: Pfam Description:  Protein of unknown function, DUF642
  misc_feature (1)..(366): NCBI GI NO: 15239049 NR Description: putative protein; protein id: At5g11420
  misc_feature (1)..(366): NCBI GI NO: 23397043 NR Description: unknown protein [Arabidopsis thaliana]
  misc_feature (1)..(366): NCBI GI NO: 21554402 NR Description: unknown [Arabidopsis thaliana]
  misc_feature (1)..(366): NCBI GI NO: 15239438 NR Description: putative protein; protein id: At5g25460
  misc_feature (1)..(366): NCBI GI NO: 21537379 NR Description: unknown [Arabidopsis thaliana]
  misc_feature (1)..(366): NCBI GI NO: 15809822 NR Description: AT5g25460/F18G18_200 [Arabidopsis thaliana]
  misc_feature (1)..(366): NCBI GI NO: 7488898 NR Description: hypothetical protein - castor bean
  misc_feature (6)..(366): NCBI GI NO: 18418018 NR Description: putative protein; protein id: At4g32460
  misc_feature (42)..(366): NCBI GI NO: 7486632 NR Description: hypothetical protein F8B4
  misc_feature (8)..(365): NCBI GI NO: 7488741 NR Description: hypothetical protein precursor - alfalfa
MKGGSLSFLFVLLIATITSVICFSDGMLPNGDFELGPKPSDMKGTQVINKKAIPSWELSGFVEYIKSGQKQGDMLLVVPAGKFAIRLGNEASIKQRLNVTKGMYYSLTFSAARTCAQDERLNISVAPDSGVIPIQTVYSSSGWDLYAWAFQAESNVAEIVIHNPGEEEDPACGPLIDGVAIKALYPPRPTNKNILKNGGFEEGPYVLPNATTGVLVPPFIEDDHSPLPAWMVESLKAIKYVDVEHFSVPQGRRAVELVAGKESAIAQVARTVVGKTYVLSFAVGDANNACQGSMVVEAFAGKDTLKVPYESRGKGGFKRASLRFVAVSTRTRVMFYSTFYSMRSDDFSSLCGPVIDDVKLLSARKP

SEQ ID NO: 979 - protein, 340 aa, Arabidopsis thaliana
  peptide (1)..(340): Ceres Seq. ID no. 12370576
  misc_feature (16)..(338): Pfam Name: Pfam Description:  Protein of unknown function, DUF642
  misc_feature (1)..(340): NCBI GI NO: 15239049 NR Description: putative protein; protein id: At5g11420
  misc_feature (1)..(340): NCBI GI NO: 23397043 NR Description: unknown protein [Arabidopsis thaliana]
  misc_feature (1)..(340): NCBI GI NO: 21554402 NR Description: unknown [Arabidopsis thaliana]
  misc_feature (1)..(340): NCBI GI NO: 15239438 NR Description: putative protein; protein id: At5g25460
  misc_feature (1)..(340): NCBI GI NO: 21537379 NR Description: unknown [Arabidopsis thaliana]
  misc_feature (1)..(340): NCBI GI NO: 15809822 NR Description: AT5g25460/F18G18_200 [Arabidopsis thaliana]
  misc_feature (1)..(340): NCBI GI NO: 7488898 NR Description: hypothetical protein - castor bean
  misc_feature (1)..(340): NCBI GI NO: 18418018 NR Description: putative protein; protein id: At4g32460
  misc_feature (16)..(340): NCBI GI NO: 7486632 NR Description: hypothetical protein F8B4
  misc_feature (1)..(339): NCBI GI NO: 7488741 NR Description: hypothetical protein precursor - alfalfa
MLPNGDFELGPKPSDMKGTQVINKKAIPSWELSGFVEYIKSGQKQGDMLLVVPAGKFAIRLGNEASIKQRLNVTKGMYYSLTFSAARTCAQDERLNISVAPDSGVIPIQTVYSSSGWDLYAWAFQAESNVAEIVIHNPGEEEDPACGPLIDGVAIKALYPPRPTNKNILKNGGFEEGPYVLPNATTGVLVPPFIEDDHSPLPAWMVESLKAIKYVDVEHFSVPQGRRAVELVAGKESAIAQVARTVVGKTYVLSFAVGDANNACQGSMVVEAFAGKDTLKVPYESRGKGGFKRASLRFVAVSTRTRVMFYSTFYSMRSDDFSSLCGPVIDDVKLLSARKP

SEQ ID NO: 980 - protein, 325 aa, Arabidopsis thaliana
  peptide (1)..(325): Ceres Seq. ID no. 12370577
  misc_feature (1)..(323): Pfam Name: Pfam Description:  Protein of unknown function, DUF642
  misc_feature (1)..(325): NCBI GI NO: 15239049 NR Description: putative protein; protein id: At5g11420
  misc_feature (1)..(325): NCBI GI NO: 23397043 NR Description: unknown protein [Arabidopsis thaliana]
  misc_feature (1)..(325): NCBI GI NO: 21554402 NR Description: unknown [Arabidopsis thaliana]
  misc_feature (1)..(325): NCBI GI NO: 15239438 NR Description: putative protein; protein id: At5g25460
  misc_feature (1)..(325): NCBI GI NO: 21537379 NR Description: unknown [Arabidopsis thaliana]
  misc_feature (1)..(325): NCBI GI NO: 15809822 NR Description: AT5g25460/F18G18_200 [Arabidopsis thaliana]
  misc_feature (1)..(325): NCBI GI NO: 7488898 NR Description: hypothetical protein - castor bean
  misc_feature (1)..(325): NCBI GI NO: 18418018 NR Description: putative protein; protein id: At4g32460
  misc_feature (1)..(325): NCBI GI NO: 7486632 NR Description: hypothetical protein F8B4
  misc_feature (1)..(324): NCBI GI NO: 7488741 NR Description: hypothetical protein precursor - alfalfa
MKGTQVINKKAIPSWELSGFVEYIKSGQKQGDMLLVVPAGKFAIRLGNEASIKQRLNVTKGMYYSLTFSAARTCAQDERLNISVAPDSGVIPIQTVYSSSGWDLYAWAFQAESNVAEIVIHNPGEEEDPACGPLIDGVAIKALYPPRPTNKNILKNGGFEEGPYVLPNATTGVLVPPFIEDDHSPLPAWMVESLKAIKYVDVEHFSVPQGRRAVELVAGKESAIAQVARTVVGKTYVLSFAVGDANNACQGSMVVEAFAGKDTLKVPYESRGKGGFKRASLRFVAVSTRTRVMFYSTFYSMRSDDFSSLCGPVIDDVKLLSARKP

SEQ ID NO: 981 - DNA, 1254 bp, Arabidopsis thaliana
  misc_feature (1)..(1254): Ceres Seq. ID no. 12396165
tctcggaccaatattcaaagccgtgtgttcttctctgtctcattaaatcaaaaccaattttgttcttcttctttgattttttttttcttcttcattttttcttctttctatttgtaacgtatcttgagagatcgacgatgtcgtcgaagaaatccctagttcaaagtctcttcaacatttccaaaacctactccaggatttctggtcttacccgaatgcgtccgaccaaatccggcggcattcctcccgacgccggagattctggaatccgccgcagatttctccacaagagggcatttttctcgccggagatagttcctaaaggtggtaacttgatggagaaactcagggaattgactttgtccaataataatcgtattagactcgacgagatgttaccgccaccttcgccgaagaaatcatcaccggagtttttcccggcggtcacggtggaagacgtgaagaagctcatgagagcagcggaaatggagctggtgaaatcgaagctgagagagattggcaagaactgggttccttattcggagtttgttcgggtctgcggagaatacagttcggatcctgaacaaggtaaccgggtcgcgaatatgcttgacgaagctggaaacgtcatcgttttgggaaaactcgtctgccttaaacccgaagagctaacaagcgccatggctggtctgattccgacattcgaacccagtctcgacgacgcaacaagacaagagttcgaacaacttgagattataaaatcagatatcgacaaaagagccgatgatctggttcgaaaagaattatgggccggattaggcctaattatggcccaaacagttggattttttaggctgacgttttgggaactgtcgtgggacgtgatggaacccatatgcttctacgtaacttcgacatatttcatggctggttacgccttcttcctccgaacttcaaaggaaccttcctttgaaggtttttacaaaagccggttcgagacgaagcagaaacgtttgccttaaaatgcttgatttcgatatcgatcgatttaccaagctacagaagatgcatcgtccaaatttgactaaatctggtcgttgttgatcgtaattcttttcttcttctttttcctaaatcggatgctaaattaaatgtatagacgactgaaattttcgtagagaataattagttttagagggataaaaaaaagtcttgtcatgcgggggtaacactaaataactaaatcaattaatt

SEQ ID NO: 982 - protein, 339 aa, Arabidopsis thaliana
  peptide (1)..(339): Ceres Seq. ID no. 12396166
  misc_feature (185)..(338): Pfam Name: Pfam Description:  Protein of unknown function, DUF607
  misc_feature (46)..(338): NCBI GI NO: 15240047 NR Description: putative protein; protein id: At5g66650
  misc_feature (46)..(338): NCBI GI NO: 14596231 NR Description: Unknown protein [Arabidopsis thaliana]
  misc_feature (54)..(338): NCBI GI NO: 15224063 NR Description: hypothetical protein; protein id: At2g23790.1
  misc_feature (54)..(338): NCBI GI NO: 24496456 NR Description: hypothetical protein [Arabidopsis thaliana]
  misc_feature (41)..(338): NCBI GI NO: 15234535 NR Description: putative protein; protein id: At4g36820.1
  misc_feature (81)..(338): NCBI GI NO: 37535778 NR Description: unknown protein
  misc_feature (124)..(338): NCBI GI NO: 20330769 NR Description: Hypothetical protein
  misc_feature (126)..(338): NCBI GI NO: 15239011 NR Description: unknown protein; protein id: At5g42610.1
  misc_feature (148)..(338): NCBI GI NO: 34909244 NR Description: B1148D12.10
  misc_feature (136)..(338): NCBI GI NO: 18391039 NR Description: Expressed protein; protein id: At1g09575
SDQYSKPCVLLCLIKSKPILFFFFDFFFLLHFFFFLFVTYLERSTMSSKKSLVQSLFNISKTYSRISGLTRMRPTKSGGIPPDAGDSGIRRRFLHKRAFFSPEIVPKGGNLMEKLRELTLSNNNRIRLDEMLPPPSPKKSSPEFFPAVTVEDVKKLMRAAEMELVKSKLREIGKNWVPYSEFVRVCGEYSSDPEQGNRVANMLDEAGNVIVLGKLVCLKPEELTSAMAGLIPTFEPSLDDATRQEFEQLEIIKSDIDKRADDLVRKELWAGLGLIMAQTVGFFRLTFWELSWDVMEPICFYVTSTYFMAGYAFFLRTSKEPSFEGFYKSRFETKQKRLP

SEQ ID NO: 983 - protein, 294 aa, Arabidopsis thaliana
  peptide (1)..(294): Ceres Seq. ID no. 12396167
  misc_feature (140)..(293): Pfam Name: Pfam Description:  Protein of unknown function, DUF607
  misc_feature (1)..(293): NCBI GI NO: 15240047 NR Description: putative protein; protein id: At5g66650
  misc_feature (1)..(293): NCBI GI NO: 14596231 NR Description: Unknown protein [Arabidopsis thaliana]
  misc_feature (9)..(293): NCBI GI NO: 15224063 NR Description: hypothetical protein; protein id: At2g23790.1
  misc_feature (9)..(293): NCBI GI NO: 24496456 NR Description: hypothetical protein [Arabidopsis thaliana]
  misc_feature (1)..(293): NCBI GI NO: 15234535 NR Description: putative protein; protein id: At4g36820.1
  misc_feature (36)..(293): NCBI GI NO: 37535778 NR Description: unknown protein
  misc_feature (79)..(293): NCBI GI NO: 20330769 NR Description: Hypothetical protein
  misc_feature (81)..(293): NCBI GI NO: 15239011 NR Description: unknown protein; protein id: At5g42610.1
  misc_feature (103)..(293): NCBI GI NO: 34909244 NR Description: B1148D12.10
  misc_feature (91)..(293): NCBI GI NO: 18391039 NR Description: Expressed protein; protein id: At1g09575
MSSKKSLVQSLFNISKTYSRISGLTRMRPTKSGGIPPDAGDSGIRRRFLHKRAFFSPEIVPKGGNLMEKLRELTLSNNNRIRLDEMLPPPSPKKSSPEFFPAVTVEDVKKLMRAAEMELVKSKLREIGKNWVPYSEFVRVCGEYSSDPEQGNRVANMLDEAGNVIVLGKLVCLKPEELTSAMAGLIPTFEPSLDDATRQEFEQLEIIKSDIDKRADDLVRKELWAGLGLIMAQTVGFFRLTFWELSWDVMEPICFYVTSTYFMAGYAFFLRTSKEPSFEGFYKSRFETKQKRLP

SEQ ID NO: 984 - protein, 268 aa, Arabidopsis thaliana
  peptide (1)..(268): Ceres Seq. ID no. 12396168
  misc_feature (114)..(267): Pfam Name: Pfam Description:  Protein of unknown function, DUF607
  misc_feature (1)..(267): NCBI GI NO: 15240047 NR Description: putative protein; protein id: At5g66650
  misc_feature (1)..(267): NCBI GI NO: 14596231 NR Description: Unknown protein [Arabidopsis thaliana]
  misc_feature (1)..(267): NCBI GI NO: 15224063 NR Description: hypothetical protein; protein id: At2g23790.1
  misc_feature (1)..(267): NCBI GI NO: 24496456 NR Description: hypothetical protein [Arabidopsis thaliana]
  misc_feature (1)..(267): NCBI GI NO: 15234535 NR Description: putative protein; protein id: At4g36820.1
  misc_feature (10)..(267): NCBI GI NO: 37535778 NR Description: unknown protein
  misc_feature (53)..(267): NCBI GI NO: 20330769 NR Description: Hypothetical protein
  misc_feature (55)..(267): NCBI GI NO: 15239011 NR Description: unknown protein; protein id: At5g42610.1
  misc_feature (77)..(267): NCBI GI NO: 34909244 NR Description: B1148D12.10
  misc_feature (65)..(267): NCBI GI NO: 18391039 NR Description: Expressed protein; protein id: At1g09575
MRPTKSGGIPPDAGDSGIRRRFLHKRAFFSPEIVPKGGNLMEKLRELTLSNNNRIRLDEMLPPPSPKKSSPEFFPAVTVEDVKKLMRAAEMELVKSKLREIGKNWVPYSEFVRVCGEYSSDPEQGNRVANMLDEAGNVIVLGKLVCLKPEELTSAMAGLIPTFEPSLDDATRQEFEQLEIIKSDIDKRADDLVRKELWAGLGLIMAQTVGFFRLTFWELSWDVMEPICFYVTSTYFMAGYAFFLRTSKEPSFEGFYKSRFETKQKRLP

SEQ ID NO: 985 - DNA, 1315 bp, Arabidopsis thaliana
  misc_feature (1)..(1315): Ceres Seq. ID no. 12482719
aaaagactatcaaaagaagaaacagagcaaatttcattctctcagaacaaatatatacatattaatcagaatcaggaaaagtgaagaagcgaaagagagaagaagatcggatgggagtggattactacaaagtcctccaagtcgatcgcagcgcaagcgacgatgatctcaagaaagcttatcgtaaacttgccatgaaatggcatcccgacaaaaatcccaacaacaaaaaggatgccgaagctatgttcaaacaaatatccgaagcttacgaggtactaagtgatcctcagaagaaagctgtgtatgatcaatatggtgaggaaggtttgaaagggaacgtgccacctccggatgcaggtggagctacttacttctctaccggggatggtccaacgtccttcaggttcaacccgagaaatgcggatgatatatttgctgagttctttggcttctctagcccatttggcggcggaagaggtggtacaagattctctagcagcatgtttggtgataatatgtttgcttctttcggcgaaggaggaggcggtggtggtggctcgatgcatcacggtggagctaggaaggctgctcctatcgaaaacaagttgccttgtagccttgaagatctttacaaaggaaccaccaaaaagatgaggatttctagggagattgctgatgtcagtggcaagacgatgcaggtggaagagattttgaccattgatgtgaaaccaggatggaagaaaggcacaaagatcacgttcccagagaaaggcaatgagcaacccggtgtgattccagcggatttagtcttcataatcgacgagaagcctcacccggttttcactcgagagggtaacgacctcatagtcacacagaagatctcacttgttgaggccttgactggttacacagtgaacctgactactcttgatggtcggagactgacaattccagtcaccaacgtggtccatcccgagtacgaggaagtggtaccgaaggaagggatgccattgcaaaaagaccagactaagagaggtaacttgaggatcaaatttaacatcaagttccctacaaggttaacctcagagcagaagacaggagtgaagaaacttctcggatgaaatgagttatagtcagcacatttcagacaaaacaatgttgaacagaagaggaacaagaaaatcatgttgcagaccacagggattgtgattaaatactgttgtgacctttttgatcgatttgtaacatatgtacgattggatacctcctaataaatttgttactttctctataatcaaaacgcttctaaacc

SEQ ID NO: 986 - protein, 337 aa, Arabidopsis thaliana
  peptide (1)..(337): Ceres Seq. ID no. 12482720
  misc_feature (214)..(336): Pfam Name: Pfam Description:  DnaJ C terminal region
  misc_feature (1)..(337): NCBI GI NO: 15225377 NR Description: putative heat shock protein; protein id: At2g20560
  misc_feature (1)..(337): NCBI GI NO: 15235310 NR Description: heat-shock protein; protein id: At4g28480
  misc_feature (1)..(337): NCBI GI NO: 6179940 NR Description: DnaJ-like protein [Nicotiana tabacum]
  misc_feature (1)..(337): NCBI GI NO: 11863723 NR Description: DnaJ like protein [Lycopersicon esculentum]
  misc_feature (1)..(336): NCBI GI NO: 15240968 NR Description: heat shock protein 40-like; protein id: At5g01390
  misc_feature (1)..(335): NCBI GI NO: 15231987 NR Description: putative heat shock protein; protein id: At3g08910
  misc_feature (1)..(335): NCBI GI NO: 21618097 NR Description: putative heat shock protein [Arabidopsis thaliana]
  misc_feature (1)..(337): NCBI GI NO: 34904486 NR Description: putative heat shock protein 40
  misc_feature (1)..(336): NCBI GI NO: 15239455 NR Description: heat-shock protein - like; protein id: At5g25530.1
  misc_feature (1)..(337): NCBI GI NO: 15218515 NR Description: putative heat-shock protein; protein id: At1g10350
MGVDYYKVLQVDRSASDDDLKKAYRKLAMKWHPDKNPNNKKDAEAMFKQISEAYEVLSDPQKKAVYDQYGEEGLKGNVPPPDAGGATYFSTGDGPTSFRFNPRNADDIFAEFFGFSSPFGGGRGGTRFSSSMFGDNMFASFGEGGGGGGGSMHHGGARKAAPIENKLPCSLEDLYKGTTKKMRISREIADVSGKTMQVEEILTIDVKPGWKKGTKITFPEKGNEQPGVIPADLVFIIDEKPHPVFTREGNDLIVTQKISLVEALTGYTVNLTTLDGRRLTIPVTNVVHPEYEEVVPKEGMPLQKDQTKRGNLRIKFNIKFPTRLTSEQKTGVKKLLG

SEQ ID NO: 987 - protein, 309 aa, Arabidopsis thaliana
  peptide (1)..(309): Ceres Seq. ID no. 12482721
  misc_feature (186)..(308): Pfam Name: Pfam Description:  DnaJ C terminal region
  misc_feature (1)..(309): NCBI GI NO: 15225377 NR Description: putative heat shock protein; protein id: At2g20560
  misc_feature (1)..(309): NCBI GI NO: 15235310 NR Description: heat-shock protein; protein id: At4g28480
  misc_feature (1)..(309): NCBI GI NO: 6179940 NR Description: DnaJ-like protein [Nicotiana tabacum]
  misc_feature (1)..(309): NCBI GI NO: 11863723 NR Description: DnaJ like protein [Lycopersicon esculentum]
  misc_feature (1)..(308): NCBI GI NO: 15240968 NR Description: heat shock protein 40-like; protein id: At5g01390
  misc_feature (1)..(307): NCBI GI NO: 15231987 NR Description: putative heat shock protein; protein id: At3g08910
  misc_feature (1)..(307): NCBI GI NO: 21618097 NR Description: putative heat shock protein [Arabidopsis thaliana]
  misc_feature (1)..(309): NCBI GI NO: 34904486 NR Description: putative heat shock protein 40
  misc_feature (1)..(308): NCBI GI NO: 15239455 NR Description: heat-shock protein - like; protein id: At5g25530.1
  misc_feature (1)..(309): NCBI GI NO: 15218515 NR Description: putative heat-shock protein; protein id: At1g10350
MKWHPDKNPNNKKDAEAMFKQISEAYEVLSDPQKKAVYDQYGEEGLKGNVPPPDAGGATYFSTGDGPTSFRFNPRNADDIFAEFFGFSSPFGGGRGGTRFSSSMFGDNMFASFGEGGGGGGGSMHHGGARKAAPIENKLPCSLEDLYKGTTKKMRISREIADVSGKTMQVEEILTIDVKPGWKKGTKITFPEKGNEQPGVIPADLVFIIDEKPHPVFTREGNDLIVTQKISLVEALTGYTVNLTTLDGRRLTIPVTNVVHPEYEEVVPKEGMPLQKDQTKRGNLRIKFNIKFPTRLTSEQKTGVKKLLG

SEQ ID NO: 988 - protein, 292 aa, Arabidopsis thaliana
  peptide (1)..(292): Ceres Seq. ID no. 12482722
  misc_feature (169)..(291): Pfam Name: Pfam Description:  DnaJ C terminal region
  misc_feature (1)..(292): NCBI GI NO: 15225377 NR Description: putative heat shock protein; protein id: At2g20560
  misc_feature (1)..(292): NCBI GI NO: 15235310 NR Description: heat-shock protein; protein id: At4g28480
  misc_feature (1)..(292): NCBI GI NO: 6179940 NR Description: DnaJ-like protein [Nicotiana tabacum]
  misc_feature (1)..(292): NCBI GI NO: 11863723 NR Description: DnaJ like protein [Lycopersicon esculentum]
  misc_feature (1)..(291): NCBI GI NO: 15240968 NR Description: heat shock protein 40-like; protein id: At5g01390
  misc_feature (1)..(290): NCBI GI NO: 15231987 NR Description: putative heat shock protein; protein id: At3g08910
  misc_feature (1)..(290): NCBI GI NO: 21618097 NR Description: putative heat shock protein [Arabidopsis thaliana]
  misc_feature (1)..(292): NCBI GI NO: 34904486 NR Description: putative heat shock protein 40
  misc_feature (1)..(291): NCBI GI NO: 15239455 NR Description: heat-shock protein - like; protein id: At5g25530.1
  misc_feature (1)..(292): NCBI GI NO: 15218515 NR Description: putative heat-shock protein; protein id: At1g10350
MFKQISEAYEVLSDPQKKAVYDQYGEEGLKGNVPPPDAGGATYFSTGDGPTSFRFNPRNADDIFAEFFGFSSPFGGGRGGTRFSSSMFGDNMFASFGEGGGGGGGSMHHGGARKAAPIENKLPCSLEDLYKGTTKKMRISREIADVSGKTMQVEEILTIDVKPGWKKGTKITFPEKGNEQPGVIPADLVFIIDEKPHPVFTREGNDLIVTQKISLVEALTGYTVNLTTLDGRRLTIPVTNVVHPEYEEVVPKEGMPLQKDQTKRGNLRIKFNIKFPTRLTSEQKTGVKKLLG

SEQ ID NO: 989 - DNA, 1021 bp, Arabidopsis thaliana
  misc_feature (1)..(1021): Ceres Seq. ID no. 13488432
ttgacccaaaagaacccataatgtttagagtgaccggaactctctcggcggcatcatctccagcggtggcggcggcgtctttctccgccgctctaagactttccataactcccactctcgctatcgcctctcctccccatctccgttggttctcgaagttttctcgtcaatttctcggcggacgcatctcttcactccgaccacgcattccttctccgtgcccgattcgactctctggtttcccggctctcaaaatgagagcttcgtttagcagtgggagtagtgggagtagtgcaagtagagagattctggtgcagcatttgcttgttaagaataatgatgttgagctctttgccgaactccaaaagaaattcttggatggagaggagatgagtgatcttgcggctgagtattcgatttgtccttccaaaaaggacggtggtatacttggatgggtaaaactgggtcaaatggtaccagagtttgaggaagctgcgtttaaagcagagctgaatcaggtggtgaggtgtagaacccaatttggcttgcacttattgcaagttctatctgagagagaaccggtgaaagatatccaggtagaggagctgcattccaaaatgcaagatccagttttcatggatgaggctcagttaattgatgtcagagaacccaatgagatagagatagcatccttgccaggattcaaagtgttcccactccgccaatttggaacatgggcaccagacatcacttcaaagctgaaccctgagaaggatacatttgtcttgtgcaaggttggtggcaggtcaatgcaggttgccaactggttacagtctcagggcttcaagagtgtgtacaacattactggtgggatacaagcttattctctcaaggttgacccatcaattcctacttactgaaattgagcatcttagtctctttttcttgtatcctcctaattccaaattagatttgcaaattcgtattcaataaactatataatataaggttcatttttgag

SEQ ID NO: 990 - protein, 305 aa, Arabidopsis thaliana
  peptide (1)..(305): Ceres Seq. ID no. 13488433
  misc_feature (202)..(297): Pfam Name: Pfam Description:  Rhodanese-like domain
  misc_feature (7)..(305): NCBI GI NO: 18419898 NR Description: peptidyl-prolyl cis-trans isomerase - like protein
  misc_feature (7)..(305): NCBI GI NO: 21554407 NR Description: peptidyl-prolyl cis-trans isomerase-like protein
  misc_feature (85)..(305): NCBI GI NO: 25456107 NR Description: probable peptidylprolyl isomerase (EC 5.2.1.8)
  misc_feature (189)..(305): NCBI GI NO: 23039944 NR Description: hypothetical protein
  misc_feature (193)..(305): NCBI GI NO: 16331613 NR Description: hypothetical protein [Synechocystis sp. PCC 6803]
  misc_feature (192)..(305): NCBI GI NO: 17231535 NR Description: hypothetical protein [Nostoc sp. PCC 7120]
  misc_feature (194)..(305): NCBI GI NO: 23127749 NR Description: hypothetical protein [Nostoc punctiforme]
  misc_feature (197)..(305): NCBI GI NO: 22297588 NR Description: ORF_ID:tll0044~hypothetical protein
  misc_feature (193)..(305): NCBI GI NO: 37523718 NR Description: hypothetical protein gll4149
  misc_feature (101)..(195): NCBI GI NO: 15893571 NR Description: Peptidil-prolyl cis-trans isomerase
DPKEPIMFRVTGTLSAASSPAVAAASFSAALRLSITPTLAIASPPHLRWFSKFSRQFLGGRISSLRPRIPSPCPIRLSGFPALKMRASFSSGSSGSSASREILVQHLLVKNNDVELFAELQKKFLDGEEMSDLAAEYSICPSKKDGGILGWVKLGQMVPEFEEAAFKAELNQVVRCRTQFGLHLLQVLSEREPVKDIQVEELHSKMQDPVFMDEAQLIDVREPNEIEIASLPGFKVFPLRQFGTWAPDITSKLNPEKDTFVLCKVGGRSMQVANWLQSQGFKSVYNITGGIQAYSLKVDPSIPTY

SEQ ID NO: 991 - protein, 299 aa, Arabidopsis thaliana
  peptide (1)..(299): Ceres Seq. ID no. 13488434
  misc_feature (196)..(291): Pfam Name: Pfam Description:  Rhodanese-like domain
  misc_feature (1)..(299): NCBI GI NO: 18419898 NR Description: peptidyl-prolyl cis-trans isomerase - like protein
  misc_feature (1)..(299): NCBI GI NO: 21554407 NR Description: peptidyl-prolyl cis-trans isomerase-like protein
  misc_feature (79)..(299): NCBI GI NO: 25456107 NR Description: probable peptidylprolyl isomerase (EC 5.2.1.8)
  misc_feature (183)..(299): NCBI GI NO: 23039944 NR Description: hypothetical protein
  misc_feature (187)..(299): NCBI GI NO: 16331613 NR Description: hypothetical protein [Synechocystis sp. PCC 6803]
  misc_feature (186)..(299): NCBI GI NO: 17231535 NR Description: hypothetical protein [Nostoc sp. PCC 7120]
  misc_feature (188)..(299): NCBI GI NO: 23127749 NR Description: hypothetical protein [Nostoc punctiforme]
  misc_feature (191)..(299): NCBI GI NO: 22297588 NR Description: ORF_ID:tll0044~hypothetical protein
  misc_feature (187)..(299): NCBI GI NO: 37523718 NR Description: hypothetical protein gll4149
  misc_feature (95)..(189): NCBI GI NO: 15893571 NR Description: Peptidil-prolyl cis-trans isomerase
MFRVTGTLSAASSPAVAAASFSAALRLSITPTLAIASPPHLRWFSKFSRQFLGGRISSLRPRIPSPCPIRLSGFPALKMRASFSSGSSGSSASREILVQHLLVKNNDVELFAELQKKFLDGEEMSDLAAEYSICPSKKDGGILGWVKLGQMVPEFEEAAFKAELNQVVRCRTQFGLHLLQVLSEREPVKDIQVEELHSKMQDPVFMDEAQLIDVREPNEIEIASLPGFKVFPLRQFGTWAPDITSKLNPEKDTFVLCKVGGRSMQVANWLQSQGFKSVYNITGGIQAYSLKVDPSIPTY

SEQ ID NO: 992 - protein, 221 aa, Arabidopsis thaliana
  peptide (1)..(221): Ceres Seq. ID no. 13488435
  misc_feature (118)..(213): Pfam Name: Pfam Description:  Rhodanese-like domain
  misc_feature (1)..(221): NCBI GI NO: 18419898 NR Description: peptidyl-prolyl cis-trans isomerase - like protein
  misc_feature (1)..(221): NCBI GI NO: 21554407 NR Description: peptidyl-prolyl cis-trans isomerase-like protein
  misc_feature (1)..(221): NCBI GI NO: 25456107 NR Description: probable peptidylprolyl isomerase (EC 5.2.1.8)
  misc_feature (105)..(221): NCBI GI NO: 23039944 NR Description: hypothetical protein
  misc_feature (109)..(221): NCBI GI NO: 16331613 NR Description: hypothetical protein [Synechocystis sp. PCC 6803]
  misc_feature (108)..(221): NCBI GI NO: 17231535 NR Description: hypothetical protein [Nostoc sp. PCC 7120]
  misc_feature (110)..(221): NCBI GI NO: 23127749 NR Description: hypothetical protein [Nostoc punctiforme]
  misc_feature (113)..(221): NCBI GI NO: 22297588 NR Description: ORF_ID:tll0044~hypothetical protein
  misc_feature (109)..(221): NCBI GI NO: 37523718 NR Description: hypothetical protein gll4149
  misc_feature (17)..(111): NCBI GI NO: 15893571 NR Description: Peptidil-prolyl cis-trans isomerase
MRASFSSGSSGSSASREILVQHLLVKNNDVELFAELQKKFLDGEEMSDLAAEYSICPSKKDGGILGWVKLGQMVPEFEEAAFKAELNQVVRCRTQFGLHLLQVLSEREPVKDIQVEELHSKMQDPVFMDEAQLIDVREPNEIEIASLPGFKVFPLRQFGTWAPDITSKLNPEKDTFVLCKVGGRSMQVANWLQSQGFKSVYNITGGIQAYSLKVDPSIPTY

SEQ ID NO: 993 - DNA, 874 bp, Arabidopsis thaliana
  misc_feature (1)..(874): Ceres Seq. ID no. 12333657
gttagtcatgtcatcgatgacggagaaggagaaggagagagatccaccaccaccacatcaagagattgaagagactactccgttgctcgaaaattctcaaccggaaagtgaattgagatcgacgaccgcggcggcgaaggttcctgaggtggagattcatctgtataagtgtggaaaaggtccgatcgatgtgttcaagtcaaatctcggcggttatgagcaggatcagctcgaggttcgatctattcttgagaaatatggcttgaaagcaatcttcgctttcaacgttgagaaaggtcgtgctgttccgatcagatttcaccctaggaatggtcggtctgtgttgccttatagggatggtgccgtcatttacatcgacggtgaacctcaggattccctgctcaaacccatcaccagaatcattctcggagttgtgattgttacgctcttaataacatttctattgaaagaccctccagcttggatcaagaacaacatctccattgggacctttcctccatgggtgctcgcatgcatagttatagttttcactcgagctagaaagagaaccagggacttcttcaagaagtatggctggtagtttcgcagaccctaacactcgtctcgcttaaaatgtggtcgaaatttgtagtctttcatcgaccatatatatagaggttctcttgccttaacccaacaagttcccttccttggcaagactcttcgtctttgatacgccttgaggcgccaaattgcttgctttcagaactaagagagagcaatcattttcttcatttgcattttgttgaagtttatagttttatgcatttccatgtgtaatgcgatttggtttttgccattttgatggaaactg

SEQ ID NO: 994 - protein, 199 aa, Arabidopsis thaliana
  peptide (1)..(199): Ceres Seq. ID no. 12333658
  misc_feature (3)..(199): NCBI GI NO: 18409911 NR Description: expressed protein; protein id: At1g71780
  misc_feature (6)..(199): NCBI GI NO: 25373323 NR Description: hypothetical protein F14O23.16
  misc_feature (22)..(199): NCBI GI NO: 34910596 NR Description: B1131B07.26
  misc_feature (48)..(130): NCBI GI NO: 34906292 NR Description: unnamed protein product
LVMSSMTEKEKERDPPPPHQEIEETTPLLENSQPESELRSTTAAAKVPEVEIHLYKCGKGPIDVFKSNLGGYEQDQLEVRSILEKYGLKAIFAFNVEKGRAVPIRFHPRNGRSVLPYRDGAVIYIDGEPQDSLLKPITRIILGVVIVTLLITFLLKDPPAWIKNNISIGTFPPWVLACIVIVFTRARKRTRDFFKKYGW

SEQ ID NO: 995 - protein, 197 aa, Arabidopsis thaliana
  peptide (1)..(197): Ceres Seq. ID no. 12333659
  misc_feature (1)..(197): NCBI GI NO: 18409911 NR Description: expressed protein; protein id: At1g71780
  misc_feature (4)..(197): NCBI GI NO: 25373323 NR Description: hypothetical protein F14O23.16
  misc_feature (20)..(197): NCBI GI NO: 34910596 NR Description: B1131B07.26
  misc_feature (46)..(128): NCBI GI NO: 34906292 NR Description: unnamed protein product
MSSMTEKEKERDPPPPHQEIEETTPLLENSQPESELRSTTAAAKVPEVEIHLYKCGKGPIDVFKSNLGGYEQDQLEVRSILEKYGLKAIFAFNVEKGRAVPIRFHPRNGRSVLPYRDGAVIYIDGEPQDSLLKPITRIILGVVIVTLLITFLLKDPPAWIKNNISIGTFPPWVLACIVIVFTRARKRTRDFFKKYGW

SEQ ID NO: 996 - protein, 194 aa, Arabidopsis thaliana
  peptide (1)..(194): Ceres Seq. ID no. 12333660
  misc_feature (1)..(194): NCBI GI NO: 18409911 NR Description: expressed protein; protein id: At1g71780
  misc_feature (1)..(194): NCBI GI NO: 25373323 NR Description: hypothetical protein F14O23.16
  misc_feature (17)..(194): NCBI GI NO: 34910596 NR Description: B1131B07.26
  misc_feature (43)..(125): NCBI GI NO: 34906292 NR Description: unnamed protein product
MTEKEKERDPPPPHQEIEETTPLLENSQPESELRSTTAAAKVPEVEIHLYKCGKGPIDVFKSNLGGYEQDQLEVRSILEKYGLKAIFAFNVEKGRAVPIRFHPRNGRSVLPYRDGAVIYIDGEPQDSLLKPITRIILGVVIVTLLITFLLKDPPAWIKNNISIGTFPPWVLACIVIVFTRARKRTRDFFKKYGW

SEQ ID NO: 997 - DNA, 805 bp, Arabidopsis thaliana
  misc_feature (1)..(805): Ceres Seq. ID no. 12333653
agcattttctttcagctcaaacccaagaacctcatcgccgattatttcttcattcttactctatcccgcgccgattaatctctctcagaaccgtccgagatgaggaagctcaagtatcacgagaagaagcttataaagaaagtaaatttcttagaatggaaaagagaaggtaaccatcgggaaaacgagattacgtatcgataccacatgggctctcgtgatgattacaaaaagtattcaggattgtgtaggatgttgcagaaactgacgaatataatgaaacaaatggatcctgcagatccttttcgtattcagatgactgatatgcttttggagaagctatataacatgggtgttataccgactaggaaaagcttgactctaactgagcggttatcagtttcatccttctgtaggcgtaggctatctactgtgctggttcacctgaagtttgcagagcaccacaaagaagctgtgacatacatagagcaaggacacgttcgtgtaggaccagaaacaattactgatccagctttcttagtaactcggaacatggaagatttcatcacttgggttgattcatccaagattaaacgaaaggttcttgagtacaatgacacattggatgattatgacatgcttgcttagctttgaggaagttaaaaaagactgatgttttgtaaaagccaaaaaaggttcactgctactactattgcagggtttgtttggatttttgaatatgcaaatgtgctactattcccttgtctttaatcttactttcgatctatttgcaagaagaaacttg

SEQ ID NO: 998 - protein, 182 aa, Arabidopsis thaliana
  peptide (1)..(182): Ceres Seq. ID no. 12333654
  misc_feature (1)..(106): Pfam Name: Pfam Description:  Ribosomal protein S4/S9 N-terminal domain
  misc_feature (1)..(182): NCBI GI NO: 21554411 NR Description: ribosomal protein-like [Arabidopsis thaliana]
  misc_feature (1)..(182): NCBI GI NO: 18417773 NR Description: ribosomal protein-like; protein id: At5g15750
  misc_feature (1)..(182): NCBI GI NO: 11358773 NR Description: ribosomal protein-like - Arabidopsis thaliana
  misc_feature (1)..(182): NCBI GI NO: 38346067 NR Description: OSJNBa0084K01.7
  misc_feature (1)..(180): NCBI GI NO: 19527196 NR Description: RIKEN cDNA 1190002L16 [Mus musculus]
  misc_feature (1)..(180): NCBI GI NO: 34864645 NR Description: similar to RIKEN cDNA 1190002L16
  misc_feature (1)..(182): NCBI GI NO: 8922794 NR Description: chromosome 15 open reading frame 12
  misc_feature (1)..(179): NCBI GI NO: 6321942 NR Description: part of small
  misc_feature (1)..(181): NCBI GI NO: 19115815 NR Description: putative component of U3 snoRNP
  misc_feature (1)..(168): NCBI GI NO: 29124591 NR Description: Similar to chromosome 15 open reading frame 12
MRKLKYHEKKLIKKVNFLEWKREGNHRENEITYRYHMGSRDDYKKYSGLCRMLQKLTNIMKQMDPADPFRIQMTDMLLEKLYNMGVIPTRKSLTLTERLSVSSFCRRRLSTVLVHLKFAEHHKEAVTYIEQGHVRVGPETITDPAFLVTRNMEDFITWVDSSKIKRKVLEYNDTLDDYDMLA

SEQ ID NO: 999 - protein, 146 aa, Arabidopsis thaliana
  peptide (1)..(146): Ceres Seq. ID no. 12333655
  misc_feature (1)..(70): Pfam Name: Pfam Description:  Ribosomal protein S4/S9 N-terminal domain
  misc_feature (1)..(146): NCBI GI NO: 21554411 NR Description: ribosomal protein-like [Arabidopsis thaliana]
  misc_feature (1)..(146): NCBI GI NO: 18417773 NR Description: ribosomal protein-like; protein id: At5g15750
  misc_feature (1)..(146): NCBI GI NO: 11358773 NR Description: ribosomal protein-like - Arabidopsis thaliana
  misc_feature (1)..(146): NCBI GI NO: 38346067 NR Description: OSJNBa0084K01.7
  misc_feature (1)..(144): NCBI GI NO: 19527196 NR Description: RIKEN cDNA 1190002L16 [Mus musculus]
  misc_feature (1)..(144): NCBI GI NO: 34864645 NR Description: similar to RIKEN cDNA 1190002L16
  misc_feature (1)..(146): NCBI GI NO: 8922794 NR Description: chromosome 15 open reading frame 12
  misc_feature (1)..(143): NCBI GI NO: 6321942 NR Description: part of small
  misc_feature (1)..(145): NCBI GI NO: 19115815 NR Description: putative component of U3 snoRNP
  misc_feature (1)..(132): NCBI GI NO: 29124591 NR Description: Similar to chromosome 15 open reading frame 12
MGSRDDYKKYSGLCRMLQKLTNIMKQMDPADPFRIQMTDMLLEKLYNMGVIPTRKSLTLTERLSVSSFCRRRLSTVLVHLKFAEHHKEAVTYIEQGHVRVGPETITDPAFLVTRNMEDFITWVDSSKIKRKVLEYNDTLDDYDMLA

SEQ ID NO: 1000 - protein, 131 aa, Arabidopsis thaliana
  peptide (1)..(131): Ceres Seq. ID no. 12333656
  misc_feature (1)..(55): Pfam Name: Pfam Description:  Ribosomal protein S4/S9 N-terminal domain
  misc_feature (1)..(131): NCBI GI NO: 21554411 NR Description: ribosomal protein-like [Arabidopsis thaliana]
  misc_feature (1)..(131): NCBI GI NO: 18417773 NR Description: ribosomal protein-like; protein id: At5g15750
  misc_feature (1)..(131): NCBI GI NO: 11358773 NR Description: ribosomal protein-like - Arabidopsis thaliana
  misc_feature (1)..(131): NCBI GI NO: 38346067 NR Description: OSJNBa0084K01.7
  misc_feature (1)..(129): NCBI GI NO: 19527196 NR Description: RIKEN cDNA 1190002L16 [Mus musculus]
  misc_feature (1)..(129): NCBI GI NO: 34864645 NR Description: similar to RIKEN cDNA 1190002L16
  misc_feature (1)..(131): NCBI GI NO: 8922794 NR Description: chromosome 15 open reading frame 12
  misc_feature (1)..(128): NCBI GI NO: 6321942 NR Description: part of small
  misc_feature (1)..(130): NCBI GI NO: 19115815 NR Description: putative component of U3 snoRNP
  misc_feature (1)..(117): NCBI GI NO: 29124591 NR Description: Similar to chromosome 15 open reading frame 12
MLQKLTNIMKQMDPADPFRIQMTDMLLEKLYNMGVIPTRKSLTLTERLSVSSFCRRRLSTVLVHLKFAEHHKEAVTYIEQGHVRVGPETITDPAFLVTRNMEDFITWVDSSKIKRKVLEYNDTLDDYDMLA

SEQ ID NO: 1001 - DNA, 776 bp, Arabidopsis thaliana
  misc_feature (1)..(776): Ceres Seq. ID no. 13490249
aaccatatatatacacacaaaatatttgttaacaaaaagatttatatttcttctcttctttgttcataactaagaactcagaaagagaccaacgacactgcaaatggcggatgaatctccaaagtctatctacgacttcaccgtcaaggatatcggaggtaacgatgtgagtttggaccaatacaaaggcaaaactcttttggttgtaaacgttgcttccaaatgtggtctgacggatgcgaactacaaggaactgaatgttctgtacgagaaatacaaggagcaagggttggagatattagcattcccgtgtaatcagttcttaggacaagaaccaggaaacaatgaagagattcaacaaactgtctgcaccaggttcaaagctgaattccccatctttgacaaggtggatgtgaacggtaagaacacggcaccattatacaagtacttgaaagcagagaaaggaggtttgctcattgatgctatcaaatggaacttcaccaaattcttggtttctcctgatggcaaggtcttacagagatattctcccagaacctctcctcttcaattcgagaaggacattcaaactgcgttgggacaggcctcttcttaatcaccagaagaagaagtttcaagaactttcgtttggtccaaattatgatcttagaatcatcaacattgcaaacttattttctttgaattctatcattcttgttttaaataattgatgtattcgatgtcttttcatgggatgatatatcatatattatcatgcg

SEQ ID NO: 1002 - protein, 169 aa, Arabidopsis thaliana
  peptide (1)..(169): Ceres Seq. ID no. 13490250
  misc_feature (8)..(117): Pfam Name: Pfam Description:  Glutathione peroxidase
  misc_feature (1)..(169): NCBI GI NO: 15225103 NR Description: glutathione peroxidase, putative
  misc_feature (1)..(167): NCBI GI NO: 31872080 NR Description: phospholipid hydroperoxide glutathione peroxidase
  misc_feature (1)..(167): NCBI GI NO: 17646156 NR Description: phospholipid hydroperoxide glutathione peroxidase
  misc_feature (1)..(161): NCBI GI NO: 21068666 NR Description: putative phospholipid hydroperoxide glutathione peroxidase
  misc_feature (7)..(164): NCBI GI NO: 22329066 NR Description: glutathione peroxidase, putative
  misc_feature (2)..(167): NCBI GI NO: 21360380 NR Description: glutathione peroxidase 1 [Oryza sativa]
  misc_feature (1)..(165): NCBI GI NO: 20138384 NR Description: Probable phospholipid hydroperoxide glutathione peroxidase
  misc_feature (1)..(167): NCBI GI NO: 232190 NR Description: Probable phospholipid hydroperoxide glutathione peroxidase
  misc_feature (1)..(167): NCBI GI NO: 20138338 NR Description: Probable phospholipid hydroperoxide glutathione peroxidase
  misc_feature (1)..(167): NCBI GI NO: 485512 NR Description: glutathione peroxidase (EC 1
MADESPKSIYDFTVKDIGGNDVSLDQYKGKTLLVVNVASKCGLTDANYKELNVLYEKYKEQGLEILAFPCNQFLGQEPGNNEEIQQTVCTRFKAEFPIFDKVDVNGKNTAPLYKYLKAEKGGLLIDAIKWNFTKFLVSPDGKVLQRYSPRTSPLQFEKDIQTALGQASS

SEQ ID NO: 1003 - DNA, 982 bp, Arabidopsis thaliana
  misc_feature (1)..(982): Ceres Seq. ID no. 12482664
agattcagaaaccctaatttcttcacaaagcaaaacacagaaaaagccattctttttgccccttgagtgctttcagctcttcccacaaggttacagaagtaatgtcacgtgtgtacgtcggaaatttggacccgcgagttactgagcgtgaacttgaggatgagttccgtgcctttggagttgtcaggagtgtttgggttgcccgtagaccacctggttacgcttttctagatttcgaagatcctagggatgcccgtgatgctatccgtgctttagatggcaagaatggctggagggttgaacagtctcacaatcgaggtgagcgtggtggcggcggtcgtggtggtgaccgtggaggtggtggcggcggccgtggtggtcgtggtggctctgatttgaaatgctatgaatgcggtgagactggtcatttcgcacgtgaatgccgtaaccgtggtggaactggaaggcgtcgcagcaagagccgtagtcgcactcctccaagatacagaaggagcccaagctatggacggaggagttacagccctcgtgcaagatctccccctcctccaaggcgccgcagtccttctcctcctcctgcccgtggccgcagctacagtagatcaccacctccatacagagcgcgtgaggaagtgccatatgctaatggaaatggactgaaagaaagacgcagaagcaggagctgagtgagtgattttgcaagaaaacgagtgtgtgggaggatactttggaagagaagaagagagggactaagggaagttactatcatctatgaatttcagtaagagaacatgttttaggtctgctgggttggataaagcttgctacttttgcttttggatatgaaacgtacgtagttgtgtatctaccaataggtaaaagaacacttgattcgtaccctagtttcttaaagacataatgtttgattggaaattctgctaaatgcctaagcgtttcttgtctt

SEQ ID NO: 1004 - protein, 200 aa, Arabidopsis thaliana
  peptide (1)..(200): Ceres Seq. ID no. 12482665
  misc_feature (4)..(61): Pfam Name: a.k.a. RRM, RBD, or RNP domain Pfam Description: RNA recognition motif.
  misc_feature (1)..(200): NCBI GI NO: 15236000 NR Description: splicing factor SRZ_22; protein id: At4g31580
  misc_feature (1)..(200): NCBI GI NO: 25294318 NR Description: splicing factor RSZp22
  misc_feature (1)..(200): NCBI GI NO: 15224171 NR Description: putative RSZp22 splicing factor
  misc_feature (1)..(185): NCBI GI NO: 18395314 NR Description: splicing factor SRZ_21; protein id: At1g23860
  misc_feature (1)..(189): NCBI GI NO: 25294319 NR Description: splicing factor RSZp21
  misc_feature (1)..(189): NCBI GI NO: 25294317 NR Description: protein T23E23.2 [imported] - Arabidopsis thaliana
  misc_feature (3)..(191): NCBI GI NO: 24582360 NR Description: CG10203-PA [Drosophila melanogaster]
  misc_feature (2)..(174): NCBI GI NO: 25144919 NR Description: pre-mRNA splicing SR Protein RSP-6 (20
  misc_feature (1)..(152): NCBI GI NO: 29841408 NR Description: similar to NM_006276 splicing factor
  misc_feature (2)..(174): NCBI GI NO: 30584739 NR Description: Homo sapiens splicing factor
MSRVYVGNLDPRVTERELEDEFRAFGVVRSVWVARRPPGYAFLDFEDPRDARDAIRALDGKNGWRVEQSHNRGERGGGGRGGDRGGGGGGRGGRGGSDLKCYECGETGHFARECRNRGGTGRRRSKSRSRTPPRYRRSPSYGRRSYSPRARSPPPPRRRSPSPPPARGRSYSRSPPPYRAREEVPYANGNGLKERRRSRS

SEQ ID NO: 1005 - DNA, 1133 bp, Arabidopsis thaliana
  misc_feature (1)..(1133): Ceres Seq. ID no. 12436710
aagtgttcttgaggagaaggacgatcgatctaaggagacgatgaagatcttccacgttccttgtctgcaagacaactactcttatctgataatcgatgagagcaccggagacgcggcggttgtggatccagttgatccggagaaggtgatcgcatcggctgagaagcaccaagctaagatcaagttcgtactcactacgcatcatcactgggatcatgccggtggaaacgagaagattaagcagttggttcctgatatcaaagtatatggaggttctctggataaggtgaagggttgcactgatgcggttgataatggtgacaagctgactttgggtcaggatattaacatattggctctccacactccttggtttgtttgtttttttttttttttccaatgaatttagatgcatctaatctacttgatgtttaactcagtcattttctcttgtcatcgctgattcctctgatatatctacttgttacagtcacaccaagggtcacattagttattatgtgaccggaaaagaaggagaaaacccagccgtgttcaccggagatacactttttgttgctggatgtgggaagttttttgaagggacagctgagcagatgtatcagtcgttgtgtgtgactctggctgcattacctaaaccgacacaggtttactgcggccatgagtacaccgttaagaacttggaatttgctctaactgtggaaccaaacaacgggaagatacaacagaagttagcatgggcccgtcaacagcgccaagcagatcttcccacaatcccttcaacactggaggaagagctcgaaacaaatccatttatgcgtgttgataagccagagatacaggagaaactcggttgcaagtcgccaattgatacaatgagggaagttcggaacaagaaggatcagtggaggggatgatgataaatggagagcttcttgcctatgttttgtgtacttgtgttgaatgatcctgtaaaaggtgtatgaaccagtaatgttgatattctgtgtgaaactgtgaaccggtttggtaaaccgaaatcagaccgacctgtaagccgtactccctttttgaattttcagtttactatggataataatttcagtgtctacacc

SEQ ID NO: 1006 - protein, 133 aa, Arabidopsis thaliana
  peptide (1)..(133): Ceres Seq. ID no. 12436711
  misc_feature (24)..(123): Pfam Name: Pfam Description:  Metallo-beta-lactamase superfamily
  misc_feature (14)..(123): NCBI GI NO: 15228389 NR Description: glyoxalase II
  misc_feature (14)..(123): NCBI GI NO: 2570342 NR Description: glyoxalase II cytoplasmic isozyme
  misc_feature (14)..(129): NCBI GI NO: 21729786 NR Description: hydroxyacyl glutathione hydrolase
  misc_feature (14)..(129): NCBI GI NO: 15375320 NR Description: hydroxyacyl glutathione hydrolase
  misc_feature (14)..(129): NCBI GI NO: 4885389 NR Description: hydroxyacyl glutathione hydrolase
  misc_feature (14)..(129): NCBI GI NO: 2494848 NR Description: Hydroxyacylglutathione hydrolase
  misc_feature (7)..(123): NCBI GI NO: 21356335 NR Description: CG4365-PA [Drosophila melanogaster]
  misc_feature (7)..(123): NCBI GI NO: 24667703 NR Description: CG4365-PC [Drosophila melanogaster]
  misc_feature (7)..(123): NCBI GI NO: 24667711 NR Description: CG4365-PB [Drosophila melanogaster]
  misc_feature (14)..(123): NCBI GI NO: 29841459 NR Description: similar to probable hydroxyacylglutathione hydrolase
SVLEEKDDRSKETMKIFHVPCLQDNYSYLIIDESTGDAAVVDPVDPEKVIASAEKHQAKIKFVLTTHHHWDHAGGNEKIKQLVPDIKVYGGSLDKVKGCTDAVDNGDKLTLGQDINILALHTPWFVCFFFFFQ

SEQ ID NO: 1007 - protein, 120 aa, Arabidopsis thaliana
  peptide (1)..(120): Ceres Seq. ID no. 12436712
  misc_feature (11)..(110): Pfam Name: Pfam Description:  Metallo-beta-lactamase superfamily
  misc_feature (1)..(110): NCBI GI NO: 15228389 NR Description: glyoxalase II
  misc_feature (1)..(110): NCBI GI NO: 2570342 NR Description: glyoxalase II cytoplasmic isozyme
  misc_feature (1)..(116): NCBI GI NO: 21729786 NR Description: hydroxyacyl glutathione hydrolase
  misc_feature (1)..(116): NCBI GI NO: 15375320 NR Description: hydroxyacyl glutathione hydrolase
  misc_feature (1)..(116): NCBI GI NO: 4885389 NR Description: hydroxyacyl glutathione hydrolase
  misc_feature (1)..(116): NCBI GI NO: 2494848 NR Description: Hydroxyacylglutathione hydrolase
  misc_feature (1)..(110): NCBI GI NO: 21356335 NR Description: CG4365-PA [Drosophila melanogaster]
  misc_feature (1)..(110): NCBI GI NO: 24667703 NR Description: CG4365-PC [Drosophila melanogaster]
  misc_feature (1)..(110): NCBI GI NO: 24667711 NR Description: CG4365-PB [Drosophila melanogaster]
  misc_feature (1)..(110): NCBI GI NO: 29841459 NR Description: similar to probable hydroxyacylglutathione hydrolase
MKIFHVPCLQDNYSYLIIDESTGDAAVVDPVDPEKVIASAEKHQAKIKFVLTTHHHWDHAGGNEKIKQLVPDIKVYGGSLDKVKGCTDAVDNGDKLTLGQDINILALHTPWFVCFFFFFQ

SEQ ID NO: 1008 - protein, 106 aa, Arabidopsis thaliana
  peptide (1)..(106): Ceres Seq. ID no. 12436713
  misc_feature (1)..(106): NCBI GI NO: 15228389 NR Description: glyoxalase II
  misc_feature (1)..(106): NCBI GI NO: 2570342 NR Description: glyoxalase II cytoplasmic isozyme
  misc_feature (1)..(105): NCBI GI NO: 21729786 NR Description: hydroxyacyl glutathione hydrolase
  misc_feature (1)..(105): NCBI GI NO: 15375320 NR Description: hydroxyacyl glutathione hydrolase
  misc_feature (1)..(105): NCBI GI NO: 4885389 NR Description: hydroxyacyl glutathione hydrolase
  misc_feature (1)..(105): NCBI GI NO: 2494848 NR Description: Hydroxyacylglutathione hydrolase
  misc_feature (1)..(105): NCBI GI NO: 21356335 NR Description: CG4365-PA [Drosophila melanogaster]
  misc_feature (1)..(105): NCBI GI NO: 24667703 NR Description: CG4365-PC [Drosophila melanogaster]
  misc_feature (1)..(105): NCBI GI NO: 24667711 NR Description: CG4365-PB [Drosophila melanogaster]
  misc_feature (1)..(104): NCBI GI NO: 29841459 NR Description: similar to probable hydroxyacylglutathione hydrolase
MYQSLCVTLAALPKPTQVYCGHEYTVKNLEFALTVEPNNGKIQQKLAWARQQRQADLPTIPSTLEEELETNPFMRVDKPEIQEKLGCKSPIDTMREVRNKKDQWRG

SEQ ID NO: 1009 - DNA, 1500 bp, Arabidopsis thaliana
  misc_feature (1)..(1500): Ceres Seq. ID no. 13497169
gttgatcaacaattaaacacaaaaacccttaagttgacatggctgtatctcttccaactcttaaaaatcaattactattatacccctcagaaaaatggcagagcgtgtgtctctcacactcaacggaaccctcctttctcctcctcccacaacaacaacaacaacaatgtcttcttctctccgatctaccaccgccgcttctcttctcctccgctcctcctcctcctcctccagatccactctcactctctccgcttcctcctctctctccttcgtcagatctctcgtctcttctccacgtctctcttcttcttcatccctctctcagaagaaatatcgaattgcgtcggtgaatcggagtttcaactccaccaccgccgctactaaatcttcatcttcagatcctgatcagttgaagaacgctagagaagatatcaaagagcttctcagcaccaaattctgccatccgattttggttagattaggttggcatgatgctggtacgtataacaagaacattaaggaatggccacaaagaggtggagctaatggaagtttgagattcgatattgagcttaaacatgctgctaacgctggtcttgtgaatgctttaaacttgattaaggatatcaaagagaaatactctgggatcagttatgctgatttgttccagttagctagtgctactgctatagaggaagctggaggaccgaaaataccgatgaaatatggtagagttgatgcctctggtcctgaggattgtccagaagaaggaaggcttccagatgctggtcctccttcacctgctactcatctcagagaagttttttacagaatgggattagatgacaaggacatagttgcattatctggtgctcacacgttaggaagatctaggccagaacgtagtggttgggggaagcctgagacgaagtacacgaaagaaggacctggagcaccaggaggacagtcatggacaccagagtggctgaagtttgataattcttacttcaaggagatcaaggaaaagagagatgaagatctccttgtcctacccactgatgctgccatcttcgaagattcttctttcaaggtctatgctgaaaagtatgctgcagatcaggatgcatttttcaaggattacgctgtagcccatgcgaagctcagcaatcttggagcagaatttaaccctccggagggtatcgttatctaatgggggcacataatttactcaaccagacttatgattttagagaaacgtagttcaataatgaaagagaagaaaaagttgacggagaacttttcatgcgagtacttttcgagataccttttggacaaatgtttctggctgttcaaaggattttgtttagccgaaagtatttgatcgttttcatggttttgtgctttcatgtttttttcttgtaataaattgcggaagtgattatccaaaatctatacaaattttgtctggaattgaattattttatcgatgttataact

SEQ ID NO: 1010 - protein, 372 aa, Arabidopsis thaliana
  peptide (1)..(372): Ceres Seq. ID no. 13497170
  misc_feature (110)..(342): Pfam Name: Pfam Description:  Peroxidase
  misc_feature (1)..(372): NCBI GI NO: 15236483 NR Description: stromal ascorbate peroxidase, putative (sAPX)
  misc_feature (1)..(372): NCBI GI NO: 1419388 NR Description: stromal ascorbate peroxidase
  misc_feature (20)..(372): NCBI GI NO: 2146725 NR Description: L-ascorbate peroxidase (EC 1
  misc_feature (25)..(372): NCBI GI NO: 1369920 NR Description: stromal ascorbate peroxidase [Spinacia oleracea]
  misc_feature (25)..(372): NCBI GI NO: 1944507 NR Description: thylakoid-bound ascorbate peroxidase
  misc_feature (25)..(372): NCBI GI NO: 2832920 NR Description: thylakoid-bound ascorbate peroxidase
  misc_feature (25)..(372): NCBI GI NO: 2832921 NR Description: stromal ascorbate peroxidase [Spinacia oleracea]
  misc_feature (14)..(372): NCBI GI NO: 7484621 NR Description: L-ascorbate peroxidase (EC 1
  misc_feature (12)..(372): NCBI GI NO: 4996602 NR Description: thylakoid-bound ascorbate peroxidase
  misc_feature (12)..(372): NCBI GI NO: 4996604 NR Description: stromal ascorbate peroxidase [Nicotiana tabacum]
MAERVSLTLNGTLLSPPPTTTTTTMSSSLRSTTAASLLLRSSSSSSRSTLTLSASSSLSFVRSLVSSPRLSSSSSLSQKKYRIASVNRSFNSTTAATKSSSSDPDQLKNAREDIKELLSTKFCHPILVRLGWHDAGTYNKNIKEWPQRGGANGSLRFDIELKHAANAGLVNALNLIKDIKEKYSGISYADLFQLASATAIEEAGGPKIPMKYGRVDASGPEDCPEEGRLPDAGPPSPATHLREVFYRMGLDDKDIVALSGAHTLGRSRPERSGWGKPETKYTKEGPGAPGGQSWTPEWLKFDNSYFKEIKEKRDEDLLVLPTDAAIFEDSSFKVYAEKYAADQDAFFKDYAVAHAKLSNLGAEFNPPEGIVI

SEQ ID NO: 1011 - protein, 348 aa, Arabidopsis thaliana
  peptide (1)..(348): Ceres Seq. ID no. 13497171
  misc_feature (86)..(318): Pfam Name: Pfam Description:  Peroxidase
  misc_feature (1)..(348): NCBI GI NO: 15236483 NR Description: stromal ascorbate peroxidase, putative (sAPX)
  misc_feature (1)..(348): NCBI GI NO: 1419388 NR Description: stromal ascorbate peroxidase
  misc_feature (1)..(348): NCBI GI NO: 2146725 NR Description: L-ascorbate peroxidase (EC 1
  misc_feature (1)..(348): NCBI GI NO: 1369920 NR Description: stromal ascorbate peroxidase [Spinacia oleracea]
  misc_feature (1)..(348): NCBI GI NO: 1944507 NR Description: thylakoid-bound ascorbate peroxidase
  misc_feature (1)..(348): NCBI GI NO: 2832920 NR Description: thylakoid-bound ascorbate peroxidase
  misc_feature (1)..(348): NCBI GI NO: 2832921 NR Description: stromal ascorbate peroxidase [Spinacia oleracea]
  misc_feature (1)..(348): NCBI GI NO: 7484621 NR Description: L-ascorbate peroxidase (EC 1
  misc_feature (1)..(348): NCBI GI NO: 4996602 NR Description: thylakoid-bound ascorbate peroxidase
  misc_feature (1)..(348): NCBI GI NO: 4996604 NR Description: stromal ascorbate peroxidase [Nicotiana tabacum]
MSSSLRSTTAASLLLRSSSSSSRSTLTLSASSSLSFVRSLVSSPRLSSSSSLSQKKYRIASVNRSFNSTTAATKSSSSDPDQLKNAREDIKELLSTKFCHPILVRLGWHDAGTYNKNIKEWPQRGGANGSLRFDIELKHAANAGLVNALNLIKDIKEKYSGISYADLFQLASATAIEEAGGPKIPMKYGRVDASGPEDCPEEGRLPDAGPPSPATHLREVFYRMGLDDKDIVALSGAHTLGRSRPERSGWGKPETKYTKEGPGAPGGQSWTPEWLKFDNSYFKEIKEKRDEDLLVLPTDAAIFEDSSFKVYAEKYAADQDAFFKDYAVAHAKLSNLGAEFNPPEGIVI

SEQ ID NO: 1012 - DNA, 1123 bp, Arabidopsis thaliana
  misc_feature (1)..(1123): Ceres Seq. ID no. 12394899
acattcatcaacacaaaagatacccagagagacataagaaagaaagagagagagagatactttggtcatttcagggttgtcgtttctctctcttgttcttgagattttgaagagagagagatatgggaagaggtagggttcagctgaagaggatagagaacaagatcaataggcaagttactttctcaaagagaaggtctggtttgctcaagaaagctcatgagatctctgttctctgcgatgctgaggttgctctcatcgtcttctcttccaaaggcaaactcttcgaatattccaccgactcttgcatggagaggatacttgaacgctatgatcgctatttatattcagacaaacaacttgttggccgagacgtttcacaaagtgaaaattgggttctagaacatgctaagctcaaggcaagagttgaggtacttgagaagaacaaaaggaattttatgggggaagatcttgattcgttgagcttgaaggagcttcaaagcttggagcatcagctcgatgcagctatcaagagcattaggtcaagaaagaaccaagctatgttcgaatccatatctgcgctccagaagaaggataaagccttgcaagatcacaacaattcgcttctcaaaaagattaaggagagggagaagaaaacgggtcagcaagaaggacaattagtccaatgctccaactcttcttcagttcttctgcctcaatactgcgtaacctcctccagagatggctttgtggagagagttgggggagagaacggtggtgcatcgtcgttgacggaaccaaactctctgcttccggcttggatgttacgtcctaccactacgaacgagtagaactatctcactctttataatataatgataatataattaatgtttaatattttcataacattcagcatttttttggtgacttatactcattactaataccgatatgttttagctagtcatattatatgtatgatggaactccgttgtcgagacgtatgtacgtaagctatcattagattcactgcgtcttaagaacaaagattcatatcttggtaatgatttctcatgaataattaatgtaacttttactttttaaaaaaaaaaagcaaact

SEQ ID NO: 1013 - protein, 242 aa, Arabidopsis thaliana
  peptide (1)..(242): Ceres Seq. ID no. 12394900
  misc_feature (75)..(174): Pfam Name: Pfam Description:  K-box region
  misc_feature (1)..(242): NCBI GI NO: 18424410 NR Description: MADS-box protein; protein id: At5g60910
  misc_feature (1)..(239): NCBI GI NO: 23304678 NR Description: MADS-box protein FUL-d
  misc_feature (1)..(242): NCBI GI NO: 23304676 NR Description: MADS-box protein FUL-c
  misc_feature (3)..(242): NCBI GI NO: 23304672 NR Description: MADS-box protein FUL-a
  misc_feature (1)..(242): NCBI GI NO: 3913000 NR Description: Agamous-like MADS box protein AGL8 homolog
  misc_feature (1)..(239): NCBI GI NO: 23304674 NR Description: MADS-box protein FUL-b
  misc_feature (1)..(236): NCBI GI NO: 1483232 NR Description: MADS5 protein [Betula pendula]
  misc_feature (1)..(236): NCBI GI NO: 5070142 NR Description: MADS-box protein MADS1 [Nicotiana sylvestris]
  misc_feature (1)..(236): NCBI GI NO: 27373049 NR Description: MADS11 [Nicotiana tabacum]
  misc_feature (1)..(236): NCBI GI NO: 14518447 NR Description: MADS box protein [Capsicum annuum]
MGRGRVQLKRIENKINRQVTFSKRRSGLLKKAHEISVLCDAEVALIVFSSKGKLFEYSTDSCMERILERYDRYLYSDKQLVGRDVSQSENWVLEHAKLKARVEVLEKNKRNFMGEDLDSLSLKELQSLEHQLDAAIKSIRSRKNQAMFESISALQKKDKALQDHNNSLLKKIKEREKKTGQQEGQLVQCSNSSSVLLPQYCVTSSRDGFVERVGGENGGASSLTEPNSLLPAWMLRPTTTNE

SEQ ID NO: 1014 - protein, 180 aa, Arabidopsis thaliana
  peptide (1)..(180): Ceres Seq. ID no. 12394901
  misc_feature (13)..(112): Pfam Name: Pfam Description:  K-box region
  misc_feature (1)..(180): NCBI GI NO: 18424410 NR Description: MADS-box protein; protein id: At5g60910
  misc_feature (1)..(177): NCBI GI NO: 23304678 NR Description: MADS-box protein FUL-d
  misc_feature (1)..(180): NCBI GI NO: 23304676 NR Description: MADS-box protein FUL-c
  misc_feature (1)..(180): NCBI GI NO: 23304672 NR Description: MADS-box protein FUL-a
  misc_feature (1)..(180): NCBI GI NO: 3913000 NR Description: Agamous-like MADS box protein AGL8 homolog
  misc_feature (1)..(177): NCBI GI NO: 23304674 NR Description: MADS-box protein FUL-b
  misc_feature (1)..(174): NCBI GI NO: 1483232 NR Description: MADS5 protein [Betula pendula]
  misc_feature (1)..(174): NCBI GI NO: 5070142 NR Description: MADS-box protein MADS1 [Nicotiana sylvestris]
  misc_feature (1)..(174): NCBI GI NO: 27373049 NR Description: MADS11 [Nicotiana tabacum]
  misc_feature (1)..(174): NCBI GI NO: 14518447 NR Description: MADS box protein [Capsicum annuum]
MERILERYDRYLYSDKQLVGRDVSQSENWVLEHAKLKARVEVLEKNKRNFMGEDLDSLSLKELQSLEHQLDAAIKSIRSRKNQAMFESISALQKKDKALQDHNNSLLKKIKEREKKTGQQEGQLVQCSNSSSVLLPQYCVTSSRDGFVERVGGENGGASSLTEPNSLLPAWMLRPTTTNE

SEQ ID NO: 1015 - protein, 130 aa, Arabidopsis thaliana
  peptide (1)..(130): Ceres Seq. ID no. 12394902
  misc_feature (1)..(62): Pfam Name: Pfam Description:  K-box region
  misc_feature (1)..(130): NCBI GI NO: 18424410 NR Description: MADS-box protein; protein id: At5g60910
  misc_feature (1)..(127): NCBI GI NO: 23304678 NR Description: MADS-box protein FUL-d
  misc_feature (1)..(130): NCBI GI NO: 23304676 NR Description: MADS-box protein FUL-c
  misc_feature (1)..(130): NCBI GI NO: 23304672 NR Description: MADS-box protein FUL-a
  misc_feature (1)..(130): NCBI GI NO: 3913000 NR Description: Agamous-like MADS box protein AGL8 homolog
  misc_feature (1)..(127): NCBI GI NO: 23304674 NR Description: MADS-box protein FUL-b
  misc_feature (1)..(124): NCBI GI NO: 1483232 NR Description: MADS5 protein [Betula pendula]
  misc_feature (1)..(124): NCBI GI NO: 5070142 NR Description: MADS-box protein MADS1 [Nicotiana sylvestris]
  misc_feature (1)..(124): NCBI GI NO: 27373049 NR Description: MADS11 [Nicotiana tabacum]
  misc_feature (1)..(124): NCBI GI NO: 14518447 NR Description: MADS box protein [Capsicum annuum]
MGEDLDSLSLKELQSLEHQLDAAIKSIRSRKNQAMFESISALQKKDKALQDHNNSLLKKIKEREKKTGQQEGQLVQCSNSSSVLLPQYCVTSSRDGFVERVGGENGGASSLTEPNSLLPAWMLRPTTTNE

SEQ ID NO: 1016 - DNA, 1307 bp, Arabidopsis thaliana
  misc_feature (1)..(1307): Ceres Seq. ID no. 12482093
aagacaaaaggagcggtttggtgaagttagttaaaagagttgggtttcttcgtaagcatcgaaatcagatttctttaccaaagaaaaaataaagaaaagaaaaatatagcaagtacactgcatttcaacactctcatatctctccttcctacttcctcggtttcatcgtccactgtctcaacaatggcgtcattgtcggtaccttgcgtcaagatctgtgctctgaacaggcgggtcggatctctccctggaatctctactcaaagatggcagccgcaacccaatgggatctcctttccctccgatgtttctcagaatcattctgcattctggaggttgcgtgcaacaactaatgaggttgtttctaactccactccaatgactaatggtgggtatatgaacggaaaagcgaaaaccaatgttcctgaacccgccgagctctctgaatttatggctaaagtctctggtcttcttaagcttgtggattcaaaagacatagtggaacttgaactaaagcagctcgactgtgagatcgttattcgaaagaaggaagctttacagcaagctgtaccaccagctccagtttatcactcaatgcctcctgtaatggcagacttttcaatgcctccagctcaaccagtggctcttcctccttctcctactcctacctcaacgcctgcaacagcaaaaccaacatccgccccatcctcgtctcatcctccactcaagagtcccatggctggtactttctatagatctcctggacccggtgaacccccttttgtaaaggttggagataaggtacagaagggtcaaattgtttgtattatcgaagctatgaaactgatgaacgagattgaggctgagaagtcaggaaccatcatggaactactggctgaagatggaaaaccagtcagcgttgacacgcctctttttgtcatcgcaccttgaaacgaagaaggatccttttagctgcttcaaaacatcttcaaagtctcggttaagctatagcaacgtgctaaaactcatcaagtaattatttcagcttaagttggttggtttcggatttctgcttgtcgcttcaataattgacccatcttttgggatttcacgtaacgtactacactttgctttttagttttctgcgaaactaatgtattttgtagcctctcaatcctggctctctgtcccatacttcagttttttacacaacgcactgcttataaaagcacagttaaaggtgtctaaaggagaatggtgtgtctttgactgaggcaacaaataaaacagtgaaaagttaaggtttt

SEQ ID NO: 1017 - protein, 255 aa, Arabidopsis thaliana
  peptide (1)..(255): Ceres Seq. ID no. 12482094
  misc_feature (179)..(253): Pfam Name: Pfam Description:  Biotin-requiring enzyme
  misc_feature (1)..(255): NCBI GI NO: 18417704 NR Description: biotin carboxyl carrier protein 2
  misc_feature (36)..(252): NCBI GI NO: 11357199 NR Description: biotin carboxyl carrier protein homolog T20K14.140
  misc_feature (1)..(255): NCBI GI NO: 2129789 NR Description: biotin carboxyl carrier protein precursor
  misc_feature (1)..(255): NCBI GI NO: 2129787 NR Description: biotin carboxyl carrier protein
  misc_feature (114)..(255): NCBI GI NO: 2129788 NR Description: biotin carboxyl carrier protein
  misc_feature (45)..(255): NCBI GI NO: 29169309 NR Description: biotin carboxylase carrier protein
  misc_feature (1)..(255): NCBI GI NO: 3334130 NR Description: Biotin carboxyl carrier protein of acetyl-CoA carboxylase
  misc_feature (15)..(255): NCBI GI NO: 1066348 NR Description: acetyl-CoA carboxylase biotin-containing subunit
  misc_feature (15)..(255): NCBI GI NO: 15237339 NR Description: biotin carboxyl carrier protein 1
  misc_feature (15)..(255): NCBI GI NO: 1588550 NR Description: Ac-CoA carboxylase
MASLSVPCVKICALNRRVGSLPGISTQRWQPQPNGISFPSDVSQNHSAFWRLRATTNEVVSNSTPMTNGGYMNGKAKTNVPEPAELSEFMAKVSGLLKLVDSKDIVELELKQLDCEIVIRKKEALQQAVPPAPVYHSMPPVMADFSMPPAQPVALPPSPTPTSTPATAKPTSAPSSSHPPLKSPMAGTFYRSPGPGEPPFVKVGDKVQKGQIVCIIEAMKLMNEIEAEKSGTIMELLAEDGKPVSVDTPLFVIAP

SEQ ID NO: 1018 - protein, 190 aa, Arabidopsis thaliana
  peptide (1)..(190): Ceres Seq. ID no. 12482095
  misc_feature (114)..(188): Pfam Name: Pfam Description:  Biotin-requiring enzyme
  misc_feature (1)..(190): NCBI GI NO: 18417704 NR Description: biotin carboxyl carrier protein 2
  misc_feature (1)..(187): NCBI GI NO: 11357199 NR Description: biotin carboxyl carrier protein homolog T20K14.140
  misc_feature (1)..(190): NCBI GI NO: 2129789 NR Description: biotin carboxyl carrier protein precursor
  misc_feature (1)..(190): NCBI GI NO: 2129787 NR Description: biotin carboxyl carrier protein
  misc_feature (49)..(190): NCBI GI NO: 2129788 NR Description: biotin carboxyl carrier protein
  misc_feature (1)..(190): NCBI GI NO: 29169309 NR Description: biotin carboxylase carrier protein
  misc_feature (1)..(190): NCBI GI NO: 3334130 NR Description: Biotin carboxyl carrier protein of acetyl-CoA carboxylase
  misc_feature (1)..(190): NCBI GI NO: 1066348 NR Description: acetyl-CoA carboxylase biotin-containing subunit
  misc_feature (1)..(190): NCBI GI NO: 15237339 NR Description: biotin carboxyl carrier protein 1
  misc_feature (1)..(190): NCBI GI NO: 1588550 NR Description: Ac-CoA carboxylase
MTNGGYMNGKAKTNVPEPAELSEFMAKVSGLLKLVDSKDIVELELKQLDCEIVIRKKEALQQAVPPAPVYHSMPPVMADFSMPPAQPVALPPSPTPTSTPATAKPTSAPSSSHPPLKSPMAGTFYRSPGPGEPPFVKVGDKVQKGQIVCIIEAMKLMNEIEAEKSGTIMELLAEDGKPVSVDTPLFVIAP

SEQ ID NO: 1019 - protein, 184 aa, Arabidopsis thaliana
  peptide (1)..(184): Ceres Seq. ID no. 12482096
  misc_feature (108)..(182): Pfam Name: Pfam Description:  Biotin-requiring enzyme
  misc_feature (1)..(184): NCBI GI NO: 18417704 NR Description: biotin carboxyl carrier protein 2
  misc_feature (1)..(181): NCBI GI NO: 11357199 NR Description: biotin carboxyl carrier protein homolog T20K14.140
  misc_feature (1)..(184): NCBI GI NO: 2129789 NR Description: biotin carboxyl carrier protein precursor
  misc_feature (1)..(184): NCBI GI NO: 2129787 NR Description: biotin carboxyl carrier protein
  misc_feature (43)..(184): NCBI GI NO: 2129788 NR Description: biotin carboxyl carrier protein
  misc_feature (1)..(184): NCBI GI NO: 29169309 NR Description: biotin carboxylase carrier protein
  misc_feature (1)..(184): NCBI GI NO: 3334130 NR Description: Biotin carboxyl carrier protein of acetyl-CoA carboxylase
  misc_feature (1)..(184): NCBI GI NO: 1066348 NR Description: acetyl-CoA carboxylase biotin-containing subunit
  misc_feature (1)..(184): NCBI GI NO: 15237339 NR Description: biotin carboxyl carrier protein 1
  misc_feature (1)..(184): NCBI GI NO: 1588550 NR Description: Ac-CoA carboxylase
MNGKAKTNVPEPAELSEFMAKVSGLLKLVDSKDIVELELKQLDCEIVIRKKEALQQAVPPAPVYHSMPPVMADFSMPPAQPVALPPSPTPTSTPATAKPTSAPSSSHPPLKSPMAGTFYRSPGPGEPPFVKVGDKVQKGQIVCIIEAMKLMNEIEAEKSGTIMELLAEDGKPVSVDTPLFVIAP

SEQ ID NO: 1020 - DNA, 1552 bp, Arabidopsis thaliana
  misc_feature (1)..(1552): Ceres Seq. ID no. 12325208
atgtagatttgactttgtttcaaagcggaggaagaaggagaaggcaacactaaagatcaaaaccttagatctttgcttacgctttcctctggttaggaacggtttttcagaaacaaaagattccatttttagattcaattcccttctggtttgaaaaatgatatcaaaatggtgaatagaagtgatttggtggtgattggcatctcggttgggcttgcacttggtctcttgctcgctctgcttttgttcttcgccataaaatggtactatggccgctctcacctcaggcgatgcgctaatgaacagaattccccgactctacctgttcacactgctaaaagaggtgtagtaatccctgatgatagagcaaacacagaatcgtcacagccacctgagaatggagcaccaactcaacatcagccatggtggaacaaccacaccaaagatctcactgtatctgcatccggcatacctagatataactacaaggatattcagaaagcaacacaaaatttcacaaccgttctaggacaaggatcttttggtcctgtctacaaagcggttatgcccaatggagaattagctgcagcgaaagttcatggctctaattcaagtcaaggagacagagagtttcaaaccgaggtatctttacttgggagactgcatcaccggaatcttgtgaacttgacaggatactgtgtcgataaaagtcaccggatgttgatctatgagttcatgagtaatggaagtttggagaatcttttgtatggcggaatgcaagtcttgaattgggaagagcggcttcaaatcgctcttgacatctcccacggcattgaataccttcacgaaggggccgtgccgccagttattcaccgtgatcttaagtcagcaaacattttgttagatcattccatgagagctaaggtcgcggatttcgggttgtcgaaagagatggttttagatagaatgacttccggattgaagggtactcacggctacatggatccaacatacatttcgactaacaaatacacgatgaagagcgacatttacagtttcggtgtcatcattcttgagctcattactgcaatccatccccaacagaatctgatggaatacatcaacctggcttcgatgagtccagatggtatcgacgaaatactcgatcagaaactagtgggaaacgcaagcattgaagaagtgaggttactggcgaagattgcaaacaggtgtgtgcataagacaccaagaaaaagaccatctattggagaagtaacacagttcatactaaagatcaaacaaagtcggtctcgaggaagaagacaggacacgatgtcttcatcgtttggtgttggttatgaggaagatctgtcaagggttatgagcaggattaaggatcagcatgttgagttagggttattggctggtgttaaggaagagaatcatcaagagaggaacattgcaacaacatagtaactatttactttaggagtaagtctttttgtacatattaccacatgaggctcaaaagtaagatttctccctcttctgc

SEQ ID NO: 1021 - protein, 434 aa, Arabidopsis thaliana
  peptide (1)..(434): Ceres Seq. ID no. 12325209
  misc_feature (114)..(373): Pfam Name: Pfam Description:  Protein kinase domain
  misc_feature (1)..(434): NCBI GI NO: 18417765 NR Description: serine/threonine-specific protein kinase-like protein
  misc_feature (1)..(434): NCBI GI NO: 11358843 NR Description: serine/threonine-specific protein kinase-like protein -Arabidopsis thaliana
  misc_feature (1)..(423): NCBI GI NO: 1076634 NR Description: serine/threonine-specific protein kinase NPK15
  misc_feature (1)..(382): NCBI GI NO: 38636770 NR Description: putative serine/threonine-specific protein kinase
  misc_feature (1)..(392): NCBI GI NO: 30696480 NR Description: protein kinase family [Arabidopsis thaliana]
  misc_feature (72)..(399): NCBI GI NO: 38345516 NR Description: OSJNBa0039K24.19
  misc_feature (63)..(396): NCBI GI NO: 15227790 NR Description: putative protein kinase; protein id: At2g23200.1
  misc_feature (79)..(413): NCBI GI NO: 8978273 NR Description: receptor protein kinase-like
  misc_feature (87)..(401): NCBI GI NO: 30699436 NR Description: leucine-rich repeat transmembrane protein kinase
  misc_feature (87)..(401): NCBI GI NO: 7715608 NR Description: F20B17.5 [Arabidopsis thaliana]
MVNRSDLVVIGISVGLALGLLLALLLFFAIKWYYGRSHLRRCANEQNSPTLPVHTAKRGVVIPDDRANTESSQPPENGAPTQHQPWWNNHTKDLTVSASGIPRYNYKDIQKATQNFTTVLGQGSFGPVYKAVMPNGELAAAKVHGSNSSQGDREFQTEVSLLGRLHHRNLVNLTGYCVDKSHRMLIYEFMSNGSLENLLYGGMQVLNWEERLQIALDISHGIEYLHEGAVPPVIHRDLKSANILLDHSMRAKVADFGLSKEMVLDRMTSGLKGTHGYMDPTYISTNKYTMKSDIYSFGVIILELITAIHPQQNLMEYINLASMSPDGIDEILDQKLVGNASIEEVRLLAKIANRCVHKTPRKRPSIGEVTQFILKIKQSRSRGRRQDTMSSSFGVGYEEDLSRVMSRIKDQHVELGLLAGVKEENHQERNIATT

SEQ ID NO: 1022 - protein, 302 aa, Arabidopsis thaliana
  peptide (1)..(302): Ceres Seq. ID no. 12325210
  misc_feature (1)..(241): Pfam Name: Pfam Description:  Protein kinase domain
  misc_feature (1)..(302): NCBI GI NO: 18417765 NR Description: serine/threonine-specific protein kinase-like protein
  misc_feature (1)..(302): NCBI GI NO: 11358843 NR Description: serine/threonine-specific protein kinase-like protein -Arabidopsis thaliana
  misc_feature (1)..(291): NCBI GI NO: 1076634 NR Description: serine/threonine-specific protein kinase NPK15
  misc_feature (1)..(250): NCBI GI NO: 38636770 NR Description: putative serine/threonine-specific protein kinase
  misc_feature (1)..(260): NCBI GI NO: 30696480 NR Description: protein kinase family [Arabidopsis thaliana]
  misc_feature (1)..(267): NCBI GI NO: 38345516 NR Description: OSJNBa0039K24.19
  misc_feature (1)..(264): NCBI GI NO: 15227790 NR Description: putative protein kinase; protein id: At2g23200.1
  misc_feature (1)..(281): NCBI GI NO: 8978273 NR Description: receptor protein kinase-like
  misc_feature (1)..(269): NCBI GI NO: 30699436 NR Description: leucine-rich repeat transmembrane protein kinase
  misc_feature (1)..(269): NCBI GI NO: 7715608 NR Description: F20B17.5 [Arabidopsis thaliana]
MPNGELAAAKVHGSNSSQGDREFQTEVSLLGRLHHRNLVNLTGYCVDKSHRMLIYEFMSNGSLENLLYGGMQVLNWEERLQIALDISHGIEYLHEGAVPPVIHRDLKSANILLDHSMRAKVADFGLSKEMVLDRMTSGLKGTHGYMDPTYISTNKYTMKSDIYSFGVIILELITAIHPQQNLMEYINLASMSPDGIDEILDQKLVGNASIEEVRLLAKIANRCVHKTPRKRPSIGEVTQFILKIKQSRSRGRRQDTMSSSFGVGYEEDLSRVMSRIKDQHVELGLLAGVKEENHQERNIATT

SEQ ID NO: 1023 - protein, 251 aa, Arabidopsis thaliana
  peptide (1)..(251): Ceres Seq. ID no. 12325211
  misc_feature (1)..(190): Pfam Name: Pfam Description:  Protein kinase domain
  misc_feature (1)..(251): NCBI GI NO: 18417765 NR Description: serine/threonine-specific protein kinase-like protein
  misc_feature (1)..(251): NCBI GI NO: 11358843 NR Description: serine/threonine-specific protein kinase-like protein -Arabidopsis thaliana
  misc_feature (1)..(240): NCBI GI NO: 1076634 NR Description: serine/threonine-specific protein kinase NPK15
  misc_feature (1)..(199): NCBI GI NO: 38636770 NR Description: putative serine/threonine-specific protein kinase
  misc_feature (1)..(209): NCBI GI NO: 30696480 NR Description: protein kinase family [Arabidopsis thaliana]
  misc_feature (1)..(216): NCBI GI NO: 38345516 NR Description: OSJNBa0039K24.19
  misc_feature (1)..(213): NCBI GI NO: 15227790 NR Description: putative protein kinase; protein id: At2g23200.1
  misc_feature (1)..(230): NCBI GI NO: 8978273 NR Description: receptor protein kinase-like
  misc_feature (1)..(218): NCBI GI NO: 30699436 NR Description: leucine-rich repeat transmembrane protein kinase
  misc_feature (1)..(218): NCBI GI NO: 7715608 NR Description: F20B17.5 [Arabidopsis thaliana]
MLIYEFMSNGSLENLLYGGMQVLNWEERLQIALDISHGIEYLHEGAVPPVIHRDLKSANILLDHSMRAKVADFGLSKEMVLDRMTSGLKGTHGYMDPTYISTNKYTMKSDIYSFGVIILELITAIHPQQNLMEYINLASMSPDGIDEILDQKLVGNASIEEVRLLAKIANRCVHKTPRKRPSIGEVTQFILKIKQSRSRGRRQDTMSSSFGVGYEEDLSRVMSRIKDQHVELGLLAGVKEENHQERNIATT

SEQ ID NO: 1024 - DNA, 1397 bp, Arabidopsis thaliana
  misc_feature (1)..(1397): Ceres Seq. ID no. 12370917
ctaatttctcaaagagtctaaagagacggagagtgagagaagagagaaacatttcgagacaaatggccgccgccgctgctcgtcctctcgtcaccatccaaaccttggatggtgacatgtccaccgatcaatcctccaccgtcgtacttcccgacgtcatgacggcgccagttcgaccagacatcgttaacttcgttcacgcccaaatctccaacaacagccgtcagccatacgccgtatcgaagaaggccgagtcctggggaaccggacgtgccgtgtctcgtatccctcgtgttcccggtggtggtactcaccgtgctggtcaagctgcgttcggtaacatgtgtcgtggtggtcgtatgttcgctccaaccaagatctggcgccgctggcaccgtcgtgtcaatgtcaacatgaagcgtcacgcaatcgtctcagctatcgctgcaactgctgttcctgcgcttgtgatggctcgtggtcacaagatcgagaatgttcctgagatgcctcttgttgtgagtgactccgccgaagctgtggagaagacctcagctgcgatcaaggttttgaaacagatcggtgcttatgatgatgctgagaaggcaaagaacagcattggaatccgtcctggtaaaggtaaaatgaggaaccgtcgttacatttctaggaaaggtcctctggtggtttatggaactgaaggatctaagatagttaaggcgtttagaaaccttcctggtgttgagctttgtcatgtggagaggcttaatttgttgaagcttgctcctggtggtcaccttggtcggtttgtgatctggaccaagtctgcctttgagaagcttgagtctatctatggttcgtttgaagccatcagagaagaaggggggtatgtgcttcctcgtgcaaagatggtgaatgctgatcttgccaggattatcaattcagatgagattcagagtgttgtgaatccgatcaagaaggatgcgaagagggctgttcttaagaagaatccattgaagaatctcaatgtgatgttgaagttgaatccttatgctaagaccgcgaagaggatgtcactgttagctgaagcacagagagttaaggctaagaaggagaagctcgccaagaagaggaaaaccgttaccaaggaggaggcgttggcaatcaaagcagcaggcaagtcgtggtacaagactatgatctccgacagtgattacaccgagtttgataacttcaccaaatggctcggtgctagccagtaataatctcgtctgctttggaacactttccatattttagtcaaaagattttggtttttttaatctgttttgtctttgggtgtctggatatcaagttgaattatgaacaagtttcacttttttacatctccatttctt

SEQ ID NO: 1025 - protein, 419 aa, Arabidopsis thaliana
  peptide (1)..(419): Ceres Seq. ID no. 12370918
  misc_feature (45)..(283): Pfam Name: Pfam Description:  Ribosomal protein L4/L1 family
  misc_feature (21)..(419): NCBI GI NO: 15232723 NR Description: putative 60S ribosomal protein L1
  misc_feature (21)..(419): NCBI GI NO: 21593543 NR Description: 60S ribosomal protein L4-B (L1)
  misc_feature (21)..(419): NCBI GI NO: 15242558 NR Description: 60S ribosomal protein - like
  misc_feature (21)..(419): NCBI GI NO: 26450328 NR Description: putative 60S ribosomal protein
  misc_feature (22)..(419): NCBI GI NO: 17367847 NR Description: 60S ribosomal protein L4 (L1)
  misc_feature (23)..(419): NCBI GI NO: 34393487 NR Description: putative 60S ribosomal protein L4/L1
  misc_feature (23)..(419): NCBI GI NO: 34897236 NR Description: putative 60S ribosomal protein L1
  misc_feature (114)..(419): NCBI GI NO: 13605831 NR Description: AT5g02870/F9G14_180 [Arabidopsis thaliana]
  misc_feature (69)..(419): NCBI GI NO: 6441068 NR Description: 60S ribosomal protein L4 [Chlamydomonas sp. HS-5]
  misc_feature (25)..(384): NCBI GI NO: 1350686 NR Description: 60S RIBOSOMAL PROTEIN L4 (L1)
NFSKSLKRRRVREERNISRQMAAAAARPLVTIQTLDGDMSTDQSSTVVLPDVMTAPVRPDIVNFVHAQISNNSRQPYAVSKKAESWGTGRAVSRIPRVPGGGTHRAGQAAFGNMCRGGRMFAPTKIWRRWHRRVNVNMKRHAIVSAIAATAVPALVMARGHKIENVPEMPLVVSDSAEAVEKTSAAIKVLKQIGAYDDAEKAKNSIGIRPGKGKMRNRRYISRKGPLVVYGTEGSKIVKAFRNLPGVELCHVERLNLLKLAPGGHLGRFVIWTKSAFEKLESIYGSFEAIREEGGYVLPRAKMVNADLARIINSDEIQSVVNPIKKDAKRAVLKKNPLKNLNVMLKLNPYAKTAKRMSLLAEAQRVKAKKEKLAKKRKTVTKEEALAIKAAGKSWYKTMISDSDYTEFDNFTKWLGASQ

SEQ ID NO: 1026 - protein, 399 aa, Arabidopsis thaliana
  peptide (1)..(399): Ceres Seq. ID no. 12370919
  misc_feature (25)..(263): Pfam Name: Pfam Description:  Ribosomal protein L4/L1 family
  misc_feature (1)..(399): NCBI GI NO: 15232723 NR Description: putative 60S ribosomal protein L1
  misc_feature (1)..(399): NCBI GI NO: 21593543 NR Description: 60S ribosomal protein L4-B (L1)
  misc_feature (1)..(399): NCBI GI NO: 15242558 NR Description: 60S ribosomal protein - like
  misc_feature (1)..(399): NCBI GI NO: 26450328 NR Description: putative 60S ribosomal protein
  misc_feature (2)..(399): NCBI GI NO: 17367847 NR Description: 60S ribosomal protein L4 (L1)
  misc_feature (3)..(399): NCBI GI NO: 34393487 NR Description: putative 60S ribosomal protein L4/L1
  misc_feature (3)..(399): NCBI GI NO: 34897236 NR Description: putative 60S ribosomal protein L1
  misc_feature (94)..(399): NCBI GI NO: 13605831 NR Description: AT5g02870/F9G14_180 [Arabidopsis thaliana]
  misc_feature (49)..(399): NCBI GI NO: 6441068 NR Description: 60S ribosomal protein L4 [Chlamydomonas sp. HS-5]
  misc_feature (5)..(364): NCBI GI NO: 1350686 NR Description: 60S RIBOSOMAL PROTEIN L4 (L1)
MAAAAARPLVTIQTLDGDMSTDQSSTVVLPDVMTAPVRPDIVNFVHAQISNNSRQPYAVSKKAESWGTGRAVSRIPRVPGGGTHRAGQAAFGNMCRGGRMFAPTKIWRRWHRRVNVNMKRHAIVSAIAATAVPALVMARGHKIENVPEMPLVVSDSAEAVEKTSAAIKVLKQIGAYDDAEKAKNSIGIRPGKGKMRNRRYISRKGPLVVYGTEGSKIVKAFRNLPGVELCHVERLNLLKLAPGGHLGRFVIWTKSAFEKLESIYGSFEAIREEGGYVLPRAKMVNADLARIINSDEIQSVVNPIKKDAKRAVLKKNPLKNLNVMLKLNPYAKTAKRMSLLAEAQRVKAKKEKLAKKRKTVTKEEALAIKAAGKSWYKTMISDSDYTEFDNFTKWLGASQ

SEQ ID NO: 1027 - protein, 381 aa, Arabidopsis thaliana
  peptide (1)..(381): Ceres Seq. ID no. 12370920
  misc_feature (7)..(245): Pfam Name: Pfam Description:  Ribosomal protein L4/L1 family
  misc_feature (1)..(381): NCBI GI NO: 15232723 NR Description: putative 60S ribosomal protein L1
  misc_feature (1)..(381): NCBI GI NO: 21593543 NR Description: 60S ribosomal protein L4-B (L1)
  misc_feature (1)..(381): NCBI GI NO: 15242558 NR Description: 60S ribosomal protein - like
  misc_feature (1)..(381): NCBI GI NO: 26450328 NR Description: putative 60S ribosomal protein
  misc_feature (1)..(381): NCBI GI NO: 17367847 NR Description: 60S ribosomal protein L4 (L1)
  misc_feature (1)..(381): NCBI GI NO: 34393487 NR Description: putative 60S ribosomal protein L4/L1
  misc_feature (1)..(381): NCBI GI NO: 34897236 NR Description: putative 60S ribosomal protein L1
  misc_feature (76)..(381): NCBI GI NO: 13605831 NR Description: AT5g02870/F9G14_180 [Arabidopsis thaliana]
  misc_feature (31)..(381): NCBI GI NO: 6441068 NR Description: 60S ribosomal protein L4 [Chlamydomonas sp. HS-5]
  misc_feature (1)..(346): NCBI GI NO: 1350686 NR Description: 60S RIBOSOMAL PROTEIN L4 (L1)
MSTDQSSTVVLPDVMTAPVRPDIVNFVHAQISNNSRQPYAVSKKAESWGTGRAVSRIPRVPGGGTHRAGQAAFGNMCRGGRMFAPTKIWRRWHRRVNVNMKRHAIVSAIAATAVPALVMARGHKIENVPEMPLVVSDSAEAVEKTSAAIKVLKQIGAYDDAEKAKNSIGIRPGKGKMRNRRYISRKGPLVVYGTEGSKIVKAFRNLPGVELCHVERLNLLKLAPGGHLGRFVIWTKSAFEKLESIYGSFEAIREEGGYVLPRAKMVNADLARIINSDEIQSVVNPIKKDAKRAVLKKNPLKNLNVMLKLNPYAKTAKRMSLLAEAQRVKAKKEKLAKKRKTVTKEEALAIKAAGKSWYKTMISDSDYTEFDNFTKWLGASQ

SEQ ID NO: 1028 - DNA, 1910 bp, Arabidopsis thaliana
  misc_feature (1)..(1910): Ceres Seq. ID no. 13509014
acttaactcatatcaaccttcgccggaaataatggctttcccgcgatttctttctctcctcgccgtcgtcactctctctcttttcctcaccaccactgatgcttcctctcgctctctatccactccacctaaaacgaacgtactcgacgtcgtttcatctctccagcaaacacaaactatcctctcactcgacccgactcgttcctcactcaccaccaccaaacccgaatccctatccgacccggttttcttcaattcatcttcaccactatctctagagcttcactctcgagacactttcgtcgcgtcacagcacaaagactacaaaagcttaacactcagtcgactcgagcgcgactcatcccgagtcgccggaatcgtcgcgaagatccgtttcgccgtcgaaggagtcgatagatccgatctcaaacccgtttacaacgaagatacacgataccaaaccgaggatctaacgacacctgtcgtctccggagcctctcaaggaagcggcgagtatttctcaagaatcggtgtcggaactccggcgaaagagatgtacttggttctcgacaccggaagcgacgtaaattggatccagtgtgaaccttgcgccgactgttaccaacagtccgacccggtttttaacccgacttcgtcttccacatacaaatctctcacttgctctgctccacagtgctctcttctcgaaacctccgcttgtcggtcaaacaaatgtctctaccaagttagttacggagacggatctttcaccgtcggtgaactcgctaccgatacggtgacgtttggtaactctggtaaaataaacaacgtcgctttgggttgtggtcacgacaacgaaggtctctttaccggagcagccggtttactcggtttaggcggtggtgttttatcgataaccaatcaaatgaaagcgacgtcgttttcttactgcctcgttgaccgtgactcgggaaagtcctcaagtcttgatttcaactcggtccaactcggtggcggagacgcgacggcgccgcttctacgtaacaaaaagatcgacactttctactacgtcggactcagtggattcagcgtcggtggtgaaaaagtcgtgctgcctgatgcgatcttcgatgtcgatgcttcgggaagcggaggagtgatcttggattgtggaaccgccgtgactcgtcttcagacgcaggcttataactcgctgcgtgacgcgtttcttaaactcaccgtgaatctcaaaaaaggatcttcgagcatctctctgttcgacacgtgttacgatttctcgtctctctccactgtgaaagtaccgacggttgcgtttcatttcacgggagggaagtcgcttgatttgccggcgaagaattatctgatccctgtggatgatagtggaacgttttgcttcgcttttgctccgacgtcgtcgtcgttgtcgatcatcgggaatgtgcagcagcaagggacacgtatcacttacgatctatccaaaaatgttatcggattgtcagggaataaatgctaaacatgtcaaagtagaaaaattaatagttttacgggtaatcagtaaaactttttatggtactagctagctacggtaacaagatgaaaacaaaatccttaagtgtgaatttttctaccttttttttaattaatcataagttattgtcgtcttttatcgaataataataggattaattaattttattataaagttgaaagtgttgttgtctcagcaagaagttttcagtagtgaagaagaagaagagtcaataaagtaagaagttacaaaaaagaagggtctttttgtaacaaaagtttagtcttcaaagaaacaaacagacttttgttgttgtggccctttaatgtccttcaatattttaaattatagtctgaatttt

SEQ ID NO: 1029 - protein, 510 aa, Arabidopsis thaliana
  peptide (1)..(510): Ceres Seq. ID no. 13509015
  misc_feature (120)..(508): Pfam Name: Pfam Description:  Eukaryotic aspartyl protease
  misc_feature (11)..(510): NCBI GI NO: 15229656 NR Description: chloroplast nucleoid DNA-binding protein -related
  misc_feature (11)..(510): NCBI GI NO: 19424106 NR Description: putative chloroplast nucleoid DNA-binding protein
  misc_feature (28)..(510): NCBI GI NO: 15222611 NR Description: expressed protein [Arabidopsis thaliana]
  misc_feature (14)..(510): NCBI GI NO: 34895664 NR Description: nucleoid DNA-binding protein cnd41-like protein
  misc_feature (53)..(510): NCBI GI NO: 28392860 NR Description: unknown protein [Arabidopsis thaliana]
  misc_feature (64)..(510): NCBI GI NO: 15223368 NR Description: chloroplast nucleoid DNA binding protein -related
  misc_feature (64)..(510): NCBI GI NO: 21594980 NR Description: chloroplast nucleoid DNA binding protein, putative
  misc_feature (116)..(510): NCBI GI NO: 15231010 NR Description: expressed protein [Arabidopsis thaliana]
  misc_feature (52)..(510): NCBI GI NO: 15228618 NR Description: expressed protein [Arabidopsis thaliana]
  misc_feature (86)..(510): NCBI GI NO: 15290061 NR Description: nucleoid DNA-binding protein cnd41-like protein
LNSYQPSPEIMAFPRFLSLLAVVTLSLFLTTTDASSRSLSTPPKTNVLDVVSSLQQTQTILSLDPTRSSLTTTKPESLSDPVFFNSSSPLSLELHSRDTFVASQHKDYKSLTLSRLERDSSRVAGIVAKIRFAVEGVDRSDLKPVYNEDTRYQTEDLTTPVVSGASQGSGEYFSRIGVGTPAKEMYLVLDTGSDVNWIQCEPCADCYQQSDPVFNPTSSSTYKSLTCSAPQCSLLETSACRSNKCLYQVSYGDGSFTVGELATDTVTFGNSGKINNVALGCGHDNEGLFTGAAGLLGLGGGVLSITNQMKATSFSYCLVDRDSGKSSSLDFNSVQLGGGDATAPLLRNKKIDTFYYVGLSGFSVGGEKVVLPDAIFDVDASGSGGVILDCGTAVTRLQTQAYNSLRDAFLKLTVNLKKGSSSISLFDTCYDFSSLSTVKVPTVAFHFTGGKSLDLPAKNYLIPVDDSGTFCFAFAPTSSSLSIIGNVQQQGTRITYDLSKNVIGLSGNKC

SEQ ID NO: 1030 - protein, 500 aa, Arabidopsis thaliana [sequence omitted]

SEQ ID NO: 1031 - protein, 326 aa, Arabidopsis thaliana
  peptide (1)..(326): Ceres Seq. ID no. 13509017
  misc_feature (1)..(324): Pfam Name: Pfam Description:  Eukaryotic aspartyl protease
  misc_feature (1)..(326): NCBI GI NO: 15229656 NR Description: chloroplast nucleoid DNA-binding protein -related
  misc_feature (1)..(326): NCBI GI NO: 19424106 NR Description: putative chloroplast nucleoid DNA-binding protein
  misc_feature (1)..(326): NCBI GI NO: 15222611 NR Description: expressed protein [Arabidopsis thaliana]
  misc_feature (1)..(326): NCBI GI NO: 34895664 NR Description: nucleoid DNA-binding protein cnd41-like protein
  misc_feature (1)..(326): NCBI GI NO: 28392860 NR Description: unknown protein [Arabidopsis thaliana]
  misc_feature (1)..(326): NCBI GI NO: 15223368 NR Description: chloroplast nucleoid DNA binding protein -related
  misc_feature (1)..(326): NCBI GI NO: 21594980 NR Description: chloroplast nucleoid DNA binding protein, putative
  misc_feature (1)..(326): NCBI GI NO: 15231010 NR Description: expressed protein [Arabidopsis thaliana]
  misc_feature (1)..(326): NCBI GI NO: 15228618 NR Description: expressed protein [Arabidopsis thaliana]
  misc_feature (1)..(326): NCBI GI NO: 15290061 NR Description: nucleoid DNA-binding protein cnd41-like protein
MYLVLDTGSDVNWIQCEPCADCYQQSDPVFNPTSSSTYKSLTCSAPQCSLLETSACRSNKCLYQVSYGDGSFTVGELATDTVTFGNSGKINNVALGCGHDNEGLFTGAAGLLGLGGGVLSITNQMKATSFSYCLVDRDSGKSSSLDFNSVQLGGGDATAPLLRNKKIDTFYYVGLSGFSVGGEKVVLPDAIFDVDASGSGGVILDCGTAVTRLQTQAYNSLRDAFLKLTVNLKKGSSSISLFDTCYDFSSLSTVKVPTVAFHFTGGKSLDLPAKNYLIPVDDSGTFCFAFAPTSSSLSIIGNVQQQGTRITYDLSKNVIGLSGNKC

SEQ ID NO: 1032 - DNA, 1205 bp, Arabidopsis thaliana
  misc_feature (1)..(1205): Ceres Seq. ID no. 12334500
aacgccagttgccatccaggagaggggagaagaagaatttgtattctcaagttgtcgatatgagagagatgaagtcagaaacacgtttgtgagagaacagcttttagatgtgattgtggatcagattctcaaagacttttcgcgaagagtctctgatccttaaatcgcttctctctcgcttgacctcatttcgtcgtcgaaatcagatccttgtgaaaatgccgaaacaggatatggagaagatggagcttcgtaagaacttccgtaatgtttggcataccgatcttacccacagtatccagaacgatactccttattgttgcttcgcgttgtggtgtgccccttgtgcatcatacttgcttcgcaagcgtgcgctttacgatgatatgtcaaggtacgtctgctgtgccggttacatgccttgtagtggtaggtgtggagaagccaaatgtcctcaactttgtcttgccactgaggtcttctgctgctttgcaaactctgtggcctcaactcgctttcttctgcaagatgagttccaaattcaaacgacaaaatgtgacaactgcatcattggtttcatggtttgcctcagccaagtggcttgcatattctccatagttgcatgtattgtcggtatggatgagctttcagaagcttctcagatactcacatgttgctctgacatggtgtactgcacggtttgcgcatgtatgcagacacaacacaagatggaaatggacaagagggacggtaagttcgggccacagccaatggcagtgcctccggctcagcaaatgtcacggtttgatcaagccaccccacccgcagtcggttatcctccacaacaaggttatccaccttctggttatcctcaacaccctccacaaggttatccaccttctggctatcctcaaaaccctcctccctcagcttattctcaataccctcctggggcttatcctcctcctcccgcttacccaaagtgatcactctttgcctgttttctctcccgattggaaaattttatttcatctttttttaatgctgtcttgttacgggtcaagaattgaacgttcgctgattgttttgaggtcgttgtttgtatgagattttgacctcgcatgttgttgttgttttctgaaacgtccctcttggactaagagatttcatgactttttcctttccttttaaattctctctttttc

SEQ ID NO: 1033 - protein, 255 aa, Arabidopsis thaliana
  peptide (1)..(255): Ceres Seq. ID no. 12334501
  misc_feature (179)..(253): Pfam Name: Pfam Description:  Extensin-like region
  misc_feature (1)..(255): NCBI GI NO: 22328885 NR Description: expressed protein; protein id: At4g23470
  misc_feature (9)..(255): NCBI GI NO: 21554542 NR Description: unknown [Arabidopsis thaliana]
  misc_feature (4)..(233): NCBI GI NO: 15222552 NR Description: unknown protein; protein id: At1g63830
  misc_feature (6)..(209): NCBI GI NO: 37536436 NR Description: hypothetical protein
  misc_feature (4)..(207): NCBI GI NO: 15238071 NR Description: putative protein; protein id: At5g41390.1
  misc_feature (1)..(160): NCBI GI NO: 7485553 NR Description: hypothetical protein F16G20
  misc_feature (171)..(255): NCBI GI NO: 7485554 NR Description: hypothetical protein F16G20
  misc_feature (62)..(254): NCBI GI NO: 25446695 NR Description: Unknown protein
  misc_feature (193)..(254): NCBI GI NO: 15227350 NR Description: unknown protein; protein id: At2g41420.1
  misc_feature (169)..(254): NCBI GI NO: 6469591 NR Description: unknown [Eufolliculina uhligi]
MPKQDMEKMELRKNFRNVWHTDLTHSIQNDTPYCCFALWCAPCASYLLRKRALYDDMSRYVCCAGYMPCSGRCGEAKCPQLCLATEVFCCFANSVASTRFLLQDEFQIQTTKCDNCIIGFMVCLSQVACIFSIVACIVGMDELSEASQILTCCSDMVYCTVCACMQTQHKMEMDKRDGKFGPQPMAVPPAQQMSRFDQATPPAVGYPPQQGYPPSGYPQHPPQGYPPSGYPQNPPPSAYSQYPPGAYPPPPAYPK

SEQ ID NO: 1034 - protein, 250 aa, Arabidopsis thaliana
  peptide (1)..(250): Ceres Seq. ID no. 12334502
  misc_feature (174)..(248): Pfam Name: Pfam Description:  Extensin-like region
  misc_feature (1)..(250): NCBI GI NO: 22328885 NR Description: expressed protein; protein id: At4g23470
  misc_feature (4)..(250): NCBI GI NO: 21554542 NR Description: unknown [Arabidopsis thaliana]
  misc_feature (1)..(228): NCBI GI NO: 15222552 NR Description: unknown protein; protein id: At1g63830
  misc_feature (1)..(204): NCBI GI NO: 37536436 NR Description: hypothetical protein
  misc_feature (1)..(202): NCBI GI NO: 15238071 NR Description: putative protein; protein id: At5g41390.1
  misc_feature (1)..(155): NCBI GI NO: 7485553 NR Description: hypothetical protein F16G20
  misc_feature (166)..(250): NCBI GI NO: 7485554 NR Description: hypothetical protein F16G20
  misc_feature (57)..(249): NCBI GI NO: 25446695 NR Description: Unknown protein
  misc_feature (188)..(249): NCBI GI NO: 15227350 NR Description: unknown protein; protein id: At2g41420.1
  misc_feature (164)..(249): NCBI GI NO: 6469591 NR Description: unknown [Eufolliculina uhligi]
MEKMELRKNFRNVWHTDLTHSIQNDTPYCCFALWCAPCASYLLRKRALYDDMSRYVCCAGYMPCSGRCGEAKCPQLCLATEVFCCFANSVASTRFLLQDEFQIQTTKCDNCIIGFMVCLSQVACIFSIVACIVGMDELSEASQILTCCSDMVYCTVCACMQTQHKMEMDKRDGKFGPQPMAVPPAQQMSRFDQATPPAVGYPPQQGYPPSGYPQHPPQGYPPSGYPQNPPPSAYSQYPPGAYPPPPAYPK

SEQ ID NO: 1035 - protein, 247 aa, Arabidopsis thaliana
  peptide (1)..(247): Ceres Seq. ID no. 12334503
  misc_feature (171)..(245): Pfam Name: Pfam Description:  Extensin-like region
  misc_feature (1)..(247): NCBI GI NO: 22328885 NR Description: expressed protein; protein id: At4g23470
  misc_feature (1)..(247): NCBI GI NO: 21554542 NR Description: unknown [Arabidopsis thaliana]
  misc_feature (1)..(225): NCBI GI NO: 15222552 NR Description: unknown protein; protein id: At1g63830
  misc_feature (1)..(201): NCBI GI NO: 37536436 NR Description: hypothetical protein
  misc_feature (1)..(199): NCBI GI NO: 15238071 NR Description: putative protein; protein id: At5g41390.1
  misc_feature (1)..(152): NCBI GI NO: 7485553 NR Description: hypothetical protein F16G20
  misc_feature (163)..(247): NCBI GI NO: 7485554 NR Description: hypothetical protein F16G20
  misc_feature (54)..(246): NCBI GI NO: 25446695 NR Description: Unknown protein
  misc_feature (185)..(246): NCBI GI NO: 15227350 NR Description: unknown protein; protein id: At2g41420.1
  misc_feature (161)..(246): NCBI GI NO: 6469591 NR Description: unknown [Eufolliculina uhligi]
MELRKNFRNVWHTDLTHSIQNDTPYCCFALWCAPCASYLLRKRALYDDMSRYVCCAGYMPCSGRCGEAKCPQLCLATEVFCCFANSVASTRFLLQDEFQIQTTKCDNCIIGFMVCLSQVACIFSIVACIVGMDELSEASQILTCCSDMVYCTVCACMQTQHKMEMDKRDGKFGPQPMAVPPAQQMSRFDQATPPAVGYPPQQGYPPSGYPQHPPQGYPPSGYPQNPPPSAYSQYPPGAYPPPPAYPK

SEQ ID NO: 1036 - DNA, 1722 bp, Arabidopsis thaliana
  misc_feature (1)..(1722): Ceres Seq. ID no. 12327448
agagctggatgttttttcctctataaacctcttttgctttctctcttcgtctctgaccactttggctccggcgttagttttttccctctctgctactgctgcggctccggctcctgctacggtatttgacaagtgtgttgacattctctcataacaattcaaatgggtgactcggaaaacgttcagcaaccttcaaaaaagagaggtgccttgaagcagctgtctcgtgataatccaggtcttgatgatgatgatgattcagctgaacttgagagtggaactttcaagaaggccagtgatgaggttttggctagtagaagaattgtcagagttaagcgcaaagagccatctgctgctccagttgcagcatccaatccatttgctggaattcagttggtccctacgactgcacctgcttcaacccctgtgggaacaaatgcacctctggctgagtcaaaattggctccagctgaagcagtagttgaggacaatcaaaaagcaagtgatattgaggagggcgatgaagttgacagtaagaaggttgatgtcaaagatgctgttggggaagagactgaaaagactaaagataaggatgataatcattgtggaaagagtgctgatgtccaagttgcggctacagaagtagctcagatggtctcatgtgacacaaacgtttgcaacaacgctgttgaaggaacagaccaaactgattttcctcttgagaaggattcaggaggtgatcaggctgagaaaaaagaaaaagaaggcaacggaattgaggaagcagataagaatggcgataatggtgctttcagctcattccaacagcattcaagtaacaaaaacgcattcaccggacttgccagtacagaggcttcagggtcttcgttctcatttggtttggtttctcaggatggttcaactggtactgggtctctctttggctttggccttccaagcagcaatagctcttctatattcggtgcaactggatcgtccattatcaagaagagtgaaggtagtgggtttccgccaaagcaagaggtttccacagaaacaggtgaagagaatgagaaagttgccttctcagctgactcgatcatgttcgaatatcttgatggaggatggaaagagcgtggaaaaggagaactcaaggtaaacgtctccagtaatgatggtaaagcaagattagttatgagagctaaaggaaactacagattgatcttaaacgcgagtctttacccagagatgaaacttgcaaacatggataaaaagggaatcacattcgcttgtgtgaatagtgtaagcgaaggcaaagaaggtctctctacatttgcactgaagttcaaagacccgacaattgttgaagagtttcgtgtagccattgacaaacacaaagatagtaaaccaatggagaaagcagcagaaaaatcagctcttcctctgaagacacctgagaactctccaacagctacagatacttgaagaaaaggtaaaaagaaaaaaagaaaaaacatgtagaaacacttctctcgtctctctcgtctctcttgtcttttgtcttgtcttgttacttccaagtagttgaattttgaggcagaggaaaactaaaatatttggagaagtttgttgttttttttacacagttgttgagactttttggttacatgtttctgtttgtagaaggaaaccatatatgacttaaatctgcatccttgattt

SEQ ID NO: 1037 - protein, 440 aa, Arabidopsis thaliana
  peptide (1)..(440): Ceres Seq. ID no. 12327449
  misc_feature (294)..(414): Pfam Name: Pfam Description:  RanBP1 domain
  misc_feature (1)..(440): NCBI GI NO: 18403992 NR Description: expressed protein; protein id: At1g52380
  misc_feature (164)..(440): NCBI GI NO: 22655290 NR Description: unknown protein [Arabidopsis thaliana]
  misc_feature (38)..(439): NCBI GI NO: 18400970 NR Description: expressed protein; protein id: At3g15970
  misc_feature (38)..(439): NCBI GI NO: 21536684 NR Description: unknown [Arabidopsis thaliana]
  misc_feature (1)..(279): NCBI GI NO: 18400970 NR Description: expressed protein; protein id: At3g15970
  misc_feature (1)..(279): NCBI GI NO: 21536684 NR Description: unknown [Arabidopsis thaliana]
  misc_feature (368)..(439): NCBI GI NO: 26451646 NR Description: unknown protein [Arabidopsis thaliana]
  misc_feature (283)..(434): NCBI GI NO: 32403832 NR Description: hypothetical protein [Neurospora crassa]
  misc_feature (224)..(415): NCBI GI NO: 19075437 NR Description: putative nucleoporin
  misc_feature (13)..(87): NCBI GI NO: 19075437 NR Description: putative nucleoporin
MGDSENVQQPSKKRGALKQLSRDNPGLDDDDDSAELESGTFKKASDEVLASRRIVRVKRKEPSAAPVAASNPFAGIQLVPTTAPASTPVGTNAPLAESKLAPAEAVVEDNQKASDIEEGDEVDSKKVDVKDAVGEETEKTKDKDDNHCGKSADVQVAATEVAQMVSCDTNVCNNAVEGTDQTDFPLEKDSGGDQAEKKEKEGNGIEEADKNGDNGAFSSFQQHSSNKNAFTGLASTEASGSSFSFGLVSQDGSTGTGSLFGFGLPSSNSSSIFGATGSSIIKKSEGSGFPPKQEVSTETGEENEKVAFSADSIMFEYLDGGWKERGKGELKVNVSSNDGKARLVMRAKGNYRLILNASLYPEMKLANMDKKGITFACVNSVSEGKEGLSTFALKFKDPTIVEEFRVAIDKHKDSKPMEKAAEKSALPLKTPENSPTATDT

SEQ ID NO: 1038 - protein, 277 aa, Arabidopsis thaliana
  peptide (1)..(277): Ceres Seq. ID no. 12327450
  misc_feature (131)..(251): Pfam Name: Pfam Description:  RanBP1 domain
  misc_feature (1)..(277): NCBI GI NO: 18403992 NR Description: expressed protein; protein id: At1g52380
  misc_feature (1)..(277): NCBI GI NO: 22655290 NR Description: unknown protein [Arabidopsis thaliana]
  misc_feature (1)..(276): NCBI GI NO: 18400970 NR Description: expressed protein; protein id: At3g15970
  misc_feature (1)..(276): NCBI GI NO: 21536684 NR Description: unknown [Arabidopsis thaliana]
  misc_feature (1)..(116): NCBI GI NO: 18400970 NR Description: expressed protein; protein id: At3g15970
  misc_feature (1)..(116): NCBI GI NO: 21536684 NR Description: unknown [Arabidopsis thaliana]
  misc_feature (205)..(276): NCBI GI NO: 26451646 NR Description: unknown protein [Arabidopsis thaliana]
  misc_feature (120)..(271): NCBI GI NO: 32403832 NR Description: hypothetical protein [Neurospora crassa]
  misc_feature (61)..(252): NCBI GI NO: 19075437 NR Description: putative nucleoporin
  misc_feature (21)..(277): NCBI GI NO: 31205915 NR Description: ENSANGP00000010912 [Anopheles gambiae]
MVSCDTNVCNNAVEGTDQTDFPLEKDSGGDQAEKKEKEGNGIEEADKNGDNGAFSSFQQHSSNKNAFTGLASTEASGSSFSFGLVSQDGSTGTGSLFGFGLPSSNSSSIFGATGSSIIKKSEGSGFPPKQEVSTETGEENEKVAFSADSIMFEYLDGGWKERGKGELKVNVSSNDGKARLVMRAKGNYRLILNASLYPEMKLANMDKKGITFACVNSVSEGKEGLSTFALKFKDPTIVEEFRVAIDKHKDSKPMEKAAEKSALPLKTPENSPTATDT

SEQ ID NO: 1039 - DNA, 544 bp, Arabidopsis thaliana
  misc_feature (1)..(544): Ceres Seq. ID no. 13497719
actatattataatttttgctttataaaaaaaaatatcaaactctatattttctcgatctcttctcttcctcttatttctccaagatcccagacgaaatggctcagaaagtggtgctgaaggttttaaccatgactgatgataagacgaagcagaaagccatagaagctgcagctgatatcttcggagttgattccatagcagcggatatgaaggatcaaaaattgacggtgatcggtttgatggatgcggctgcggtggtgaagaagttgaagaaggttggtaaagtcgatttgatatcggttggaccggcaaaagaagagaagaaagaagagaagaaggaagagaagaaagaggaaaagaaagaggagaagaaggaagagcagaaagaagaagaacctaagaaataagtgactcgaattgctattaaaaccctaaatttttgtcatattgatttcacaattagaacgctgaatcattgaataatttaagatgtaaaattaattgttcaatacagattgtaataaaagcgaagtatttgaaact

SEQ ID NO: 1040 - protein, 103 aa, Arabidopsis thaliana
  peptide (1)..(103): Ceres Seq. ID no. 13497720
  misc_feature (14)..(99): Pfam Name: Pfam Description:  60s Acidic ribosomal protein
  misc_feature (1)..(103): NCBI GI NO: 26452654 NR Description: unknown protein [Arabidopsis thaliana]
  misc_feature (1)..(103): NCBI GI NO: 18420713 NR Description: heavy-metal-associated domain-containing protein
  misc_feature (1)..(103): NCBI GI NO: 21554550 NR Description: unknown [Arabidopsis thaliana]
  misc_feature (1)..(103): NCBI GI NO: 37535864 NR Description: hypothetical protein
  misc_feature (38)..(103): NCBI GI NO: 10176843 NR Description: gene_id:MRO11.20~unknown protein
  misc_feature (3)..(103): NCBI GI NO: 13543783 NR Description: Unknown (protein for MGC:7642) [Mus musculus]
  misc_feature (3)..(103): NCBI GI NO: 15223416 NR Description: heavy-metal-associated domain-containing protein
  misc_feature (4)..(103): NCBI GI NO: 25517980 NR Description: F22L4.5 protein - Arabidopsis thaliana
  misc_feature (3)..(100): NCBI GI NO: 29124977 NR Description: unknown [Populus tremuloides]
  misc_feature (1)..(100): NCBI GI NO: 37536388 NR Description: hypothetical protein
MAQKVVLKVLTMTDDKTKQKAIEAAADIFGVDSIAADMKDQKLTVIGLMDAAAVVKKLKKVGKVDLISVGPAKEEKKEEKKEEKKEEKKEEKKEEQKEEEPKK

SEQ ID NO: 1041 - protein, 92 aa, Arabidopsis thaliana
  peptide (1)..(92): Ceres Seq. ID no. 13497721
  misc_feature (3)..(88): Pfam Name: Pfam Description:  60s Acidic ribosomal protein
  misc_feature (1)..(92): NCBI GI NO: 26452654 NR Description: unknown protein [Arabidopsis thaliana]
  misc_feature (1)..(92): NCBI GI NO: 18420713 NR Description: heavy-metal-associated domain-containing protein
  misc_feature (1)..(92): NCBI GI NO: 21554550 NR Description: unknown [Arabidopsis thaliana]
  misc_feature (1)..(92): NCBI GI NO: 37535864 NR Description: hypothetical protein
  misc_feature (27)..(92): NCBI GI NO: 10176843 NR Description: gene_id:MRO11.20~unknown protein
  misc_feature (1)..(92): NCBI GI NO: 13543783 NR Description: Unknown (protein for MGC:7642) [Mus musculus]
  misc_feature (1)..(92): NCBI GI NO: 15223416 NR Description: heavy-metal-associated domain-containing protein
  misc_feature (1)..(92): NCBI GI NO: 25517980 NR Description: F22L4.5 protein - Arabidopsis thaliana
  misc_feature (1)..(89): NCBI GI NO: 29124977 NR Description: unknown [Populus tremuloides]
  misc_feature (1)..(89): NCBI GI NO: 37536388 NR Description: hypothetical protein
MTDDKTKQKAIEAAADIFGVDSIAADMKDQKLTVIGLMDAAAVVKKLKKVGKVDLISVGPAKEEKKEEKKEEKKEEKKEEKKEEQKEEEPKK

SEQ ID NO: 1042 - protein, 66 aa, Arabidopsis thaliana
  peptide (1)..(66): Ceres Seq. ID no. 13497722
  misc_feature (1)..(62): Pfam Name: Pfam Description:  60s Acidic ribosomal protein
  misc_feature (1)..(66): NCBI GI NO: 26452654 NR Description: unknown protein [Arabidopsis thaliana]
  misc_feature (1)..(66): NCBI GI NO: 18420713 NR Description: heavy-metal-associated domain-containing protein
  misc_feature (1)..(66): NCBI GI NO: 21554550 NR Description: unknown [Arabidopsis thaliana]
  misc_feature (1)..(66): NCBI GI NO: 37535864 NR Description: hypothetical protein
  misc_feature (1)..(66): NCBI GI NO: 10176843 NR Description: gene_id:MRO11.20~unknown protein
  misc_feature (1)..(66): NCBI GI NO: 13543783 NR Description: Unknown (protein for MGC:7642) [Mus musculus]
  misc_feature (1)..(66): NCBI GI NO: 15223416 NR Description: heavy-metal-associated domain-containing protein
  misc_feature (1)..(66): NCBI GI NO: 25517980 NR Description: F22L4.5 protein - Arabidopsis thaliana
  misc_feature (1)..(63): NCBI GI NO: 29124977 NR Description: unknown [Populus tremuloides]
  misc_feature (1)..(63): NCBI GI NO: 37536388 NR Description: hypothetical protein
MKDQKLTVIGLMDAAAVVKKLKKVGKVDLISVGPAKEEKKEEKKEEKKEEKKEEKKEEQKEEEPKK

SEQ ID NO: 1043 - DNA, 543 bp, Arabidopsis thaliana
  misc_feature (1)..(543): Ceres Seq. ID no. 13490582
aaggatttatgatcttcaaattcaagtatgaattataaagtttcgatttttacgaatcattaattttgtattcaggtactgctaaaaaaatggcttctcctattcccgtcggcgttactaaggaaaaggcgtttagtatggcacaaacggagatggagtatcgcgtggaactctttaacaagcttgctcaaacatgctttaataaatgtgtggataaaaggtacaaggaagctgagctaaacatgggtgagaatagttgcatcgaccgttgtgtttccaagtactggcaggtaaatggaatggttggacagcttctaagtgctggcaagcctcccgtgtaatccagtttaaaggcaattattacagaccaaaaagctcatggagggaacacaactctgttctttgtttttctaaagtttaaggcaatcttgtttttattgtcaagaaagttgcatcacatttttggcgctgatttggacaaattatgcaattccatgtgaacccattattattacctaaggggtgaaatgaaataacaaatcg

SEQ ID NO: 1044 - protein, 83 aa, Arabidopsis thaliana
  peptide (1)..(83): Ceres Seq. ID no. 13490583
  misc_feature (13)..(79): Pfam Name: Pfam Description:  Tim10/DDP family zinc finger
  misc_feature (1)..(83): NCBI GI NO: 18402072 NR Description: small zinc finger-related protein (TIM10)
  misc_feature (1)..(83): NCBI GI NO: 5107088 NR Description: small zinc finger-like protein [Pinus taeda]
  misc_feature (5)..(81): NCBI GI NO: 5107180 NR Description: small zinc finger-like protein
  misc_feature (7)..(82): NCBI GI NO: 38175439 NR Description: small zinc finger-like protein
  misc_feature (2)..(69): NCBI GI NO: 34897366 NR Description: putative zinc finger protein [Oryza sativa]
  misc_feature (9)..(74): NCBI GI NO: 6321793 NR Description: May act cooperatively with Mrs5p in mitochondrial proteinimport or other related essential mitochondrial processes
  misc_feature (16)..(74): NCBI GI NO: 19114054 NR Description: putative mitochondrial intermembrane protein MRS11 homolog
  misc_feature (9)..(74): NCBI GI NO: 12230195 NR Description: Mitochondrial import inner membrane translocase subunitTIM10
  misc_feature (1)..(78): NCBI GI NO: 31204893 NR Description: ENSANGP00000016855 [Anopheles gambiae]
  misc_feature (18)..(77): NCBI GI NO: 6912708 NR Description: translocase of inner mitochondrial membrane 10 homolog
MASPIPVGVTKEKAFSMAQTEMEYRVELFNKLAQTCFNKCVDKRYKEAELNMGENSCIDRCVSKYWQVNGMVGQLLSAGKPPV

SEQ ID NO: 1045 - protein, 67 aa, Arabidopsis thaliana
  peptide (1)..(67): Ceres Seq. ID no. 13490584
  misc_feature (1)..(63): Pfam Name: Pfam Description:  Tim10/DDP family zinc finger
  misc_feature (1)..(67): NCBI GI NO: 18402072 NR Description: small zinc finger-related protein (TIM10)
  misc_feature (1)..(67): NCBI GI NO: 5107088 NR Description: small zinc finger-like protein [Pinus taeda]
  misc_feature (1)..(65): NCBI GI NO: 5107180 NR Description: small zinc finger-like protein
  misc_feature (1)..(66): NCBI GI NO: 38175439 NR Description: small zinc finger-like protein
  misc_feature (1)..(53): NCBI GI NO: 34897366 NR Description: putative zinc finger protein [Oryza sativa]
  misc_feature (1)..(58): NCBI GI NO: 6321793 NR Description: May act cooperatively with Mrs5p in mitochondrial proteinimport or other related essential mitochondrial processes
  misc_feature (1)..(58): NCBI GI NO: 19114054 NR Description: putative mitochondrial intermembrane protein MRS11 homolog
  misc_feature (1)..(58): NCBI GI NO: 12230195 NR Description: Mitochondrial import inner membrane translocase subunitTIM10
  misc_feature (1)..(62): NCBI GI NO: 31204893 NR Description: ENSANGP00000016855 [Anopheles gambiae]
  misc_feature (2)..(61): NCBI GI NO: 6912708 NR Description: translocase of inner mitochondrial membrane 10 homolog
MAQTEMEYRVELFNKLAQTCFNKCVDKRYKEAELNMGENSCIDRCVSKYWQVNGMVGQLLSAGKPPV

SEQ ID NO: 1046 - protein, 62 aa, Arabidopsis thaliana
  peptide (1)..(62): Ceres Seq. ID no. 13490585
  misc_feature (1)..(58): Pfam Name: Pfam Description:  Tim10/DDP family zinc finger
  misc_feature (1)..(62): NCBI GI NO: 18402072 NR Description: small zinc finger-related protein (TIM10)
  misc_feature (1)..(62): NCBI GI NO: 5107088 NR Description: small zinc finger-like protein [Pinus taeda]
  misc_feature (1)..(60): NCBI GI NO: 5107180 NR Description: small zinc finger-like protein
  misc_feature (1)..(61): NCBI GI NO: 38175439 NR Description: small zinc finger-like protein
  misc_feature (1)..(48): NCBI GI NO: 34897366 NR Description: putative zinc finger protein [Oryza sativa]
  misc_feature (1)..(53): NCBI GI NO: 6321793 NR Description: May act cooperatively with Mrs5p in mitochondrial proteinimport or other related essential mitochondrial processes
  misc_feature (1)..(53): NCBI GI NO: 19114054 NR Description: putative mitochondrial intermembrane protein MRS11 homolog
  misc_feature (1)..(53): NCBI GI NO: 12230195 NR Description: Mitochondrial import inner membrane translocase subunitTIM10
  misc_feature (1)..(57): NCBI GI NO: 31204893 NR Description: ENSANGP00000016855 [Anopheles gambiae]
  misc_feature (1)..(56): NCBI GI NO: 6912708 NR Description: translocase of inner mitochondrial membrane 10 homolog
MEYRVELFNKLAQTCFNKCVDKRYKEAELNMGENSCIDRCVSKYWQVNGMVGQLLSAGKPPV

SEQ ID NO: 1047 - DNA, 1221 bp, Arabidopsis thaliana
  misc_feature (1)..(1221): Ceres Seq. ID no. 12327375
aacatattttgcccactatttgggtaagaagacttggtctctcgctggttgcttcaatccgagaaaatgctgactctactcttcttctctctcggagcgcttcttcttatcgttctgctcttcaaatttgcattcgccgatggagattttaccttgatttcgaagaagcatgtgaagcgtgaggccatacaaggcaaggtcgtctggatcacaggggctagccgtggaattggtgaaattcttgctaaacagtttgcaagtttagatgccaagcttattctctctgctaggaataaagctgaactggatcgggttaagagtgagcttaaaggtaaatttgcaccagaagatgtcaaggttttgcctttagatttagctagcggcgaagagtcactcaaacatgttgtagagcaagcagtgtcgcttttccctggagctggtgttgattatttggttcacaatgctgcctttgagcgtccgaaatccaaggcatcggatgcaagtgaggaaactctcaagactacattcgatgttaatgtctttgggacgatatctctgacaaagttggtagctcctcatatgctaaaacaaggagggggtcattttgttgtgataagcagtgctgcaggaaaggtaccatcacctggacaggctatatattctgcttcaaaacatgctcttcatggctacttccacagcttgcgttctgagttctgtcagaagggaatcaaggttaccgtcgtttgtcctggtccaatagaaacctggaatggtacaggaacatcaacttcggaagacagcaagtctcctgagaaacgtgtgtcatctgaacgatgtgcagagctgactataatcgctgcatctcataacttgaaggaagcttggatttcatatcagccagtactactcgtgatgtatctagtgcagtacatgccttcccttggcttctggctcatggacaaggttggaggaaagcgtgtggaggtcgcggaaaagaaaggcaacacatactcgtgggatttactgttcgggaagaagactaaaacaaactgaagctgattctctagaagatacacatagatgtggttggttgagccttagtccgtagatgtggttggtgtttgtttgctagtttgattgttaaataactaccaaagcgtcgaaaaatgttttgttgccttgtgaggtgctcaataagtaagaaaagatgtgatcttctgc

SEQ ID NO: 1048 - protein, 328 aa, Arabidopsis thaliana
  peptide (1)..(328): Ceres Seq. ID no. 12327376
  misc_feature (1)..(328): NCBI GI NO: 30678824 NR Description: short-chain dehydrogenase/reductase family protein
  misc_feature (1)..(249): NCBI GI NO: 6017123 NR Description: unknown protein [Arabidopsis thaliana]
  misc_feature (249)..(328): NCBI GI NO: 6017123 NR Description: unknown protein [Arabidopsis thaliana]
  misc_feature (1)..(306): NCBI GI NO: 7706318 NR Description: CGI-86 protein [Homo sapiens]
  misc_feature (139)..(249): NCBI GI NO: 22330816 NR Description: unknown protein; protein id: At3g03350.1
  misc_feature (45)..(306): NCBI GI NO: 6318548 NR Description: retinal short-chain dehydrogenase/ reductase retSDR4
  misc_feature (8)..(308): NCBI GI NO: 34865689 NR Description: similar to CGI-86 protein [Rattus norvegicus]
  misc_feature (2)..(306): NCBI GI NO: 34395851 NR Description: Retinal short-chain dehydrogenase/ reductase 4 precursor
  misc_feature (2)..(306): NCBI GI NO: 34865424 NR Description: similar to retinal short-chain dehydrogenase/reductase 4
  misc_feature (45)..(306): NCBI GI NO: 21313492 NR Description: RIKEN cDNA 2310016E22 [Mus musculus]
MLTLLFFSLGALLLIVLLFKFAFADGDFTLISKKHVKREAIQGKVVWITGASRGIGEILAKQFASLDAKLILSARNKAELDRVKSELKGKFAPEDVKVLPLDLASGEESLKHVVEQAVSLFPGAGVDYLVHNAAFERPKSKASDASEETLKTTFDVNVFGTISLTKLVAPHMLKQGGGHFVVISSAAGKVPSPGQAIYSASKHALHGYFHSLRSEFCQKGIKVTVVCPGPIETWNGTGTSTSEDSKSPEKRVSSERCAELTIIAASHNLKEAWISYQPVLLVMYLVQYMPSLGFWLMDKVGGKRVEVAEKKGNTYSWDLLFGKKTKTN

SEQ ID NO: 1049 - DNA, 1121 bp, Arabidopsis thaliana
  misc_feature (1)..(1121): Ceres Seq. ID no. 12324170
aatcgaattttgttgtgtgtgacctcaaactgacaacttccagtaattgtaatattaccaattttttttataaaaaagatgaacttcactttagagcaatagcaatccctcgagtctcccctatataaagattccaactccttaacgattcatctaatgaaaaaacacacacaccaaaaatatcagatatctcaaacaatgtcttcagtttttggatctgtccatatcttggccatgatagccatacaactcctccttacacacagtgtttcatctctgaaccttaccaatgcgtatctgcaccacaaatgcagcaacactcaaggaaaatataagcaggggagcgcgttcgagaaaaatctcaacttagtcctcagtaccatcacctcgattggaaattttcgtgacggtttccgctacaccgaagaaggtgaggatcccaataacgtctttgtcatgttccagtgtcgcggcgactcctactggtccaagtgccccccttgcattagcaccgccgtctctgggcttcgtaggagatgtccaagaaataagggagcaataatatggtatgaccaatgtcttttaaagatatcttcagttgcctccttcaataagatagattatgagaacgatttctatttgtccaacccaaacaacatgagtgatcgggggttgttcaacaaggagacgtcggctctcctggagaagctggcatataaagcctccgatagaaacaacttggatggtaaacaattggtgttgtacgcagcaggggagaagagaattgggacaaagaaggtgtatgcaatggtgcagtgtacgaaagacttaatatttacaaagtgctttgagtgtttggaagggattttgaggaagtttccacagtgttgtgacggtaaacgaggagggagagttttcggtacgagctgtaactttaggtatgagttatatccttttcttagaaactaacagcaacagtacaatgagagctccatattaaatgaaagggttctagagataaacagtcttataatatacactgtgttgcattttagtacgtgaacttgagcgaataaatgtactttcctctttgttttttgtgaacttgagttattaagagg

SEQ ID NO: 1050 - protein, 270 aa, Arabidopsis thaliana
  peptide (1)..(270): Ceres Seq. ID no. 12324171
  misc_feature (215)..(269): Pfam Name: Pfam Description:  Domain of unknown function DUF26
  misc_feature (15)..(270): NCBI GI NO: 15233366 NR Description: pollen coat receptor kinase, putative
  misc_feature (15)..(270): NCBI GI NO: 15233235 NR Description: receptor kinase common family, putative
  misc_feature (15)..(261): NCBI GI NO: 15233364 NR Description: receptor kinase common family
  misc_feature (15)..(261): NCBI GI NO: 18415518 NR Description: putative protein; protein id: At4g20530.1
  misc_feature (149)..(270): NCBI GI NO: 15233231 NR Description: hypothetical protein; protein id: At3g21980.1
  misc_feature (15)..(124): NCBI GI NO: 15233231 NR Description: hypothetical protein; protein id: At3g21980.1
  misc_feature (15)..(253): NCBI GI NO: 9279755 NR Description: emb|CAB45833
  misc_feature (25)..(269): NCBI GI NO: 15233368 NR Description: putative protein; protein id: At4g20680.1
  misc_feature (25)..(269): NCBI GI NO: 15233236 NR Description: hypothetical protein; protein id: At3g22000.1
  misc_feature (6)..(269): NCBI GI NO: 15233238 NR Description: hypothetical protein; protein id: At3g22010.1
MKKHTHQKYQISQTMSSVFGSVHILAMIAIQLLLTHSVSSLNLTNAYLHHKCSNTQGKYKQGSAFEKNLNLVLSTITSIGNFRDGFRYTEEGEDPNNVFVMFQCRGDSYWSKCPPCISTAVSGLRRRCPRNKGAIIWYDQCLLKISSVASFNKIDYENDFYLSNPNNMSDRGLFNKETSALLEKLAYKASDRNNLDGKQLVLYAAGEKRIGTKKVYAMVQCTKDLIFTKCFECLEGILRKFPQCCDGKRGGRVFGTSCNFRYELYPFLRN

SEQ ID NO: 1051 - protein, 256 aa, Arabidopsis thaliana
  peptide (1)..(256): Ceres Seq. ID no. 12324172
  misc_feature (201)..(255): Pfam Name: Pfam Description:  Domain of unknown function DUF26
  misc_feature (1)..(256): NCBI GI NO: 15233366 NR Description: pollen coat receptor kinase, putative
  misc_feature (1)..(256): NCBI GI NO: 15233235 NR Description: receptor kinase common family, putative
  misc_feature (1)..(247): NCBI GI NO: 15233364 NR Description: receptor kinase common family
  misc_feature (1)..(247): NCBI GI NO: 18415518 NR Description: putative protein; protein id: At4g20530.1
  misc_feature (135)..(256): NCBI GI NO: 15233231 NR Description: hypothetical protein; protein id: At3g21980.1
  misc_feature (1)..(110): NCBI GI NO: 15233231 NR Description: hypothetical protein; protein id: At3g21980.1
  misc_feature (1)..(239): NCBI GI NO: 9279755 NR Description: emb|CAB45833
  misc_feature (11)..(255): NCBI GI NO: 15233368 NR Description: putative protein; protein id: At4g20680.1
  misc_feature (11)..(255): NCBI GI NO: 15233236 NR Description: hypothetical protein; protein id: At3g22000.1
  misc_feature (1)..(255): NCBI GI NO: 15233238 NR Description: hypothetical protein; protein id: At3g22010.1
MSSVFGSVHILAMIAIQLLLTHSVSSLNLTNAYLHHKCSNTQGKYKQGSAFEKNLNLVLSTITSIGNFRDGFRYTEEGEDPNNVFVMFQCRGDSYWSKCPPCISTAVSGLRRRCPRNKGAIIWYDQCLLKISSVASFNKIDYENDFYLSNPNNMSDRGLFNKETSALLEKLAYKASDRNNLDGKQLVLYAAGEKRIGTKKVYAMVQCTKDLIFTKCFECLEGILRKFPQCCDGKRGGRVFGTSCNFRYELYPFLRN

SEQ ID NO: 1052 - protein, 244 aa, Arabidopsis thaliana
  peptide (1)..(244): Ceres Seq. ID no. 12324173
  misc_feature (189)..(243): Pfam Name: Pfam Description:  Domain of unknown function DUF26
  misc_feature (1)..(244): NCBI GI NO: 15233366 NR Description: pollen coat receptor kinase, putative
  misc_feature (1)..(244): NCBI GI NO: 15233235 NR Description: receptor kinase common family, putative
  misc_feature (1)..(235): NCBI GI NO: 15233364 NR Description: receptor kinase common family
  misc_feature (1)..(235): NCBI GI NO: 18415518 NR Description: putative protein; protein id: At4g20530.1
  misc_feature (123)..(244): NCBI GI NO: 15233231 NR Description: hypothetical protein; protein id: At3g21980.1
  misc_feature (1)..(98): NCBI GI NO: 15233231 NR Description: hypothetical protein; protein id: At3g21980.1
  misc_feature (1)..(227): NCBI GI NO: 9279755 NR Description: emb|CAB45833
  misc_feature (1)..(243): NCBI GI NO: 15233368 NR Description: putative protein; protein id: At4g20680.1
  misc_feature (1)..(243): NCBI GI NO: 15233236 NR Description: hypothetical protein; protein id: At3g22000.1
  misc_feature (1)..(243): NCBI GI NO: 15233238 NR Description: hypothetical protein; protein id: At3g22010.1
MIAIQLLLTHSVSSLNLTNAYLHHKCSNTQGKYKQGSAFEKNLNLVLSTITSIGNFRDGFRYTEEGEDPNNVFVMFQCRGDSYWSKCPPCISTAVSGLRRRCPRNKGAIIWYDQCLLKISSVASFNKIDYENDFYLSNPNNMSDRGLFNKETSALLEKLAYKASDRNNLDGKQLVLYAAGEKRIGTKKVYAMVQCTKDLIFTKCFECLEGILRKFPQCCDGKRGGRVFGTSCNFRYELYPFLRN

SEQ ID NO: 1053 - DNA, 1308 bp, Arabidopsis thaliana
  misc_feature (1)..(1308): Ceres Seq. ID no. 12335159
atatcaatcaatcgaaaaacctttctctcttctttcggagccgtcgcttgtgaaactttccggcgatttaacagagtcatgatggaaatacgaactccgaagactggcaaagccaagcgtgttctcgaaagccgagctcctaagttggttgaaactgggaagaagacgttgatacttcatggaacaaagacgagtgctacacttagctctgtaatgacggaactctaccgtttgaagaagggaggtgccatcagatattcaaggaggaatgagaatattaggcctttcgagagtggaggtgaaacttcattagagttcttctctcagaaaacagattgtagcatttttgtgtatggttctcacacgaagaaacgacctgacaatcttgtacttgggagaatgtatgatcaccaagtctatgatcttatagaagttgggattgagaactttaaatccttgcgggcgttttcgtatgacaagaaattcgcacctcatgaaggaacaaagcctttcatttgctttattggtgaaggttttgagaatgtatcagagcttaagcatctcaaagaagtcctcactgatctttttcgtggcgaggttgtggataatctaaatcttactggtttagaccgcgcttacgtatgttcagctatatccccaacaaaggttttccttactcattgcgcattgaagcttaaaaagtcaggatccattgttccgagaatggagcttgttgaagtcggtccatccatggacttggttatcaggcgtaatcgtcttcctaacgatagcttaatgaaagaagcaatgagaacatccaaggataagcctaagaagaaggagaaaaacgttgatcaagatgcagtactagggaagactgggaagatttatatgcctgatcagaagctgaaagaaatgaaactgttcgataaatctaagggatcgaagagagagcggaaagacgctaagcttaagcataaggaagagactgttgccaaaaagatgaaggtgtcttctgagtgactcaacagaccactcttggctctgcatcaacagctttcaatatgtggaagatgaaatgattttgtagtgtaatgagcttgacttttatttttccattagaatctataactgaatgttttctatacgctaatattttattaaggtgattttgttttgttaaaactctgcagcaacagaaactggatatgataaaaacacatttttgtctatctctgtttcctactgcagtacatgcgtaagacagcaacttttttcccgtgttgaatgagaccacaatttttgccc

SEQ ID NO: 1054 - protein, 340 aa, Arabidopsis thaliana
  peptide (1)..(340): Ceres Seq. ID no. 12335160
  misc_feature (27)..(340): NCBI GI NO: 18403828 NR Description: expressed protein; protein id: At3g23620
  misc_feature (28)..(340): NCBI GI NO: 21554561 NR Description: unknown [Arabidopsis thaliana]
  misc_feature (30)..(340): NCBI GI NO: 34914658 NR Description: P0504D03.20
  misc_feature (33)..(336): NCBI GI NO: 39930469 NR Description: brix domain containing 1 [Homo sapiens]
  misc_feature (29)..(317): NCBI GI NO: 7670547 NR Description: unnamed protein product [Mus musculus]
  misc_feature (29)..(317): NCBI GI NO: 18203123 NR Description: Brix domain containing protein 1
  misc_feature (29)..(338): NCBI GI NO: 27705690 NR Description: similar to RIKEN cDNA 2810470K21 gene
  misc_feature (29)..(317): NCBI GI NO: 31982662 NR Description: RIKEN cDNA 2810470K21 [Mus musculus]
  misc_feature (29)..(317): NCBI GI NO: 12850727 NR Description: unnamed protein product [Mus musculus]
  misc_feature (33)..(336): NCBI GI NO: 28461332 NR Description: Similar to RIKEN cDNA 2810470K21 gene
ISINRKTFLSSFGAVACETFRRFNRVMMEIRTPKTGKAKRVLESRAPKLVETGKKTLILHGTKTSATLSSVMTELYRLKKGGAIRYSRRNENIRPFESGGETSLEFFSQKTDCSIFVYGSHTKKRPDNLVLGRMYDHQVYDLIEVGIENFKSLRAFSYDKKFAPHEGTKPFICFIGEGFENVSELKHLKEVLTDLFRGEVVDNLNLTGLDRAYVCSAISPTKVFLTHCALKLKKSGSIVPRMELVEVGPSMDLVIRRNRLPNDSLMKEAMRTSKDKPKKKEKNVDQDAVLGKTGKIYMPDQKLKEMKLFDKSKGSKRERKDAKLKHKEETVAKKMKVSSE

SEQ ID NO: 1055 - protein, 314 aa, Arabidopsis thaliana
  peptide (1)..(314): Ceres Seq. ID no. 12335161
  misc_feature (1)..(314): NCBI GI NO: 18403828 NR Description: expressed protein; protein id: At3g23620
  misc_feature (2)..(314): NCBI GI NO: 21554561 NR Description: unknown [Arabidopsis thaliana]
  misc_feature (4)..(314): NCBI GI NO: 34914658 NR Description: P0504D03.20
  misc_feature (7)..(310): NCBI GI NO: 39930469 NR Description: brix domain containing 1 [Homo sapiens]
  misc_feature (3)..(291): NCBI GI NO: 7670547 NR Description: unnamed protein product [Mus musculus]
  misc_feature (3)..(291): NCBI GI NO: 18203123 NR Description: Brix domain containing protein 1
  misc_feature (3)..(312): NCBI GI NO: 27705690 NR Description: similar to RIKEN cDNA 2810470K21 gene
  misc_feature (3)..(291): NCBI GI NO: 31982662 NR Description: RIKEN cDNA 2810470K21 [Mus musculus]
  misc_feature (3)..(291): NCBI GI NO: 12850727 NR Description: unnamed protein product [Mus musculus]
  misc_feature (7)..(310): NCBI GI NO: 28461332 NR Description: Similar to RIKEN cDNA 2810470K21 gene
MMEIRTPKTGKAKRVLESRAPKLVETGKKTLILHGTKTSATLSSVMTELYRLKKGGAIRYSRRNENIRPFESGGETSLEFFSQKTDCSIFVYGSHTKKRPDNLVLGRMYDHQVYDLIEVGIENFKSLRAFSYDKKFAPHEGTKPFICFIGEGFENVSELKHLKEVLTDLFRGEVVDNLNLTGLDRAYVCSAISPTKVFLTHCALKLKKSGSIVPRMELVEVGPSMDLVIRRNRLPNDSLMKEAMRTSKDKPKKKEKNVDQDAVLGKTGKIYMPDQKLKEMKLFDKSKGSKRERKDAKLKHKEETVAKKMKVSSE

SEQ ID NO: 1056 - protein, 313 aa, Arabidopsis thaliana
  peptide (1)..(313): Ceres Seq. ID no. 12335162
  misc_feature (1)..(313): NCBI GI NO: 18403828 NR Description: expressed protein; protein id: At3g23620
  misc_feature (1)..(313): NCBI GI NO: 21554561 NR Description: unknown [Arabidopsis thaliana]
  misc_feature (3)..(313): NCBI GI NO: 34914658 NR Description: P0504D03.20
  misc_feature (6)..(309): NCBI GI NO: 39930469 NR Description: brix domain containing 1 [Homo sapiens]
  misc_feature (2)..(290): NCBI GI NO: 7670547 NR Description: unnamed protein product [Mus musculus]
  misc_feature (2)..(290): NCBI GI NO: 18203123 NR Description: Brix domain containing protein 1
  misc_feature (2)..(311): NCBI GI NO: 27705690 NR Description: similar to RIKEN cDNA 2810470K21 gene
  misc_feature (2)..(290): NCBI GI NO: 31982662 NR Description: RIKEN cDNA 2810470K21 [Mus musculus]
  misc_feature (2)..(290): NCBI GI NO: 12850727 NR Description: unnamed protein product [Mus musculus]
  misc_feature (6)..(309): NCBI GI NO: 28461332 NR Description: Similar to RIKEN cDNA 2810470K21 gene
MEIRTPKTGKAKRVLESRAPKLVETGKKTLILHGTKTSATLSSVMTELYRLKKGGAIRYSRRNENIRPFESGGETSLEFFSQKTDCSIFVYGSHTKKRPDNLVLGRMYDHQVYDLIEVGIENFKSLRAFSYDKKFAPHEGTKPFICFIGEGFENVSELKHLKEVLTDLFRGEVVDNLNLTGLDRAYVCSAISPTKVFLTHCALKLKKSGSIVPRMELVEVGPSMDLVIRRNRLPNDSLMKEAMRTSKDKPKKKEKNVDQDAVLGKTGKIYMPDQKLKEMKLFDKSKGSKRERKDAKLKHKEETVAKKMKVSSE

SEQ ID NO: 1057 - DNA, 1585 bp, Arabidopsis thaliana
  misc_feature (1)..(1585): Ceres Seq. ID no. 12327645
accaaaatcagattagagtttcagagacatctctcgaatacgatcatcagacaagacttaacctccatttgcacgtcttcctgctcacgacagacaaatcatgaacgaatccgacagctgaacgaattgcgtgtctgagaagatccaaatcctaattttctaccttttttttttgggaactaaggttagaatttggagcttctcgtacgtttttgcttgcctacgtttccggacaaaaaactatttgcatataaacagaacaggttctgttcatcaagacactgaagcctgatggggatggaggaagggattaaagataatgctgcatcagctcccaattcaagacctacaaaccaacttaaagctcttttaccgatgcgggtgcttcaagttttcttgttgttctttgttttggttcttggaatctcagtcattagtatgcacatgatcaagtacttaaagattcaaactttagctccatcgacattgatctctacttatgatgagagaattacgttagagagccttatcaagcctccattgaatggttggcattccatgaatgacagtgagcttctttggcgtgcttcgatggagcctcggatacttgactatccatttaaaagagttcctaaaatggcattcatgtttctcaccaaaggacctttgccatttgctccactttgggaaaggtttttcaaagggcatgagggcttttactcaatctatgttcatactttgccaaattatagatcagatttcccaagctcatctgtgttttacagaagacagatcccaagtcagcatgtagcttggggagagatgagtatgtgtgatgctgaaaggaggcttttggctaacgcgttgctcgatatctctaacgaatggtttgttttactatctgaagcgtgtattcctcttcgcggtttcaactttgtctaccgttatgtctctagatcaagatatagtttcatgggttctgttgacgaggacgggccttacgggagaggcagatatagctatgcaatgggaccagaagtaagtctaaacgagtggagaaaagggtctcagtggtttgaaataaacagagcacttgctgttgatattgttgaagacatggtttactataacaaattcaaagagttttgtagacctccttgttatgtagatgaacattacttcccaacaatgctctctattggatatccggattttctcgctaatcggacattgacttggacagattggtcaaggggtggtgctcatccagctacttttggcaaggctgatataacagagaagttcatcaagaagctgtcaagaggtaaagcttgcttctacaatgatcagccatctcaagtttgttatctttttgcaagaaagtttgctccaagcgcattgaagcctttacttaaacttgcaccaaaggttcttgggttctaattaatggatctcttgtcttctttttgttcttggtttttgttctgaaatgttcttgaacttgagtgtagcttcgtatagcatggacacaactctgatccttattgtctccttccacattgataatatagatacttcaatggcc

SEQ ID NO: 1058 - protein, 383 aa, Arabidopsis thaliana
  peptide (1)..(383): Ceres Seq. ID no. 12327646
  misc_feature (151)..(262): Pfam Name: Pfam Description:  Arabidopsis protein of unknown function, DUF266
  misc_feature (1)..(383): NCBI GI NO: 18402952 NR Description: expressed protein; protein id: At3g21310
  misc_feature (3)..(383): NCBI GI NO: 21554566 NR Description: unknown [Arabidopsis thaliana]
  misc_feature (1)..(344): NCBI GI NO: 9280235 NR Description: gb|AAD40142
  misc_feature (3)..(383): NCBI GI NO: 15218028 NR Description: hypothetical protein; protein id: At1g51770.1
  misc_feature (1)..(383): NCBI GI NO: 15239155 NR Description: putative protein; protein id: At5g11730
  misc_feature (1)..(381): NCBI GI NO: 15239557 NR Description: putative protein; protein id: At5g25970.1
  misc_feature (75)..(383): NCBI GI NO: 15218485 NR Description: unknown protein; protein id: At1g10280.1
  misc_feature (74)..(383): NCBI GI NO: 38344090 NR Description: OSJNBb0056F09.13
  misc_feature (72)..(383): NCBI GI NO: 15221386 NR Description: hypothetical protein; protein id: At1g68390.1
  misc_feature (83)..(381): NCBI GI NO: 34907318 NR Description: contains ESTs AU096118
MGMEEGIKDNAASAPNSRPTNQLKALLPMRVLQVFLLFFVLVLGISVISMHMIKYLKIQTLAPSTLISTYDERITLESLIKPPLNGWHSMNDSELLWRASMEPRILDYPFKRVPKMAFMFLTKGPLPFAPLWERFFKGHEGFYSIYVHTLPNYRSDFPSSSVFYRRQIPSQHVAWGEMSMCDAERRLLANALLDISNEWFVLLSEACIPLRGFNFVYRYVSRSRYSFMGSVDEDGPYGRGRYSYAMGPEVSLNEWRKGSQWFEINRALAVDIVEDMVYYNKFKEFCRPPCYVDEHYFPTMLSIGYPDFLANRTLTWTDWSRGGAHPATFGKADITEKFIKKLSRGKACFYNDQPSQVCYLFARKFAPSALKPLLKLAPKVLGF

SEQ ID NO: 1059 - protein, 381 aa, Arabidopsis thaliana
  peptide (1)..(381): Ceres Seq. ID no. 12327647
  misc_feature (149)..(260): Pfam Name: Pfam Description:  Arabidopsis protein of unknown function, DUF266
  misc_feature (1)..(381): NCBI GI NO: 18402952 NR Description: expressed protein; protein id: At3g21310
  misc_feature (1)..(381): NCBI GI NO: 21554566 NR Description: unknown [Arabidopsis thaliana]
  misc_feature (1)..(342): NCBI GI NO: 9280235 NR Description: gb|AAD40142
  misc_feature (1)..(381): NCBI GI NO: 15218028 NR Description: hypothetical protein; protein id: At1g51770.1
  misc_feature (1)..(381): NCBI GI NO: 15239155 NR Description: putative protein; protein id: At5g11730
  misc_feature (1)..(379): NCBI GI NO: 15239557 NR Description: putative protein; protein id: At5g25970.1
  misc_feature (73)..(381): NCBI GI NO: 15218485 NR Description: unknown protein; protein id: At1g10280.1
  misc_feature (72)..(381): NCBI GI NO: 38344090 NR Description: OSJNBb0056F09.13
  misc_feature (70)..(381): NCBI GI NO: 15221386 NR Description: hypothetical protein; protein id: At1g68390.1
  misc_feature (81)..(379): NCBI GI NO: 34907318 NR Description: contains ESTs AU096118
MEEGIKDNAASAPNSRPTNQLKALLPMRVLQVFLLFFVLVLGISVISMHMIKYLKIQTLAPSTLISTYDERITLESLIKPPLNGWHSMNDSELLWRASMEPRILDYPFKRVPKMAFMFLTKGPLPFAPLWERFFKGHEGFYSIYVHTLPNYRSDFPSSSVFYRRQIPSQHVAWGEMSMCDAERRLLANALLDISNEWFVLLSEACIPLRGFNFVYRYVSRSRYSFMGSVDEDGPYGRGRYSYAMGPEVSLNEWRKGSQWFEINRALAVDIVEDMVYYNKFKEFCRPPCYVDEHYFPTMLSIGYPDFLANRTLTWTDWSRGGAHPATFGKADITEKFIKKLSRGKACFYNDQPSQVCYLFARKFAPSALKPLLKLAPKVLGF

SEQ ID NO: 1060 - protein, 355 aa, Arabidopsis thaliana
  peptide (1)..(355): Ceres Seq. ID no. 12327648
  misc_feature (123)..(234): Pfam Name: Pfam Description:  Arabidopsis protein of unknown function, DUF266
  misc_feature (1)..(355): NCBI GI NO: 18402952 NR Description: expressed protein; protein id: At3g21310
  misc_feature (1)..(355): NCBI GI NO: 21554566 NR Description: unknown [Arabidopsis thaliana]
  misc_feature (1)..(316): NCBI GI NO: 9280235 NR Description: gb|AAD40142
  misc_feature (1)..(355): NCBI GI NO: 15218028 NR Description: hypothetical protein; protein id: At1g51770.1
  misc_feature (1)..(355): NCBI GI NO: 15239155 NR Description: putative protein; protein id: At5g11730
  misc_feature (1)..(353): NCBI GI NO: 15239557 NR Description: putative protein; protein id: At5g25970.1
  misc_feature (47)..(355): NCBI GI NO: 15218485 NR Description: unknown protein; protein id: At1g10280.1
  misc_feature (46)..(355): NCBI GI NO: 38344090 NR Description: OSJNBb0056F09.13
  misc_feature (44)..(355): NCBI GI NO: 15221386 NR Description: hypothetical protein; protein id: At1g68390.1
  misc_feature (55)..(353): NCBI GI NO: 34907318 NR Description: contains ESTs AU096118
MRVLQVFLLFFVLVLGISVISMHMIKYLKIQTLAPSTLISTYDERITLESLIKPPLNGWHSMNDSELLWRASMEPRILDYPFKRVPKMAFMFLTKGPLPFAPLWERFFKGHEGFYSIYVHTLPNYRSDFPSSSVFYRRQIPSQHVAWGEMSMCDAERRLLANALLDISNEWFVLLSEACIPLRGFNFVYRYVSRSRYSFMGSVDEDGPYGRGRYSYAMGPEVSLNEWRKGSQWFEINRALAVDIVEDMVYYNKFKEFCRPPCYVDEHYFPTMLSIGYPDFLANRTLTWTDWSRGGAHPATFGKADITEKFIKKLSRGKACFYNDQPSQVCYLFARKFAPSALKPLLKLAPKVLGF

SEQ ID NO: 1061 - DNA, 1420 bp, Arabidopsis thaliana
  misc_feature (1)..(1420): Ceres Seq. ID no. 12324182
accagagccaccttcattcacttcacaaaccgctcggcgacaaagacgaagaagccgaggaagcaccgatacgacgattgagacttagttttgctcagattcatttaaccaccggcgccaagtgacgacgacgacggagggagcagattcgaattgtgtgaagacagcaatggagtctactgagtcatatgcggcaggttcaccggaagagctggctaagagatcccctgaaccgcatgattcttccgaagctgattctgctgagaagccaacacacattcggtttcttgtatccaatgcggcagctggttccgtcattgggaaaggtggctcgaccatcactgaatttcaggcaaagtctggggcaaggattcagctttcacgtaatcaagagtttttcccggggacgactgacagaattattatgatatcgggatcaatcaaagaagttgtcaatggactggaacttatccttgataaattgcacagtgagcttcatgctgaagatggtaatgaggttgagcctaggagaagaattagacttgtggttcctaacagttcttgtggaggtataatcggaaaaggaggggccaccatcaagtcattcattgaggaatctaaagctggtattaagatatcccctctggataataccttttatgggttgagcgataggttagtgacattatctgggaccttcgaggagcagatgcgggcaatcgatttgattttggctaagcttactgaggacgatcattactcccagaatgtgcattccccatattcatatgcagcgggatacaattcggttaactacgcacccaacggttctggaggcaagtatcaaaaccacaaggaagaagctagtaccacggtgacaattggtgttgcggatgagcatataggattggtgcttggacgtggaggaagaaacatcatggaaatcactcagatgactggtgcccgaattaaaatatcagaccgaggtgattttatgtctggaaccactgataggaaagtgagtatcacagggccacagagagcaatccaacaagctgagacaatgataaaacagaaagttgattcagccacagagagaaccaccgattgaaaccgttaagagaatccatctcggttcctatctttggtctgttgacttcatttgtggaggcttaagctatcggatggggatcattaatcatctttgagtgaggcagagatttctctctaggagctctctttcgttttatttatatgtcgacattatataatgtgtttttctctgggagagaagcagatttggagttagagaagtactattttcatttgttcttttaataactttgttgcaatttgttgaagttttgtttcccttgagttctttctgttgtaacaatttacaataaccagccattacatt

SEQ ID NO: 1062 - protein, 313 aa, Arabidopsis thaliana
  peptide (1)..(313): Ceres Seq. ID no. 12324183
  misc_feature (124)..(175): Pfam Name: Pfam Description:  KH domain
  misc_feature (1)..(313): NCBI GI NO: 15237716 NR Description: KH domain protein Nova, putative
  misc_feature (1)..(218): NCBI GI NO: 30680512 NR Description: KH domain protein Nova, putative
  misc_feature (204)..(313): NCBI GI NO: 30680512 NR Description: KH domain protein Nova, putative
  misc_feature (204)..(310): NCBI GI NO: 542190 NR Description: hypothetical protein 1087 - maize
  misc_feature (115)..(208): NCBI GI NO: 542190 NR Description: hypothetical protein 1087 - maize
  misc_feature (27)..(110): NCBI GI NO: 542190 NR Description: hypothetical protein 1087 - maize
  misc_feature (1)..(256): NCBI GI NO: 24645364 NR Description: pasilla CG8144-PA [Drosophila melanogaster]
  misc_feature (238)..(310): NCBI GI NO: 24645364 NR Description: pasilla CG8144-PA [Drosophila melanogaster]
  misc_feature (3)..(256): NCBI GI NO: 19527741 NR Description: AT03366p [Drosophila melanogaster]
  misc_feature (238)..(310): NCBI GI NO: 19527741 NR Description: AT03366p [Drosophila melanogaster]
MESTESYAAGSPEELAKRSPEPHDSSEADSAEKPTHIRFLVSNAAAGSVIGKGGSTITEFQAKSGARIQLSRNQEFFPGTTDRIIMISGSIKEVVNGLELILDKLHSELHAEDGNEVEPRRRIRLVVPNSSCGGIIGKGGATIKSFIEESKAGIKISPLDNTFYGLSDRLVTLSGTFEEQMRAIDLILAKLTEDDHYSQNVHSPYSYAAGYNSVNYAPNGSGGKYQNHKEEASTTVTIGVADEHIGLVLGRGGRNIMEITQMTGARIKISDRGDFMSGTTDRKVSITGPQRAIQQAETMIKQKVDSATERTTD

SEQ ID NO: 1063 - protein, 228 aa, Arabidopsis thaliana
  peptide (1)..(228): Ceres Seq. ID no. 12324184
  misc_feature (39)..(90): Pfam Name: Pfam Description:  KH domain
  misc_feature (1)..(228): NCBI GI NO: 15237716 NR Description: KH domain protein Nova, putative
  misc_feature (1)..(133): NCBI GI NO: 30680512 NR Description: KH domain protein Nova, putative
  misc_feature (119)..(228): NCBI GI NO: 30680512 NR Description: KH domain protein Nova, putative
  misc_feature (119)..(225): NCBI GI NO: 542190 NR Description: hypothetical protein 1087 - maize
  misc_feature (30)..(123): NCBI GI NO: 542190 NR Description: hypothetical protein 1087 - maize
  misc_feature (1)..(25): NCBI GI NO: 542190 NR Description: hypothetical protein 1087 - maize
  misc_feature (1)..(171): NCBI GI NO: 24645364 NR Description: pasilla CG8144-PA [Drosophila melanogaster]
  misc_feature (153)..(225): NCBI GI NO: 24645364 NR Description: pasilla CG8144-PA [Drosophila melanogaster]
  misc_feature (1)..(171): NCBI GI NO: 19527741 NR Description: AT03366p [Drosophila melanogaster]
  misc_feature (153)..(225): NCBI GI NO: 19527741 NR Description: AT03366p [Drosophila melanogaster]
MISGSIKEVVNGLELILDKLHSELHAEDGNEVEPRRRIRLVVPNSSCGGIIGKGGATIKSFIEESKAGIKISPLDNTFYGLSDRLVTLSGTFEEQMRAIDLILAKLTEDDHYSQNVHSPYSYAAGYNSVNYAPNGSGGKYQNHKEEASTTVTIGVADEHIGLVLGRGGRNIMEITQMTGARIKISDRGDFMSGTTDRKVSITGPQRAIQQAETMIKQKVDSATERTTD

SEQ ID NO: 1064 - DNA, 2020 bp, Arabidopsis thaliana
  misc_feature (1)..(2020): Ceres Seq. ID no. 13497076
acactattcgtttacactaaccacttccttatccacaccaatccagaacgttcctcaaaaagctccctccttttctctcaaaatggcgtctgcaaacgctctctcttccgcctccgtcctctgttcttcccgtcagagtaagttgggaggaggaaatcagcagcaaggtcagagagttagctacaacaagaggacaatcagacgttttagtgttagagctaatgtaaaggaaatagcttttgaccagcactctagagctgctctacaagctggtattgataagcttgctgattgtgttggtctcactcttggccctagagggaggaatgttgtgttggatgaatttggaagtcctaaggttgtgaatgatggagtcaccattgctagagctattgagttacctaatgccatggaaaatgctggtgcagcgcttattcgtgaggttgcgagtaagactaatgactctgctggtgatgggacaaccactgcgtctatccttgctcgggagataatcaaacatggattgttgagcgtcacttctggtgcgaatcccgtttcactcaagaggggaattgataagactgttcaaggtctgatcgaagagcttcagaagaaagctaggcccgtgaaaggtcgtgatgacatcagagctgtggcttctatctctgctggaaatgatgaccttatagggtcaatgattgctgatgccatcgacaaagttggacctgatggtgttttgtccattgaatcttcatcttcttttgagaccacggtcgaagttgaagaagggatggagattgacagaggttacatctcgcctcagtttgttacaaaccctgagaaactactagctgagtttgagaatgctagggtattgatcactgatcagaagatcactgcgatcaaagacatcatccctattttggagaagaccactcagcttcgtgctccgttgttgattattgcagaggatgttactggtgaagccttagctacccttgtcgtgaacaagcttcgtggtgtcctcaatgttgttgccgttaaagcgccaggatttggagaaagaagaaaagccatgcttcaagatattgcaatcttgacaggagctgagtacctagccatggacatgagcttactggttgaaaacgcaaccatagatcaattgggtattgcccgaaaagtcacgattagcaaagattcgactaccctcattgcagatgcagcttccaaggacgaattacaagctcggattgctcagctgaagaaagaactattcgagactgattctgtgtatgactcagagaagctcgctgagagaattgcgaagctatctggaggtgttgctgtcattaaagtcggagcagcaactgaaactgagcttgaggaccgtaagcttcgtatcgaggatgcaaagaacgcaacatttgctgctatcgaggaaggcatagttccaggtggtggtgctgctttggtgcatctctccactgttattcccgccattaaggagacttttgaggatgctgatgaacgtttgggagctgacatagtacaaaaggcattgctgtcaccagctgctcttattgctcagaacgctggagttgaaggagaagttgttgtggaaaagattatgttcagcgattgggagaatgggtacaacgcaatgactgatacatatgagaatctgttcgaagctggagtgattgatccggctaaagtgacaagatgtgcgctacagaacgctgcttccgtagcaggaatggtactgaccactcaggccattgttgttgacaaaccgaaacccaaggctcctgctgctgctgctcctgagggtctcatggtgtaatcaaaacacaacatcttatcatcacaatggcatctttgtctttttgcacatttgtcatccccatttatctgcaatgtttttcttttttgggggaatatgagtagtttgttaacagtatcgagaaataattatcatcttttttgtccaatggaaattgcagaaaatggttatgtatga

SEQ ID NO: 1065 - protein, 613 aa, Arabidopsis thaliana
  peptide (1)..(613): Ceres Seq. ID no. 13497077
  misc_feature (95)..(598): Pfam Name: Pfam Description:  TCP-1/cpn60 chaperonin family
  misc_feature (28)..(613): NCBI GI NO: 15226314 NR Description: RuBisCO subunit binding- protein alpha subunit/60 kDachaperonin alpha subunit
  misc_feature (28)..(613): NCBI GI NO: 21554572 NR Description: putative rubisco subunit binding-protein alpha subunit
  misc_feature (28)..(613): NCBI GI NO: 464727 NR Description: RuBisCO subunit binding-protein alpha subunit
  misc_feature (68)..(613): NCBI GI NO: 1351030 NR Description: RuBisCO subunit binding-protein alpha subunit
  misc_feature (67)..(613): NCBI GI NO: 99801 NR Description: chaperonine 60K alpha chain - rape (fragment)
  misc_feature (28)..(613): NCBI GI NO: 1710807 NR Description: RuBisCO subunit binding-protein alpha subunit
  misc_feature (28)..(613): NCBI GI NO: 3790441 NR Description: chaperonin 60 alpha subunit [Canavalia lineata]
  misc_feature (73)..(610): NCBI GI NO: 134102 NR Description: RuBisCO subunit binding-protein alpha subunit
  misc_feature (85)..(580): NCBI GI NO: 5650721 NR Description: rubisco subunit binding-protein alpha subunit
  misc_feature (85)..(579): NCBI GI NO: 134101 NR Description: RUBISCO SUBUNIT BINDING-PROTEIN ALPHA SUBUNIT
HYSFTLTTSLSTPIQNVPQKAPSFSLKMASANALSSASVLCSSRQSKLGGGNQQQGQRVSYNKRTIRRFSVRANVKEIAFDQHSRAALQAGIDKLADCVGLTLGPRGRNVVLDEFGSPKVVNDGVTIARAIELPNAMENAGAALIREVASKTNDSAGDGTTTASILAREIIKHGLLSVTSGANPVSLKRGIDKTVQGLIEELQKKARPVKGRDDIRAVASISAGNDDLIGSMIADAIDKVGPDGVLSIESSSSFETTVEVEEGMEIDRGYISPQFVTNPEKLLAEFENARVLITDQKITAIKDIIPILEKTTQLRAPLLIIAEDVTGEALATLVVNKLRGVLNVVAVKAPGFGERRKAMLQDIAILTGAEYLAMDMSLLVENATIDQLGIARKVTISKDSTTLIADAASKDELQARIAQLKKELFETDSVYDSEKLAERIAKLSGGVAVIKVGAATETELEDRKLRIEDAKNATFAAIEEGIVPGGGAALVHLSTVIPAIKETFEDADERLGADIVQKALLSPAALIAQNAGVEGEVVVEKIMFSDWENGYNAMTDTYENLFEAGVIDPAKVTRCALQNAASVAGMVLTTQAIVVDKPKPKAPAAAAPEGLMV

SEQ ID NO: 1066 - protein, 586 aa, Arabidopsis thaliana
  peptide (1)..(586): Ceres Seq. ID no. 13497078
  misc_feature (68)..(571): Pfam Name: Pfam Description:  TCP-1/cpn60 chaperonin family
  misc_feature (1)..(586): NCBI GI NO: 15226314 NR Description: RuBisCO subunit binding- protein alpha subunit/60 kDachaperonin alpha subunit
  misc_feature (1)..(586): NCBI GI NO: 21554572 NR Description: putative rubisco subunit binding-protein alpha subunit
  misc_feature (1)..(586): NCBI GI NO: 464727 NR Description: RuBisCO subunit binding-protein alpha subunit
  misc_feature (41)..(586): NCBI GI NO: 1351030 NR Description: RuBisCO subunit binding-protein alpha subunit
  misc_feature (40)..(586): NCBI GI NO: 99801 NR Description: chaperonine 60K alpha chain - rape (fragment)
  misc_feature (1)..(586): NCBI GI NO: 1710807 NR Description: RuBisCO subunit binding-protein alpha subunit
  misc_feature (1)..(586): NCBI GI NO: 3790441 NR Description: chaperonin 60 alpha subunit [Canavalia lineata]
  misc_feature (46)..(583): NCBI GI NO: 134102 NR Description: RuBisCO subunit binding-protein alpha subunit
  misc_feature (58)..(553): NCBI GI NO: 5650721 NR Description: rubisco subunit binding-protein alpha subunit
  misc_feature (58)..(552): NCBI GI NO: 134101 NR Description: RUBISCO SUBUNIT BINDING-PROTEIN ALPHA SUBUNIT
MASANALSSASVLCSSRQSKLGGGNQQQGQRVSYNKRTIRRFSVRANVKEIAFDQHSRAALQAGIDKLADCVGLTLGPRGRNVVLDEFGSPKVVNDGVTIARAIELPNAMENAGAALIREVASKTNDSAGDGTTTASILAREIIKHGLLSVTSGANPVSLKRGIDKTVQGLIEELQKKARPVKGRDDIRAVASISAGNDDLIGSMIADAIDKVGPDGVLSIESSSSFETTVEVEEGMEIDRGYISPQFVTNPEKLLAEFENARVLITDQKITAIKDIIPILEKTTQLRAPLLIIAEDVTGEALATLVVNKLRGVLNVVAVKAPGFGERRKAMLQDIAILTGAEYLAMDMSLLVENATIDQLGIARKVTISKDSTTLIADAASKDELQARIAQLKKELFETDSVYDSEKLAERIAKLSGGVAVIKVGAATETELEDRKLRIEDAKNATFAAIEEGIVPGGGAALVHLSTVIPAIKETFEDADERLGADIVQKALLSPAALIAQNAGVEGEVVVEKIMFSDWENGYNAMTDTYENLFEAGVIDPAKVTRCALQNAASVAGMVLTTQAIVVDKPKPKAPAAAAPEGLMV

SEQ ID NO: 1067 - protein, 477 aa, Arabidopsis thaliana
  peptide (1)..(477): Ceres Seq. ID no. 13497079
  misc_feature (1)..(462): Pfam Name: Pfam Description:  TCP-1/cpn60 chaperonin family
  misc_feature (1)..(477): NCBI GI NO: 15226314 NR Description: RuBisCO subunit binding- protein alpha subunit/60 kDachaperonin alpha subunit
  misc_feature (1)..(477): NCBI GI NO: 21554572 NR Description: putative rubisco subunit binding-protein alpha subunit
  misc_feature (1)..(477): NCBI GI NO: 464727 NR Description: RuBisCO subunit binding-protein alpha subunit
  misc_feature (1)..(477): NCBI GI NO: 1351030 NR Description: RuBisCO subunit binding-protein alpha subunit
  misc_feature (1)..(477): NCBI GI NO: 99801 NR Description: chaperonine 60K alpha chain - rape (fragment)
  misc_feature (1)..(477): NCBI GI NO: 1710807 NR Description: RuBisCO subunit binding-protein alpha subunit
  misc_feature (1)..(477): NCBI GI NO: 3790441 NR Description: chaperonin 60 alpha subunit [Canavalia lineata]
  misc_feature (1)..(474): NCBI GI NO: 134102 NR Description: RuBisCO subunit binding-protein alpha subunit
  misc_feature (1)..(444): NCBI GI NO: 5650721 NR Description: rubisco subunit binding-protein alpha subunit
  misc_feature (1)..(443): NCBI GI NO: 134101 NR Description: RUBISCO SUBUNIT BINDING-PROTEIN ALPHA SUBUNIT
MENAGAALIREVASKTNDSAGDGTTTASILAREIIKHGLLSVTSGANPVSLKRGIDKTVQGLIEELQKKARPVKGRDDIRAVASISAGNDDLIGSMIADAIDKVGPDGVLSIESSSSFETTVEVEEGMEIDRGYISPQFVTNPEKLLAEFENARVLITDQKITAIKDIIPILEKTTQLRAPLLIIAEDVTGEALATLVVNKLRGVLNVVAVKAPGFGERRKAMLQDIAILTGAEYLAMDMSLLVENATIDQLGIARKVTISKDSTTLIADAASKDELQARIAQLKKELFETDSVYDSEKLAERIAKLSGGVAVIKVGAATETELEDRKLRIEDAKNATFAAIEEGIVPGGGAALVHLSTVIPAIKETFEDADERLGADIVQKALLSPAALIAQNAGVEGEVVVEKIMFSDWENGYNAMTDTYENLFEAGVIDPAKVTRCALQNAASVAGMVLTTQAIVVDKPKPKAPAAAAPEGLMV

SEQ ID NO: 1068 - DNA, 1416 bp, Arabidopsis thaliana
  misc_feature (1)..(1416): Ceres Seq. ID no. 12602627
attttcaaatctttaaaagttgagaccagaagaagaagaaaaaaaatcatggagatgaccgaagcttccaaacagacaacagcagaaggatcagcaaatccagaaccagaccaaatcttgagtccgagaagatcgttggagctaaaacaaaagaaatggtggatctctgtttctttatgtattttcttagtcttgctcggagattctctagtcatgcttctcttgaacttcttctatgttcaagacaatcgagaagatagtgaccaagatctacaataccgaggaacatggttgcaagctctggtccaaaacgctgcgtttccactactcattcctctgtttttcattttcccttcaccaaaacaaaaccaagaaaccaccaatactcgtttcctctcttttcgtctcatcttactttacatctctcttggtgttcttgttgctgctcacagcaaattgtttgcacttgggaaattatacgcaaactttggcgtcttcacgctgatttccgcgactcagttgatatttaccgctattttcgcagccattattaaccgttttaagttcaccagatggattatcttatcgataatcggcagcattttgatttatgttttcggtagtcctgaatttggaggagagcctgatgaaaacgaagaattctacagcatccaagcttggttaactttcgctgcttcagttgctttcgcattatctctctgtttattccaactttgtttcgagaaagtgttggtaaagacaaagagatatggtaacaagaaagtgtttagaatggtcatagagatgcaaatttgtgtctcttttgtcgcaacggttgtttgtctcgtgggtttgtttgcgagtggcgagaataaggaactgcaaggcgatagccacaggtttaagaaaggagaaacgtattacgttttgagtttgatcgggttggcattgtcgtggcaggtttgggcggtcgggctgatgggtttggtgctttatgtttcgggtgtgtttggcgatgttgttcatatgtgtacttcaccacttgtggctttgtttgttgtgttggcatttgatttcatggatgatgagtttagttggcctagaattggtactttgatagcaacagttgtggctttaggatcttacttctacactctgcataagagaaacaagaagaagatggtggagctttaccaaacagagaacaatattgacgtttagtctctcatgtcaaatgtttgtttctgtttcaaaatatgttgttgttcttctgaatgttgtaagtcaatgtctaaaacatgttgtatagatctgaaaactatggaacatatttgttaattattttgatttgattttttttttgtatttatctcttacaatattttgttaatgaggatttgtcactacaatttatct

SEQ ID NO: 1069 - protein, 406 aa, Arabidopsis thaliana
  peptide (1)..(406): Ceres Seq. ID no. 12602628
  misc_feature (210)..(396): Pfam Name: Pfam Description:  Domain of unknown function, DUF250
  misc_feature (17)..(406): NCBI GI NO: 15217805 NR Description: unknown protein; protein id: At1g57990
  misc_feature (17)..(406): NCBI GI NO: 15217802 NR Description: hypothetical protein; protein id: At1g57980.1
  misc_feature (17)..(406): NCBI GI NO: 15217799 NR Description: hypothetical protein; protein id: At1g57943.1
  misc_feature (34)..(403): NCBI GI NO: 15218319 NR Description: unknown protein; protein id: At1g09860.1
  misc_feature (20)..(395): NCBI GI NO: 25405230 NR Description: F16N3.10 [imported] - Arabidopsis thaliana
  misc_feature (20)..(401): NCBI GI NO: 25405226 NR Description: F16N3.13 [imported] - Arabidopsis thaliana
  misc_feature (48)..(391): NCBI GI NO: 15223662 NR Description: unknown protein; protein id: At1g19770.1
  misc_feature (26)..(387): NCBI GI NO: 15219436 NR Description: hypothetical protein; protein id: At1g44750
  misc_feature (179)..(401): NCBI GI NO: 15220261 NR Description: hypothetical protein; protein id: At1g47590.1
  misc_feature (49)..(388): NCBI GI NO: 9369374 NR Description: F10A5.31 [Arabidopsis thaliana]
IFKSLKVETRRRRKKIMEMTEASKQTTAEGSANPEPDQILSPRRSLELKQKKWWISVSLCIFLVLLGDSLVMLLLNFFYVQDNREDSDQDLQYRGTWLQALVQNAAFPLLIPLFFIFPSPKQNQETTNTRFLSFRLILLYISLGVLVAAHSKLFALGKLYANFGVFTLISATQLIFTAIFAAIINRFKFTRWIILSIIGSILIYVFGSPEFGGEPDENEEFYSIQAWLTFAASVAFALSLCLFQLCFEKVLVKTKRYGNKKVFRMVIEMQICVSFVATVVCLVGLFASGENKELQGDSHRFKKGETYYVLSLIGLALSWQVWAVGLMGLVLYVSGVFGDVVHMCTSPLVALFVVLAFDFMDDEFSWPRIGTLIATVVALGSYFYTLHKRNKKKMVELYQTENNIDV

SEQ ID NO: 1070 - protein, 390 aa, Arabidopsis thaliana
  peptide (1)..(390): Ceres Seq. ID no. 12602629
  misc_feature (194)..(380): Pfam Name: Pfam Description:  Domain of unknown function, DUF250
  misc_feature (1)..(390): NCBI GI NO: 15217805 NR Description: unknown protein; protein id: At1g57990
  misc_feature (1)..(390): NCBI GI NO: 15217802 NR Description: hypothetical protein; protein id: At1g57980.1
  misc_feature (1)..(390): NCBI GI NO: 15217799 NR Description: hypothetical protein; protein id: At1g57943.1
  misc_feature (18)..(387): NCBI GI NO: 15218319 NR Description: unknown protein; protein id: At1g09860.1
  misc_feature (4)..(379): NCBI GI NO: 25405230 NR Description: F16N3.10 [imported] - Arabidopsis thaliana
  misc_feature (4)..(385): NCBI GI NO: 25405226 NR Description: F16N3.13 [imported] - Arabidopsis thaliana
  misc_feature (32)..(375): NCBI GI NO: 15223662 NR Description: unknown protein; protein id: At1g19770.1
  misc_feature (10)..(371): NCBI GI NO: 15219436 NR Description: hypothetical protein; protein id: At1g44750
  misc_feature (163)..(385): NCBI GI NO: 15220261 NR Description: hypothetical protein; protein id: At1g47590.1
  misc_feature (33)..(372): NCBI GI NO: 9369374 NR Description: F10A5.31 [Arabidopsis thaliana]
MEMTEASKQTTAEGSANPEPDQILSPRRSLELKQKKWWISVSLCIFLVLLGDSLVMLLLNFFYVQDNREDSDQDLQYRGTWLQALVQNAAFPLLIPLFFIFPSPKQNQETTNTRFLSFRLILLYISLGVLVAAHSKLFALGKLYANFGVFTLISATQLIFTAIFAAIINRFKFTRWIILSIIGSILIYVFGSPEFGGEPDENEEFYSIQAWLTFAASVAFALSLCLFQLCFEKVLVKTKRYGNKKVFRMVIEMQICVSFVATVVCLVGLFASGENKELQGDSHRFKKGETYYVLSLIGLALSWQVWAVGLMGLVLYVSGVFGDVVHMCTSPLVALFVVLAFDFMDDEFSWPRIGTLIATVVALGSYFYTLHKRNKKKMVELYQTENNIDV

SEQ ID NO: 1071 - protein, 388 aa, Arabidopsis thaliana
  peptide (1)..(388): Ceres Seq. ID no. 12602630
  misc_feature (192)..(378): Pfam Name: Pfam Description:  Domain of unknown function, DUF250
  misc_feature (1)..(388): NCBI GI NO: 15217805 NR Description: unknown protein; protein id: At1g57990
  misc_feature (1)..(388): NCBI GI NO: 15217802 NR Description: hypothetical protein; protein id: At1g57980.1
  misc_feature (1)..(388): NCBI GI NO: 15217799 NR Description: hypothetical protein; protein id: At1g57943.1
  misc_feature (16)..(385): NCBI GI NO: 15218319 NR Description: unknown protein; protein id: At1g09860.1
  misc_feature (2)..(377): NCBI GI NO: 25405230 NR Description: F16N3.10 [imported] - Arabidopsis thaliana
  misc_feature (2)..(383): NCBI GI NO: 25405226 NR Description: F16N3.13 [imported] - Arabidopsis thaliana
  misc_feature (30)..(373): NCBI GI NO: 15223662 NR Description: unknown protein; protein id: At1g19770.1
  misc_feature (8)..(369): NCBI GI NO: 15219436 NR Description: hypothetical protein; protein id: At1g44750
  misc_feature (161)..(383): NCBI GI NO: 15220261 NR Description: hypothetical protein; protein id: At1g47590.1
  misc_feature (31)..(370): NCBI GI NO: 9369374 NR Description: F10A5.31 [Arabidopsis thaliana]
MTEASKQTTAEGSANPEPDQILSPRRSLELKQKKWWISVSLCIFLVLLGDSLVMLLLNFFYVQDNREDSDQDLQYRGTWLQALVQNAAFPLLIPLFFIFPSPKQNQETTNTRFLSFRLILLYISLGVLVAAHSKLFALGKLYANFGVFTLISATQLIFTAIFAAIINRFKFTRWIILSIIGSILIYVFGSPEFGGEPDENEEFYSIQAWLTFAASVAFALSLCLFQLCFEKVLVKTKRYGNKKVFRMVIEMQICVSFVATVVCLVGLFASGENKELQGDSHRFKKGETYYVLSLIGLALSWQVWAVGLMGLVLYVSGVFGDVVHMCTSPLVALFVVLAFDFMDDEFSWPRIGTLIATVVALGSYFYTLHKRNKKKMVELYQTENNIDV

SEQ ID NO: 1072 - DNA, 1481 bp, Arabidopsis thaliana
  misc_feature (1)..(1481): Ceres Seq. ID no. 12357762
gattacttgtttctttgatttctccttccatagaaccgaattgttttcagtctgagatttctcctgccgagagaacgattttaatctattttcctcgagagtagaaaatggctgatggtgaagatattcaaccccttgtctgtgacaatggaactggaatggttaaggctggttttgctggggatgatgcaccgagggctgtgtttccaagtattgttggccgtcctcgccacactggagtgatggttggaatgggacagaaggatgcatatgttggcgatgaagctcaatccaagcgtggtattcttacccttaaataccctattgagcacggtattgtcaacaattgggatgatatggaaaaaatctggcatcatactttctacaatgagctccgtgttgctcccgaggagcatcctattctgctcactgaagcgcctcttaacccaaaggctaaccgtgagaagatgactcagatcatgtttgaaacctttaacgctccggctatgtatgtcgccattcaagctgtcctgtcgctttatgctagtggtcgtactactggtattgtgcttgactctggagatggtgtgagtcacacggtccctatctatgagggttacgctctcccgcatgcaatcctacgtcttgatcttgcaggtcgtgacctcacagatgctctgatgaagatcctcactgagcgtggttactctttcaccacaacagctgagcgtgaaattgtcagagacatcaaggagaagctttgctacattgctcttgactatgagcaggagcttgagacggctaaaaccagctcttctgtagagaagaactatgagttacctgatgggcaagtgatcaccattggatctgagcgtttccgttgccctgaggttctttaccagccatctatgatcggtatggagaatgctggtatccatgaaaccacctacaactccataatgaaatgtgatgttgacatcagaaaggacttgtatggtaacattgtgctcagtggtggaacaactatgttccctggaattgctgacagaatgagcaaagagatcactgctttggcaccgagcagcatgaagatcaaagtcgttgcacctcctgagaggaaatactctgtctggattggaggatccatcttggcctccctcagtaccttccagcagatgtggatcgcaaaggcagaatatgatgagtcaggcccgtcgattgttcaccggaaatgcttttgagcttgaagttaagtctgcttccggagaagccctgggggttttccagtttgtccttactgggtttttatcttcgttctctgctcttctttgtttttcttcttcaatattttcagattctggcctaagacattttgaagaatttacattatctgtttgtagtgttaaactgttgtcttgttccttttatttattttggatgacacaactgtgtttgagtgaataagaactcctgatttttcc

SEQ ID NO: 1073 - protein, 377 aa, Arabidopsis thaliana
  peptide (1)..(377): Ceres Seq. ID no. 12357763
  misc_feature (1)..(377): Pfam Name: Pfam Description:  Actin
  misc_feature (1)..(362): NCBI GI NO: 11276980 NR Description: actin (ACT3) - Arabidopsis thaliana
  misc_feature (1)..(377): NCBI GI NO: 18409908 NR Description: actin (ACT3); protein id: At3g53750
  misc_feature (1)..(377): NCBI GI NO: 71633 NR Description: actin - Arabidopsis thaliana
  misc_feature (1)..(377): NCBI GI NO: 11276975 NR Description: actin [imported] - upland cotton
  misc_feature (1)..(377): NCBI GI NO: 11276977 NR Description: actin [imported] - Striga asiatica
  misc_feature (1)..(377): NCBI GI NO: 231503 NR Description: ACTIN 97
  misc_feature (1)..(377): NCBI GI NO: 11276978 NR Description: actin ACT2 [imported] - Striga asiatica
  misc_feature (1)..(377): NCBI GI NO: 23092520 NR Description: actin [Phalaenopsis hybrid cultivar]
  misc_feature (1)..(377): NCBI GI NO: 15231447 NR Description: actin 12; protein id: At3g46520.1
  misc_feature (1)..(377): NCBI GI NO: 30268605 NR Description: skeletal alpha-actin type-2b
MADGEDIQPLVCDNGTGMVKAGFAGDDAPRAVFPSIVGRPRHTGVMVGMGQKDAYVGDEAQSKRGILTLKYPIEHGIVNNWDDMEKIWHHTFYNELRVAPEEHPILLTEAPLNPKANREKMTQIMFETFNAPAMYVAIQAVLSLYASGRTTGIVLDSGDGVSHTVPIYEGYALPHAILRLDLAGRDLTDALMKILTERGYSFTTTAEREIVRDIKEKLCYIALDYEQELETAKTSSSVEKNYELPDGQVITIGSERFRCPEVLYQPSMIGMENAGIHETTYNSIMKCDVDIRKDLYGNIVLSGGTTMFPGIADRMSKEITALAPSSMKIKVVAPPERKYSVWIGGSILASLSTFQQMWIAKAEYDESGPSIVHRKCF

SEQ ID NO: 1074 - protein, 360 aa, Arabidopsis thaliana
  peptide (1)..(360): Ceres Seq. ID no. 12357764
  misc_feature (1)..(360): Pfam Name: Pfam Description:  Actin
  misc_feature (1)..(345): NCBI GI NO: 11276980 NR Description: actin (ACT3) - Arabidopsis thaliana
  misc_feature (1)..(360): NCBI GI NO: 18409908 NR Description: actin (ACT3); protein id: At3g53750
  misc_feature (1)..(360): NCBI GI NO: 71633 NR Description: actin - Arabidopsis thaliana
  misc_feature (1)..(360): NCBI GI NO: 11276975 NR Description: actin [imported] - upland cotton
  misc_feature (1)..(360): NCBI GI NO: 11276977 NR Description: actin [imported] - Striga asiatica
  misc_feature (1)..(360): NCBI GI NO: 231503 NR Description: ACTIN 97
  misc_feature (1)..(360): NCBI GI NO: 11276978 NR Description: actin ACT2 [imported] - Striga asiatica
  misc_feature (1)..(360): NCBI GI NO: 23092520 NR Description: actin [Phalaenopsis hybrid cultivar]
  misc_feature (1)..(360): NCBI GI NO: 15231447 NR Description: actin 12; protein id: At3g46520.1
  misc_feature (1)..(360): NCBI GI NO: 30268605 NR Description: skeletal alpha-actin type-2b
MVKAGFAGDDAPRAVFPSIVGRPRHTGVMVGMGQKDAYVGDEAQSKRGILTLKYPIEHGIVNNWDDMEKIWHHTFYNELRVAPEEHPILLTEAPLNPKANREKMTQIMFETFNAPAMYVAIQAVLSLYASGRTTGIVLDSGDGVSHTVPIYEGYALPHAILRLDLAGRDLTDALMKILTERGYSFTTTAEREIVRDIKEKLCYIALDYEQELETAKTSSSVEKNYELPDGQVITIGSERFRCPEVLYQPSMIGMENAGIHETTYNSIMKCDVDIRKDLYGNIVLSGGTTMFPGIADRMSKEITALAPSSMKIKVVAPPERKYSVWIGGSILASLSTFQQMWIAKAEYDESGPSIVHRKCF

SEQ ID NO: 1075 - protein, 332 aa, Arabidopsis thaliana
  peptide (1)..(332): Ceres Seq. ID no. 12357765
  misc_feature (1)..(332): Pfam Name: Pfam Description:  Actin
  misc_feature (1)..(317): NCBI GI NO: 11276980 NR Description: actin (ACT3) - Arabidopsis thaliana
  misc_feature (1)..(332): NCBI GI NO: 18409908 NR Description: actin (ACT3); protein id: At3g53750
  misc_feature (1)..(332): NCBI GI NO: 71633 NR Description: actin - Arabidopsis thaliana
  misc_feature (1)..(332): NCBI GI NO: 11276975 NR Description: actin [imported] - upland cotton
  misc_feature (1)..(332): NCBI GI NO: 11276977 NR Description: actin [imported] - Striga asiatica
  misc_feature (1)..(332): NCBI GI NO: 231503 NR Description: ACTIN 97
  misc_feature (1)..(332): NCBI GI NO: 11276978 NR Description: actin ACT2 [imported] - Striga asiatica
  misc_feature (1)..(332): NCBI GI NO: 23092520 NR Description: actin [Phalaenopsis hybrid cultivar]
  misc_feature (1)..(332): NCBI GI NO: 15231447 NR Description: actin 12; protein id: At3g46520.1
  misc_feature (1)..(332): NCBI GI NO: 30268605 NR Description: skeletal alpha-actin type-2b
MVGMGQKDAYVGDEAQSKRGILTLKYPIEHGIVNNWDDMEKIWHHTFYNELRVAPEEHPILLTEAPLNPKANREKMTQIMFETFNAPAMYVAIQAVLSLYASGRTTGIVLDSGDGVSHTVPIYEGYALPHAILRLDLAGRDLTDALMKILTERGYSFTTTAEREIVRDIKEKLCYIALDYEQELETAKTSSSVEKNYELPDGQVITIGSERFRCPEVLYQPSMIGMENAGIHETTYNSIMKCDVDIRKDLYGNIVLSGGTTMFPGIADRMSKEITALAPSSMKIKVVAPPERKYSVWIGGSILASLSTFQQMWIAKAEYDESGPSIVHRKCF

SEQ ID NO: 1076 - DNA, 1291 bp, Arabidopsis thaliana
  misc_feature (1)..(1291): Ceres Seq. ID no. 12334289
caaaattcggtcaaaaacaaaagaatctaaaaatagcaagttcatcgtttgatattaaagtttaacaagaagaatcttgaaagccgtcacgtacagatctgaagaatattctcaaggatagagagagaaatggcgacggacttcaagtctttaccagtcatcgacatctctcgtttactcctcaagtgtgatgatcccgacatggcagaggatgtcggtgtggccgaggttgtccagcaactggataaagcttgtcgggacgccggattcttctacgtgataggccatggaatatcagaggatgttattaacaaggttagagagatcactcgtgagttctttaagcttccttatgaagagaaacttaaaatcaaaatgactccagctgctggatacagaggatatcagagaattggagaaaatgtaaccaaaggaataccagatattcatgaagccattgattgttacaaagagattaagcaggggaagtatggggatataggcaaagttatggaagggccaaaccagtggccagagaatcctcaagagtttaaagagttgatggaggagtatattaagctatgtacagatctttctagaaagattttgagaggaatctccttagctcttgctggatcaccttatgagttcgagggaaagatggctggtgatcctttttgggtgatgcgtcttattggttatccaggtgctgagttcacaaatggccaacctgaaaatgatattggatgtggagctcacactgactatggcttgttaactcttgtgaatcaagatgatgacaaaactgctctgcaggtgagaaacttgggcggtgagtggatatcagccattccaatccctggatcgtttgtttgcaacatcggcgacatgttaaagatactttcaaacggagtatacgaatccacacttcatagagtgatcaataactctcctcaataccgtgtttgtgtcgcattcttctatgagactaacttcgacgcggtggtggagccattggatatatgtaaacagaagtaccctggaggaagaggaggatgccaagttttcaaaagagctgtgtatggagagcatctcgtaagtaaagtccagaccaactttgctatgtaatggaaggcagatctctctctccttctttgtacacaatacaccaacttcatcttaaagtttgatttgtaataatagtaaggtacttctttacttctgtgttatcaatggatacacatgtatttgcttcaaaaaataaaatgaaaaaggtatttagtttgttggc

SEQ ID NO: 1077 - protein, 332 aa, Arabidopsis thaliana
  peptide (1)..(332): Ceres Seq. ID no. 12334290
  misc_feature (182)..(287): Pfam Name: II Pfam Description: 2OG-Fe
  misc_feature (1)..(332): NCBI GI NO: 21554579 NR Description: flavonol synthase-like protein
  misc_feature (1)..(332): NCBI GI NO: 18409039 NR Description: flavonol synthase - like protein
  misc_feature (1)..(332): NCBI GI NO: 11255902 NR Description: flavonol synthase-like protein
  misc_feature (1)..(331): NCBI GI NO: 19423910 NR Description: unknown protein [Arabidopsis thaliana]
  misc_feature (1)..(331): NCBI GI NO: 22331716 NR Description: oxidoreductase
  misc_feature (1)..(331): NCBI GI NO: 11255891 NR Description: hypothetical protein T9C5
  misc_feature (6)..(330): NCBI GI NO: 15229181 NR Description: putative protein; protein id: At3g49630.1
  misc_feature (1)..(330): NCBI GI NO: 6984228 NR Description: putative flavonol synthase-like protein
  misc_feature (4)..(298): NCBI GI NO: 23130050 NR Description: hypothetical protein [Nostoc punctiforme]
  misc_feature (1)..(122): NCBI GI NO: 10834554 NR Description: 2-oxoacid-dependent oxidase [Arabidopsis thaliana]
MATDFKSLPVIDISRLLLKCDDPDMAEDVGVAEVVQQLDKACRDAGFFYVIGHGISEDVINKVREITREFFKLPYEEKLKIKMTPAAGYRGYQRIGENVTKGIPDIHEAIDCYKEIKQGKYGDIGKVMEGPNQWPENPQEFKELMEEYIKLCTDLSRKILRGISLALAGSPYEFEGKMAGDPFWVMRLIGYPGAEFTNGQPENDIGCGAHTDYGLLTLVNQDDDKTALQVRNLGGEWISAIPIPGSFVCNIGDMLKILSNGVYESTLHRVINNSPQYRVCVAFFYETNFDAVVEPLDICKQKYPGGRGGCQVFKRAVYGEHLVSKVQTNFAM

SEQ ID NO: 1078 - protein, 308 aa, Arabidopsis thaliana
  peptide (1)..(308): Ceres Seq. ID no. 12334291
  misc_feature (158)..(263): Pfam Name: II Pfam Description: 2OG-Fe
  misc_feature (1)..(308): NCBI GI NO: 21554579 NR Description: flavonol synthase-like protein
  misc_feature (1)..(308): NCBI GI NO: 18409039 NR Description: flavonol synthase - like protein
  misc_feature (1)..(308): NCBI GI NO: 11255902 NR Description: flavonol synthase-like protein
  misc_feature (1)..(307): NCBI GI NO: 19423910 NR Description: unknown protein [Arabidopsis thaliana]
  misc_feature (1)..(307): NCBI GI NO: 22331716 NR Description: oxidoreductase
  misc_feature (1)..(307): NCBI GI NO: 11255891 NR Description: hypothetical protein T9C5
  misc_feature (1)..(306): NCBI GI NO: 15229181 NR Description: putative protein; protein id: At3g49630.1
  misc_feature (1)..(306): NCBI GI NO: 6984228 NR Description: putative flavonol synthase-like protein
  misc_feature (1)..(274): NCBI GI NO: 23130050 NR Description: hypothetical protein [Nostoc punctiforme]
  misc_feature (1)..(98): NCBI GI NO: 10834554 NR Description: 2-oxoacid-dependent oxidase [Arabidopsis thaliana]
MAEDVGVAEVVQQLDKACRDAGFFYVIGHGISEDVINKVREITREFFKLPYEEKLKIKMTPAAGYRGYQRIGENVTKGIPDIHEAIDCYKEIKQGKYGDIGKVMEGPNQWPENPQEFKELMEEYIKLCTDLSRKILRGISLALAGSPYEFEGKMAGDPFWVMRLIGYPGAEFTNGQPENDIGCGAHTDYGLLTLVNQDDDKTALQVRNLGGEWISAIPIPGSFVCNIGDMLKILSNGVYESTLHRVINNSPQYRVCVAFFYETNFDAVVEPLDICKQKYPGGRGGCQVFKRAVYGEHLVSKVQTNFAM

SEQ ID NO: 1079 - protein, 250 aa, Arabidopsis thaliana
  peptide (1)..(250): Ceres Seq. ID no. 12334292
  misc_feature (100)..(205): Pfam Name: II Pfam Description: 2OG-Fe
  misc_feature (1)..(250): NCBI GI NO: 21554579 NR Description: flavonol synthase-like protein
  misc_feature (1)..(250): NCBI GI NO: 18409039 NR Description: flavonol synthase - like protein
  misc_feature (1)..(250): NCBI GI NO: 11255902 NR Description: flavonol synthase-like protein
  misc_feature (1)..(249): NCBI GI NO: 19423910 NR Description: unknown protein [Arabidopsis thaliana]
  misc_feature (1)..(249): NCBI GI NO: 22331716 NR Description: oxidoreductase
  misc_feature (1)..(249): NCBI GI NO: 11255891 NR Description: hypothetical protein T9C5
  misc_feature (1)..(248): NCBI GI NO: 15229181 NR Description: putative protein; protein id: At3g49630.1
  misc_feature (1)..(248): NCBI GI NO: 6984228 NR Description: putative flavonol synthase-like protein
  misc_feature (1)..(216): NCBI GI NO: 23130050 NR Description: hypothetical protein [Nostoc punctiforme]
  misc_feature (1)..(40): NCBI GI NO: 10834554 NR Description: 2-oxoacid-dependent oxidase [Arabidopsis thaliana]
MTPAAGYRGYQRIGENVTKGIPDIHEAIDCYKEIKQGKYGDIGKVMEGPNQWPENPQEFKELMEEYIKLCTDLSRKILRGISLALAGSPYEFEGKMAGDPFWVMRLIGYPGAEFTNGQPENDIGCGAHTDYGLLTLVNQDDDKTALQVRNLGGEWISAIPIPGSFVCNIGDMLKILSNGVYESTLHRVINNSPQYRVCVAFFYETNFDAVVEPLDICKQKYPGGRGGCQVFKRAVYGEHLVSKVQTNFAM

SEQ ID NO: 1080 - DNA, 794 bp, Arabidopsis thaliana
  misc_feature (1)..(794): Ceres Seq. ID no. 12393483
gagttggaccagtcggaggattagggtttcaacggagactcactagtcgatctccgatcctttcttctacccgcccgaaatccgtcgaaacttctcttctttaccattgatttgcctcgtctcagctcaattctcttccgttgctgcttcgtttagttgttgcttcgcttcagtactctggtggtgggagagatgaatcacggccaacaatctggtgaggcaaagcatgaagatgatgctgctcttacagagttccttgcttctctgatggattatactcctactattcctgatgatttagtggagcactacttggctaagagtggatttcagtgccccgacgtacgattgataaggctagttgctgtggctacacaaaagtttgttgcagatgttgccagtgacgcccttcagcattgcaaggctagaccagcaccagttgtgaaagacaaaaaacagcaaaaggataagcgtttggtattgacaatggaagatctttcaaaagctttgcgtgagtatggtgtgaacgtgaagcatccagaatattttgctgatagcccttcgactggaatggaccctgcaacaagggacgaatagaaaccaggaattcctcaaaatctttgcctagtaaggacggtcatgtgtctcagatccctgattctctgttgtgtttcagttaaaaacaaaactcacttgtcttgctagtcctcaattactacattacatgtatattcgtttgttgtttgttctctggtgatttttggggttctacatcacttatccaccattcttgc

SEQ ID NO: 1081 - protein, 134 aa, Arabidopsis thaliana
  peptide (1)..(134): Ceres Seq. ID no. 12393484
  misc_feature (30)..(80): Pfam Name: Pfam Description:  Transcription initiation factor TFIID 23-30kDa subunit
  misc_feature (1)..(134): NCBI GI NO: 15236059 NR Description: Transcription factor II homolog
  misc_feature (1)..(134): NCBI GI NO: 26450720 NR Description: putative transcription factor II
  misc_feature (7)..(119): NCBI GI NO: 9910576 NR Description: TAF10 RNA polymerase II, TATA box binding protein
  misc_feature (7)..(119): NCBI GI NO: 26338586 NR Description: unnamed protein product [Mus musculus]
  misc_feature (7)..(119): NCBI GI NO: 21619259 NR Description: Similar to TAF10 RNA polymerase II
  misc_feature (7)..(119): NCBI GI NO: 34859827 NR Description: similar to Ilk protein [Rattus norvegicus]
  misc_feature (18)..(119): NCBI GI NO: 5454106 NR Description: TBP-related factor 10; TATA box binding protein
  misc_feature (7)..(119): NCBI GI NO: 20863106 NR Description: similar to Transcription initiation factor TFIID 30 kDa subunit
  misc_feature (18)..(119): NCBI GI NO: 2136293 NR Description: transcription factor IID 30k chain - human
  misc_feature (1)..(118): NCBI GI NO: 17137648 NR Description: TBP-associated factor 10b CG3069-PA
MNHGQQSGEAKHEDDAALTEFLASLMDYTPTIPDDLVEHYLAKSGFQCPDVRLIRLVAVATQKFVADVASDALQHCKARPAPVVKDKKQQKDKRLVLTMEDLSKALREYGVNVKHPEYFADSPSTGMDPATRDE

SEQ ID NO: 1082 - protein, 109 aa, Arabidopsis thaliana
  peptide (1)..(109): Ceres Seq. ID no. 12393485
  misc_feature (5)..(55): Pfam Name: Pfam Description:  Transcription initiation factor TFIID 23-30kDa subunit
  misc_feature (1)..(109): NCBI GI NO: 15236059 NR Description: Transcription factor II homolog
  misc_feature (1)..(109): NCBI GI NO: 26450720 NR Description: putative transcription factor II
  misc_feature (1)..(94): NCBI GI NO: 9910576 NR Description: TAF10 RNA polymerase II, TATA box binding protein
  misc_feature (1)..(94): NCBI GI NO: 26338586 NR Description: unnamed protein product [Mus musculus]
  misc_feature (1)..(94): NCBI GI NO: 21619259 NR Description: Similar to TAF10 RNA polymerase II
  misc_feature (1)..(94): NCBI GI NO: 34859827 NR Description: similar to Ilk protein [Rattus norvegicus]
  misc_feature (1)..(94): NCBI GI NO: 5454106 NR Description: TBP-related factor 10; TATA box binding protein
  misc_feature (1)..(94): NCBI GI NO: 20863106 NR Description: similar to Transcription initiation factor TFIID 30 kDa subunit
  misc_feature (1)..(94): NCBI GI NO: 2136293 NR Description: transcription factor IID 30k chain - human
  misc_feature (1)..(93): NCBI GI NO: 17137648 NR Description: TBP-associated factor 10b CG3069-PA
MDYTPTIPDDLVEHYLAKSGFQCPDVRLIRLVAVATQKFVADVASDALQHCKARPAPVVKDKKQQKDKRLVLTMEDLSKALREYGVNVKHPEYFADSPSTGMDPATRDE

SEQ ID NO: 1083 - DNA, 853 bp, Arabidopsis thaliana
  misc_feature (1)..(853): Ceres Seq. ID no. 13493733
taatcccccccccccccccgatccacaaaaagccattccctctctcaactctctgaatatttttcttcttacgatttacaaatttccgatgctgtgacattaacgtctgagaacagagaaacacttcaaatctttgaattcgtatgtgcgacggagacggaggagccatcagtttcgaaaatggcgtgcgaaggtggaggatctaacgtcagatctagctactacaccattctcgggattcgtaaagatgcctctgtttccgatatccgcactgcttatcgtaagctagctatgaaatggcatccggatagatatgctcgaaatcctggagtcgccggagaagctaaacgtcggtttcaacaaatccaggaagcctattctgttttgaatgatgagaataagaggtcaatgtacgatgttggactatatgatcctcatgaagatgatgacgatgacttctgtgatttcatgcaagagatgatctcaatgatgaacaatgtcaaagacgcgggagagagcttggaagacttgcaacgaatgttcacggatatggttggtggagatggcgtgagctatgactgtaacaataatccaaagggcaacaaaagaccacgtgtcaatatctcgaggagtagtgctgcgatgcgttaaggcttacttcttttgtgtatgagtgtcgtgttgtatcaaaatttcaattccatgttcaattgtctagaccataaaataaattatctgtgaaaaccaactagaactaggtagaatctttggaatcccacatgccccaatcactaatgtatctctcatgatttggttgattttaaagattcgaaaattattcatgtattgttgc

SEQ ID NO: 1084 - protein, 156 aa, Arabidopsis thaliana
  peptide (1)..(156): Ceres Seq. ID no. 13493734
  misc_feature (13)..(82): Pfam Name: Pfam Description:  DnaJ domain
  misc_feature (1)..(156): NCBI GI NO: 18405757 NR Description: DnaJ protein family [Arabidopsis thaliana]
  misc_feature (1)..(156): NCBI GI NO: 21554587 NR Description: DnaJ protein, putative [Arabidopsis thaliana]
  misc_feature (6)..(156): NCBI GI NO: 23428796 NR Description: DnaJ-like protein [Glycine max]
  misc_feature (1)..(91): NCBI GI NO: 25404111 NR Description: probable DnaJ protein
  misc_feature (10)..(133): NCBI GI NO: 7484474 NR Description: probable heat shock protein EMB1 - white spruce
  misc_feature (10)..(137): NCBI GI NO: 15231803 NR Description: DnaJ protein family [Arabidopsis thaliana]
  misc_feature (4)..(107): NCBI GI NO: 15223307 NR Description: DnaJ protein family [Arabidopsis thaliana]
  misc_feature (12)..(125): NCBI GI NO: 34912486 NR Description: heat shock protein-like
  misc_feature (10)..(79): NCBI GI NO: 29436548 NR Description: Unknown (protein for MGC:56709) [Danio rerio]
  misc_feature (11)..(130): NCBI GI NO: 29841011 NR Description: similar to DnaJ
MACEGGGSNVRSSYYTILGIRKDASVSDIRTAYRKLAMKWHPDRYARNPGVAGEAKRRFQQIQEAYSVLNDENKRSMYDVGLYDPHEDDDDDFCDFMQEMISMMNNVKDAGESLEDLQRMFTDMVGGDGVSYDCNNNPKGNKRPRVNISRSSAAMR

SEQ ID NO: 1085 - protein, 119 aa, Arabidopsis thaliana
  peptide (1)..(119): Ceres Seq. ID no. 13493735
  misc_feature (1)..(119): NCBI GI NO: 18405757 NR Description: DnaJ protein family [Arabidopsis thaliana]
  misc_feature (1)..(119): NCBI GI NO: 21554587 NR Description: DnaJ protein, putative [Arabidopsis thaliana]
  misc_feature (1)..(119): NCBI GI NO: 23428796 NR Description: DnaJ-like protein [Glycine max]
  misc_feature (1)..(54): NCBI GI NO: 25404111 NR Description: probable DnaJ protein
  misc_feature (1)..(96): NCBI GI NO: 7484474 NR Description: probable heat shock protein EMB1 - white spruce
  misc_feature (1)..(100): NCBI GI NO: 15231803 NR Description: DnaJ protein family [Arabidopsis thaliana]
  misc_feature (1)..(70): NCBI GI NO: 15223307 NR Description: DnaJ protein family [Arabidopsis thaliana]
  misc_feature (1)..(88): NCBI GI NO: 34912486 NR Description: heat shock protein-like
  misc_feature (1)..(42): NCBI GI NO: 29436548 NR Description: Unknown (protein for MGC:56709) [Danio rerio]
  misc_feature (1)..(93): NCBI GI NO: 29841011 NR Description: similar to DnaJ
MKWHPDRYARNPGVAGEAKRRFQQIQEAYSVLNDENKRSMYDVGLYDPHEDDDDDFCDFMQEMISMMNNVKDAGESLEDLQRMFTDMVGGDGVSYDCNNNPKGNKRPRVNISRSSAAMR

SEQ ID NO: 1086 - protein, 80 aa, Arabidopsis thaliana
  peptide (1)..(80): Ceres Seq. ID no. 13493736
  misc_feature (1)..(80): NCBI GI NO: 18405757 NR Description: DnaJ protein family [Arabidopsis thaliana]
  misc_feature (1)..(80): NCBI GI NO: 21554587 NR Description: DnaJ protein, putative [Arabidopsis thaliana]
  misc_feature (1)..(80): NCBI GI NO: 23428796 NR Description: DnaJ-like protein [Glycine max]
  misc_feature (1)..(15): NCBI GI NO: 25404111 NR Description: probable DnaJ protein
  misc_feature (1)..(57): NCBI GI NO: 7484474 NR Description: probable heat shock protein EMB1 - white spruce
  misc_feature (1)..(61): NCBI GI NO: 15231803 NR Description: DnaJ protein family [Arabidopsis thaliana]
  misc_feature (1)..(31): NCBI GI NO: 15223307 NR Description: DnaJ protein family [Arabidopsis thaliana]
  misc_feature (1)..(49): NCBI GI NO: 34912486 NR Description: heat shock protein-like
  misc_feature (1)..(54): NCBI GI NO: 29841011 NR Description: similar to DnaJ
  misc_feature (1)..(20): NCBI GI NO: 23485645 NR Description: heat shock protein DnaJ homologue Pfj4
MYDVGLYDPHEDDDDDFCDFMQEMISMMNNVKDAGESLEDLQRMFTDMVGGDGVSYDCNNNPKGNKRPRVNISRSSAAMR

SEQ ID NO: 1087 - DNA, 771 bp, Arabidopsis thaliana
  misc_feature (1)..(771): Ceres Seq. ID no. 12393376
aactttttcaaaaaaaggaaaaaaaacagagctcactcattattatctctctaaaaaccctagctttctccatgggctttcccgtaggttacacagaggttttcttaccgaagcttttcgtacaaacgctttcgattctcggattcatcagaaccatcgtcttctctatcttccgcttcttgggtctctcagattttctcgaaatggatcaaacctggcccgattacacatcgtacccgacccgaatacccgaaacccgctcacctttctccgcactcctaattagagagatcctaccggttatcaaattcgaagagttaacgaattccggcgaagatctaccggaaaactgcgccgtttgtctatacgaattcgaaggagaacaagagatccggtggctgagaaattgcagacatatatttcaccggagctgtcttgaccgttggatggatcatgatcagaagacgtgtccactttgtagaacaccgtttgttccagatgagatgcaagaagagtttaatcaacggctatgggctgcttctggtgttcatgattttcactgtcccgtgaccgaattattatagaagaagccacgcttttctatctttttctgtgtcccttatgttcttttttgttttgactttcacccctctacttttgatgttgcttttttcacccctcttactgacatttagacttgccacgcttttatgtgtgtatatactccttacatatgaatgagagatgagcaataaatattaccgagacagg

SEQ ID NO: 1088 - protein, 193 aa, Arabidopsis thaliana
  peptide (1)..(193): Ceres Seq. ID no. 12393377
  misc_feature (117)..(159): Pfam Name: RING finger Pfam Description: Zinc finger, C3HC4 type
  misc_feature (24)..(193): NCBI GI NO: 15233117 NR Description: RING finger protein; protein id: At3g61460
  misc_feature (24)..(180): NCBI GI NO: 21554155 NR Description: RING zinc finger protein-like
  misc_feature (24)..(180): NCBI GI NO: 15238072 NR Description: RING zinc finger protein-like
  misc_feature (24)..(180): NCBI GI NO: 15222553 NR Description: putative RING zinc finger protein
  misc_feature (24)..(106): NCBI GI NO: 32488512 NR Description: OSJNBa0011J08.19
  misc_feature (91)..(184): NCBI GI NO: 32488512 NR Description: OSJNBa0011J08.19
  misc_feature (24)..(180): NCBI GI NO: 11358777 NR Description: RING-H2 finger protein RHA1b
  misc_feature (24)..(180): NCBI GI NO: 15233350 NR Description: RING-H2 finger protein RHA1b
  misc_feature (24)..(179): NCBI GI NO: 11358776 NR Description: RING-H2 finger protein RHA1a
  misc_feature (24)..(179): NCBI GI NO: 15233352 NR Description: RING-H2 finger protein RHA1a -like protein
LFQKKEKKQSSLIIISLKTLAFSMGFPVGYTEVFLPKLFVQTLSILGFIRTIVFSIFRFLGLSDFLEMDQTWPDYTSYPTRIPETRSPFSALLIREILPVIKFEELTNSGEDLPENCAVCLYEFEGEQEIRWLRNCRHIFHRSCLDRWMDHDQKTCPLCRTPFVPDEMQEEFNQRLWAASGVHDFHCPVTELL

SEQ ID NO: 1089 - protein, 170 aa, Arabidopsis thaliana
  peptide (1)..(170): Ceres Seq. ID no. 12393378
  misc_feature (94)..(136): Pfam Name: RING finger Pfam Description: Zinc finger, C3HC4 type
  misc_feature (1)..(170): NCBI GI NO: 15233117 NR Description: RING finger protein; protein id: At3g61460
  misc_feature (1)..(157): NCBI GI NO: 21554155 NR Description: RING zinc finger protein-like
  misc_feature (1)..(157): NCBI GI NO: 15238072 NR Description: RING zinc finger protein-like
  misc_feature (1)..(157): NCBI GI NO: 15222553 NR Description: putative RING zinc finger protein
  misc_feature (1)..(83): NCBI GI NO: 32488512 NR Description: OSJNBa0011J08.19
  misc_feature (68)..(161): NCBI GI NO: 32488512 NR Description: OSJNBa0011J08.19
  misc_feature (1)..(157): NCBI GI NO: 11358777 NR Description: RING-H2 finger protein RHA1b
  misc_feature (1)..(157): NCBI GI NO: 15233350 NR Description: RING-H2 finger protein RHA1b
  misc_feature (1)..(156): NCBI GI NO: 11358776 NR Description: RING-H2 finger protein RHA1a
  misc_feature (1)..(156): NCBI GI NO: 15233352 NR Description: RING-H2 finger protein RHA1a -like protein
MGFPVGYTEVFLPKLFVQTLSILGFIRTIVFSIFRFLGLSDFLEMDQTWPDYTSYPTRIPETRSPFSALLIREILPVIKFEELTNSGEDLPENCAVCLYEFEGEQEIRWLRNCRHIFHRSCLDRWMDHDQKTCPLCRTPFVPDEMQEEFNQRLWAASGVHDFHCPVTELL

SEQ ID NO: 1090 - protein, 126 aa, Arabidopsis thaliana
  peptide (1)..(126): Ceres Seq. ID no. 12393379
  misc_feature (50)..(92): Pfam Name: RING finger Pfam Description: Zinc finger, C3HC4 type
  misc_feature (1)..(126): NCBI GI NO: 15233117 NR Description: RING finger protein; protein id: At3g61460
  misc_feature (1)..(113): NCBI GI NO: 21554155 NR Description: RING zinc finger protein-like
  misc_feature (1)..(113): NCBI GI NO: 15238072 NR Description: RING zinc finger protein-like
  misc_feature (1)..(113): NCBI GI NO: 15222553 NR Description: putative RING zinc finger protein
  misc_feature (1)..(39): NCBI GI NO: 32488512 NR Description: OSJNBa0011J08.19
  misc_feature (24)..(117): NCBI GI NO: 32488512 NR Description: OSJNBa0011J08.19
  misc_feature (1)..(113): NCBI GI NO: 11358777 NR Description: RING-H2 finger protein RHA1b
  misc_feature (1)..(113): NCBI GI NO: 15233350 NR Description: RING-H2 finger protein RHA1b
  misc_feature (1)..(112): NCBI GI NO: 11358776 NR Description: RING-H2 finger protein RHA1a
  misc_feature (1)..(112): NCBI GI NO: 15233352 NR Description: RING-H2 finger protein RHA1a -like protein
MDQTWPDYTSYPTRIPETRSPFSALLIREILPVIKFEELTNSGEDLPENCAVCLYEFEGEQEIRWLRNCRHIFHRSCLDRWMDHDQKTCPLCRTPFVPDEMQEEFNQRLWAASGVHDFHCPVTELL

SEQ ID NO: 1091 - DNA, 1117 bp, Arabidopsis thaliana
  misc_feature (1)..(1117): Ceres Seq. ID no. 12334123
aaaaatttcaatctttggctcacttctttgtttatctcatagctcttcaccaaaaccaatattttctcctttgttgttctttcttttctatcaaaactttctacttaaaatatcattcctttaaacaatgataagcaaggatccaagatcgagtttacctccagggtttcgatttcatccaacagatgaagaactcattctccattacctaaggaagaaagtttcctcttccccagtcccgctttcgattatcgccgatgtcgatatctacaaatccgatccatgggatttaccagctaaggctccatttggggagaaagagtggtattttttcagtccgagggataggaaatatccaaacggagcaagaccaaacagagcagctgcgtctggatattggaaagcaaccggaacaaataaattgattgcggtaccaaatggtgaagggtttcatgaaaacattgctggatgattgggttctttgccggatttacaagaaatcacacgcttcattgtcatcacctgatgttgctttggtcacaagcaatcaagagcatgaggaaaatgacaacgaaccattcgtagaccgcggaacctttttgccaaatttgcaaaatgatcaaccccttaaacgccagaagtcttcttgttcgttctcaaacttactagacgctacagatttgacgtttctcgcaaattttctaaacgaaaccccggaaaatcgttctgaatcagatttttctttcatgattggcaatttctctaatcctgacatttacggaaaccattacttggatcagaagttaccgcagttgagctctcccacttcagagacaagcggcatcggaagcaaaagagagagagtggattttgcggaagaaacgataaacgcttcgaagaagatgatgaacacatatagttacaataatagtatagatcaaatggatcatagtatgatgcaacaacctagtttcctgaaccaggaactcatgatgagttctcaccttcaatatcaaggctagagagaatattaatttgaaaacctaatcacgaattagggatcattcggtatgtgattgaaaagtaggagtcgttgttagtaatttaccaaactatt

SEQ ID NO: 1092 - protein, 194 aa, Arabidopsis thaliana
  peptide (1)..(194): Ceres Seq. ID no. 12334124
  misc_feature (10)..(194): NCBI GI NO: 6223651 NR Description: NAM-like protein (no apical meristem)
  misc_feature (10)..(194): NCBI GI NO: 30679026 NR Description: No apical meristem (NAM) protein family
  misc_feature (10)..(54): NCBI GI NO: 15219110 NR Description: NAM-like protein; protein id: At1g52880
  misc_feature (10)..(56): NCBI GI NO: 20466640 NR Description: NAM-like protein [Arabidopsis thaliana]
  misc_feature (10)..(25): NCBI GI NO: 15232606 NR Description: putative jasmonic acid regulatory protein
  misc_feature (10)..(77): NCBI GI NO: 34902154 NR Description: Putative NAM (no apical meristem) protein
  misc_feature (10)..(54): NCBI GI NO: 21554226 NR Description: NAM-like protein [Arabidopsis thaliana]
  misc_feature (3)..(23): NCBI GI NO: 34899790 NR Description: OJ1773_H01.21
  misc_feature (10)..(43): NCBI GI NO: 18416983 NR Description: putative protein; protein id: At4g27410
  misc_feature (1)..(25): NCBI GI NO: 34894054 NR Description: putative NAM protein
MVKGFMKTLLDDWVLCRIYKKSHASLSSPDVALVTSNQEHEENDNEPFVDRGTFLPNLQNDQPLKRQKSSCSFSNLLDATDLTFLANFLNETPENRSESDFSFMIGNFSNPDIYGNHYLDQKLPQLSSPTSETSGIGSKRERVDFAEETINASKKMMNTYSYNNSIDQMDHSMMQQPSFLNQELMMSSHLQYQG

SEQ ID NO: 1093 - protein, 189 aa, Arabidopsis thaliana
  peptide (1)..(189): Ceres Seq. ID no. 12334125
  misc_feature (5)..(189): NCBI GI NO: 6223651 NR Description: NAM-like protein (no apical meristem)
  misc_feature (5)..(189): NCBI GI NO: 30679026 NR Description: No apical meristem (NAM) protein family
  misc_feature (5)..(49): NCBI GI NO: 15219110 NR Description: NAM-like protein; protein id: At1g52880
  misc_feature (5)..(51): NCBI GI NO: 20466640 NR Description: NAM-like protein [Arabidopsis thaliana]
  misc_feature (5)..(20): NCBI GI NO: 15232606 NR Description: putative jasmonic acid regulatory protein
  misc_feature (5)..(72): NCBI GI NO: 34902154 NR Description: Putative NAM (no apical meristem) protein
  misc_feature (5)..(49): NCBI GI NO: 21554226 NR Description: NAM-like protein [Arabidopsis thaliana]
  misc_feature (1)..(18): NCBI GI NO: 34899790 NR Description: OJ1773_H01.21
  misc_feature (5)..(38): NCBI GI NO: 18416983 NR Description: putative protein; protein id: At4g27410
  misc_feature (1)..(20): NCBI GI NO: 34894054 NR Description: putative NAM protein
MKTLLDDWVLCRIYKKSHASLSSPDVALVTSNQEHEENDNEPFVDRGTFLPNLQNDQPLKRQKSSCSFSNLLDATDLTFLANFLNETPENRSESDFSFMIGNFSNPDIYGNHYLDQKLPQLSSPTSETSGIGSKRERVDFAEETINASKKMMNTYSYNNSIDQMDHSMMQQPSFLNQELMMSSHLQYQG

SEQ ID NO: 1094 - protein, 114 aa, Arabidopsis thaliana
  peptide (1)..(114): Ceres Seq. ID no. 12334126
  misc_feature (10)..(112): Pfam Name: NAM Pfam Description: No apical meristem
  misc_feature (1)..(112): NCBI GI NO: 6223651 NR Description: NAM-like protein (no apical meristem)
  misc_feature (1)..(112): NCBI GI NO: 30679026 NR Description: No apical meristem (NAM) protein family
  misc_feature (6)..(107): NCBI GI NO: 15219110 NR Description: NAM-like protein; protein id: At1g52880
  misc_feature (6)..(107): NCBI GI NO: 20466640 NR Description: NAM-like protein [Arabidopsis thaliana]
  misc_feature (6)..(105): NCBI GI NO: 15232606 NR Description: putative jasmonic acid regulatory protein
  misc_feature (1)..(112): NCBI GI NO: 34902154 NR Description: Putative NAM (no apical meristem) protein
  misc_feature (6)..(107): NCBI GI NO: 21554226 NR Description: NAM-like protein [Arabidopsis thaliana]
  misc_feature (10)..(100): NCBI GI NO: 34899790 NR Description: OJ1773_H01.21
  misc_feature (4)..(100): NCBI GI NO: 18416983 NR Description: putative protein; protein id: At4g27410
  misc_feature (8)..(102): NCBI GI NO: 34894054 NR Description: putative NAM protein
MISKDPRSSLPPGFRFHPTDEELILHYLRKKVSSSPVPLSIIADVDIYKSDPWDLPAKAPFGEKEWYFFSPRDRKYPNGARPNRAAASGYWKATGTNKLIAVPNGEGFHENIAG

SEQ ID NO: 1095 - DNA, 690 bp, Arabidopsis thaliana
  misc_feature (1)..(690): Ceres Seq. ID no. 12333682
atcagaaatcgaaaaatcaaagttctcaagaagatatcaacaaaaaaaaagtaaattctttaaaatgtcgatgattccaagtttcttcaacaacaacagacgaagcaacatctttgatccattctctcttgacgtatgggatccattcaaggaactaacatcatcatcactttctcgtgagaactcagcgatcgtgaacgcacgtgtggactggagagagacgcctgaggcgcacgtgtttaaagctgacttgcctggattgaagaaggaggaagttaaagttgagattgaggaggatagtgttttgaagatcagtggagagagacacgtggagaaagaagataagaatgacacgtggcaccgtgtggagagatcgagtggacagtttacgaggaggtttaggttgccggagaatgtgaagatggatcaggttaaggctgcgatggagaatggtgtgttgactgttacggtgcctaaggctgagactaagaaggctgatgttaagtctattcagatctctggttgagtaatgggttcgagttttatcatcggagttgcttgtgtttttgtcatggttatggttcatgttttacttgagtgtgtgagtcctctatctaaattataataatctccgattgagctatgaattatgatgtatcggatacatttgatcctaatgaagtatggaat

SEQ ID NO: 1096 - protein, 174 aa, Arabidopsis thaliana
  peptide (1)..(174): Ceres Seq. ID no. 12333683
  misc_feature (22)..(174): NCBI GI NO: 15227552 NR Description: putative small heat shock protein
  misc_feature (22)..(174): NCBI GI NO: 15222395 NR Description: heat shock protein, putative
  misc_feature (22)..(174): NCBI GI NO: 15218934 NR Description: heat shock protein, putative
  misc_feature (22)..(174): NCBI GI NO: 21592809 NR Description: heat shock protein, putative
  misc_feature (22)..(174): NCBI GI NO: 18073562 NR Description: 17.6 kDa heat-shock protein [Helianthus annuus]
  misc_feature (22)..(174): NCBI GI NO: 123539 NR Description: 17.5 KD CLASS I HEAT SHOCK PROTEIN (HSP 17.5-E)
  misc_feature (22)..(174): NCBI GI NO: 224545 NR Description: protein,small heat shock
  misc_feature (22)..(173): NCBI GI NO: 18073561 NR Description: 20.5 kDa heat-shock protein [Helianthus annuus]
  misc_feature (22)..(174): NCBI GI NO: 25809052 NR Description: heat shock protein [Pisum sativum]
  misc_feature (22)..(174): NCBI GI NO: 123538 NR Description: 17.5 KD CLASS I HEAT SHOCK PROTEIN (HSP 17.5-M)
SEIEKSKFSRRYQQKKSKFFKMSMIPSFFNNNRRSNIFDPFSLDVWDPFKELTSSSLSRENSAIVNARVDWRETPEAHVFKADLPGLKKEEVKVEIEEDSVLKISGERHVEKEDKNDTWHRVERSSGQFTRRFRLPENVKMDQVKAAMENGVLTVTVPKAETKKADVKSIQISG

SEQ ID NO: 1097 - protein, 153 aa, Arabidopsis thaliana
  peptide (1)..(153): Ceres Seq. ID no. 12333684
  misc_feature (1)..(153): NCBI GI NO: 15227552 NR Description: putative small heat shock protein
  misc_feature (1)..(153): NCBI GI NO: 15222395 NR Description: heat shock protein, putative
  misc_feature (1)..(153): NCBI GI NO: 15218934 NR Description: heat shock protein, putative
  misc_feature (1)..(153): NCBI GI NO: 21592809 NR Description: heat shock protein, putative
  misc_feature (1)..(153): NCBI GI NO: 18073562 NR Description: 17.6 kDa heat-shock protein [Helianthus annuus]
  misc_feature (1)..(153): NCBI GI NO: 123539 NR Description: 17.5 KD CLASS I HEAT SHOCK PROTEIN (HSP 17.5-E)
  misc_feature (1)..(153): NCBI GI NO: 224545 NR Description: protein,small heat shock
  misc_feature (1)..(152): NCBI GI NO: 18073561 NR Description: 20.5 kDa heat-shock protein [Helianthus annuus]
  misc_feature (1)..(153): NCBI GI NO: 25809052 NR Description: heat shock protein [Pisum sativum]
  misc_feature (1)..(153): NCBI GI NO: 123538 NR Description: 17.5 KD CLASS I HEAT SHOCK PROTEIN (HSP 17.5-M)
MSMIPSFFNNNRRSNIFDPFSLDVWDPFKELTSSSLSRENSAIVNARVDWRETPEAHVFKADLPGLKKEEVKVEIEEDSVLKISGERHVEKEDKNDTWHRVERSSGQFTRRFRLPENVKMDQVKAAMENGVLTVTVPKAETKKADVKSIQISG

SEQ ID NO: 1098 - protein, 151 aa, Arabidopsis thaliana
  peptide (1)..(151): Ceres Seq. ID no. 12333685
  misc_feature (1)..(151): NCBI GI NO: 15227552 NR Description: putative small heat shock protein
  misc_feature (1)..(151): NCBI GI NO: 15222395 NR Description: heat shock protein, putative
  misc_feature (1)..(151): NCBI GI NO: 15218934 NR Description: heat shock protein, putative
  misc_feature (1)..(151): NCBI GI NO: 21592809 NR Description: heat shock protein, putative
  misc_feature (1)..(151): NCBI GI NO: 18073562 NR Description: 17.6 kDa heat-shock protein [Helianthus annuus]
  misc_feature (1)..(151): NCBI GI NO: 123539 NR Description: 17.5 KD CLASS I HEAT SHOCK PROTEIN (HSP 17.5-E)
  misc_feature (1)..(151): NCBI GI NO: 224545 NR Description: protein,small heat shock
  misc_feature (1)..(150): NCBI GI NO: 18073561 NR Description: 20.5 kDa heat-shock protein [Helianthus annuus]
  misc_feature (1)..(151): NCBI GI NO: 25809052 NR Description: heat shock protein [Pisum sativum]
  misc_feature (1)..(151): NCBI GI NO: 123538 NR Description: 17.5 KD CLASS I HEAT SHOCK PROTEIN (HSP 17.5-M)
MIPSFFNNNRRSNIFDPFSLDVWDPFKELTSSSLSRENSAIVNARVDWRETPEAHVFKADLPGLKKEEVKVEIEEDSVLKISGERHVEKEDKNDTWHRVERSSGQFTRRFRLPENVKMDQVKAAMENGVLTVTVPKAETKKADVKSIQISG

SEQ ID NO: 1099 - DNA, 1350 bp, Arabidopsis thaliana
  misc_feature (1)..(1350): Ceres Seq. ID no. 12333686
aaacactgtgagagagttgaccaaaatcgacccagtgggaggactaggtttatcgaaagctccagttttcatagataaatccagtaaaattatacacgcaaattctagtttcttagagcaaagctttgttgaattgatagcttgaatttgggaatggacggagaagagcttaccgagcaggagactgccttgtacgaccgccagattagggtttggggcgctaatgctcagagaagattgaccaaagctcatatcttggtatctggaattaaggggactgttgctgagttttgcaagaacattgtgctggcaggagttggttcagtgactttaatggatgatcgtttagcaaacatggaggccttgaacgctaactttttgattccgcctgatgaaaatgtttacagtggcaaaactgtggctgagatttgtagtgattcactcaaggatttcaaccctatggtccgtgtttccgtagagaaaggtgatttgtcaatgcttggcactgatttttttgagcagtttgatgtcgtagttataggctatggttctcgtgctaccaaaaaatatgtcaatgaaaaatgtcggaagttaaagaaacgtgtcgcattctatacagtcgattgtagagactcatgtggtgaaatctttgtggacctccaagattacaagtacacaaagaaaaagcttgaagagatggtggaatgcgaactaaattttccaagttttcaggaagctatatcggtaccatggaaaccgattcctcggagaacagcaaagctctactttgctatgagagtaatagaagtgtttgaagagagtgaagggcgtaaacatggagaatgttcgctactcgatcttgccagagtcttggaaatcaaaaagcaactctgtgaggcaaactctgtgagcgagagccatataccagatattctcttggagagacttatcactggtactactgaattcccgccagtttgtgccattgtgggaggaatattagcacaggaggtgatcaaagcagtatcaggcaaaggagacccgttgaaaaacttcttctactatgatggtgaagatgggaaaggtgtgatggaagacatttccgactcttttacctcttaaacaaccagtgggccttgatttagtttaaactctataatctctgagattccatgtatatctcaatcgtttgttttttgccttcacattatgaacaaatttaatgcagaatttagtggaggatcagttgtgattttccttcggtaaaatcattttcagttattgacatttgaattgttcaatttcaaatttcaaatattataattcaattcaaagactagctaagttttt

SEQ ID NO: 1100 - protein, 322 aa, Arabidopsis thaliana
  peptide (1)..(322): Ceres Seq. ID no. 12333687
  misc_feature (30)..(168): Pfam Name: Pfam Description:  ThiF family
  misc_feature (1)..(322): NCBI GI NO: 18416454 NR Description: ubiquitin activating enzyme - like protein
  misc_feature (1)..(322): NCBI GI NO: 7488411 NR Description: ubiquitin-activating enzyme homolog F13M23
  misc_feature (1)..(317): NCBI GI NO: 22652852 NR Description: SUMO activating enzyme 1b [Arabidopsis thaliana]
  misc_feature (1)..(317): NCBI GI NO: 18423184 NR Description: ubiquitin activating enzyme; protein id: At5g50680
  misc_feature (1)..(317): NCBI GI NO: 30695912 NR Description: SUMO activating enzyme 1b (SAE1b)
  misc_feature (1)..(317): NCBI GI NO: 21554965 NR Description: ubiquitin activating enzyme [Arabidopsis thaliana]
  misc_feature (1)..(317): NCBI GI NO: 3647283 NR Description: ubiquitin activating enzyme
  misc_feature (84)..(318): NCBI GI NO: 25494393 NR Description: probable ubiquitin activating enzyme 2
  misc_feature (3)..(178): NCBI GI NO: 4885585 NR Description: SUMO-1 activating enzyme subunit 1
  misc_feature (168)..(314): NCBI GI NO: 4885585 NR Description: SUMO-1 activating enzyme subunit 1
MDGEELTEQETALYDRQIRVWGANAQRRLTKAHILVSGIKGTVAEFCKNIVLAGVGSVTLMDDRLANMEALNANFLIPPDENVYSGKTVAEICSDSLKDFNPMVRVSVEKGDLSMLGTDFFEQFDVVVIGYGSRATKKYVNEKCRKLKKRVAFYTVDCRDSCGEIFVDLQDYKYTKKKLEEMVECELNFPSFQEAISVPWKPIPRRTAKLYFAMRVIEVFEESEGRKHGECSLLDLARVLEIKKQLCEANSVSESHIPDILLERLITGTTEFPPVCAIVGGILAQEVIKAVSGKGDPLKNFFYYDGEDGKGVMEDISDSFTS

SEQ ID NO: 1101 - protein, 262 aa, Arabidopsis thaliana
  peptide (1)..(262): Ceres Seq. ID no. 12333688
  misc_feature (1)..(108): Pfam Name: Pfam Description:  ThiF family
  misc_feature (1)..(262): NCBI GI NO: 18416454 NR Description: ubiquitin activating enzyme - like protein
  misc_feature (1)..(262): NCBI GI NO: 7488411 NR Description: ubiquitin-activating enzyme homolog F13M23
  misc_feature (1)..(257): NCBI GI NO: 22652852 NR Description: SUMO activating enzyme 1b [Arabidopsis thaliana]
  misc_feature (1)..(257): NCBI GI NO: 18423184 NR Description: ubiquitin activating enzyme; protein id: At5g50680
  misc_feature (1)..(257): NCBI GI NO: 30695912 NR Description: SUMO activating enzyme 1b (SAE1b)
  misc_feature (1)..(257): NCBI GI NO: 21554965 NR Description: ubiquitin activating enzyme [Arabidopsis thaliana]
  misc_feature (1)..(257): NCBI GI NO: 3647283 NR Description: ubiquitin activating enzyme
  misc_feature (24)..(258): NCBI GI NO: 25494393 NR Description: probable ubiquitin activating enzyme 2
  misc_feature (1)..(118): NCBI GI NO: 4885585 NR Description: SUMO-1 activating enzyme subunit 1
  misc_feature (108)..(254): NCBI GI NO: 4885585 NR Description: SUMO-1 activating enzyme subunit 1
MDDRLANMEALNANFLIPPDENVYSGKTVAEICSDSLKDFNPMVRVSVEKGDLSMLGTDFFEQFDVVVIGYGSRATKKYVNEKCRKLKKRVAFYTVDCRDSCGEIFVDLQDYKYTKKKLEEMVECELNFPSFQEAISVPWKPIPRRTAKLYFAMRVIEVFEESEGRKHGECSLLDLARVLEIKKQLCEANSVSESHIPDILLERLITGTTEFPPVCAIVGGILAQEVIKAVSGKGDPLKNFFYYDGEDGKGVMEDISDSFTS

SEQ ID NO: 1102 - protein, 255 aa, Arabidopsis thaliana
  peptide (1)..(255): Ceres Seq. ID no. 12333689
  misc_feature (1)..(101): Pfam Name: Pfam Description:  ThiF family
  misc_feature (1)..(255): NCBI GI NO: 18416454 NR Description: ubiquitin activating enzyme - like protein
  misc_feature (1)..(255): NCBI GI NO: 7488411 NR Description: ubiquitin-activating enzyme homolog F13M23
  misc_feature (1)..(250): NCBI GI NO: 22652852 NR Description: SUMO activating enzyme 1b [Arabidopsis thaliana]
  misc_feature (1)..(250): NCBI GI NO: 18423184 NR Description: ubiquitin activating enzyme; protein id: At5g50680
  misc_feature (1)..(250): NCBI GI NO: 30695912 NR Description: SUMO activating enzyme 1b (SAE1b)
  misc_feature (1)..(250): NCBI GI NO: 21554965 NR Description: ubiquitin activating enzyme [Arabidopsis thaliana]
  misc_feature (1)..(250): NCBI GI NO: 3647283 NR Description: ubiquitin activating enzyme
  misc_feature (17)..(251): NCBI GI NO: 25494393 NR Description: probable ubiquitin activating enzyme 2
  misc_feature (1)..(111): NCBI GI NO: 4885585 NR Description: SUMO-1 activating enzyme subunit 1
  misc_feature (101)..(247): NCBI GI NO: 4885585 NR Description: SUMO-1 activating enzyme subunit 1
MEALNANFLIPPDENVYSGKTVAEICSDSLKDFNPMVRVSVEKGDLSMLGTDFFEQFDVVVIGYGSRATKKYVNEKCRKLKKRVAFYTVDCRDSCGEIFVDLQDYKYTKKKLEEMVECELNFPSFQEAISVPWKPIPRRTAKLYFAMRVIEVFEESEGRKHGECSLLDLARVLEIKKQLCEANSVSESHIPDILLERLITGTTEFPPVCAIVGGILAQEVIKAVSGKGDPLKNFFYYDGEDGKGVMEDISDSFTS

SEQ ID NO: 1103 - DNA, 1192 bp, Arabidopsis thaliana
  misc_feature (1)..(1192): Ceres Seq. ID no. 12606733
ctcaacatacacaaaacactaaaagtagaagaaaaatggcgactcttaaggtttctgattctgttcctgctccttctgatgatgctgagcaattgagaaccgcttttgaaggatggggtacaaacgaggacttgatcatatcaatcttggctcacagaagtgctgaacagaggaaagtgatcaggcaagcataccatgaaacctacggtgaagaccttctcaagactcttgacaaggagctctctaacgacttcgagagagctatcttgttgtggactcttgaacccggtgagcgtgatgctttattggctaatgaagctacaaaaagatggacttcaagcaaccaagtgcttatggaagtagcttgcacaaggacatcaacgcagctgcttcacgcgaggcaagcttaccatgctcgctacaagaagtctcttgaagaggacgtggctcaccacactaccggtgacttcagaaagcttttggtctctcttgttacctcatacaggtacgaaggagatgaagtgaacatgacattggctaagcaagaagctaagctggtccatgagaaaatcaaggacaagcactacaatgatgaggatgttattagaatcttgtccacaagaagcaaagctcagatcaatgctacttttaaccgttaccaagatgatcatggcgaggaaattctcaagagtcttgaggaaggagatgatgatgacaagttccttgcacttttgaggtcaaccattcagtgcttgacaagaccagagctttactttgtcgatgttcttcgttcagcaatcaacaaaactggaactgatgaaggagcactcactagaattgtgaccacaagagctgagattgacttgaaggtcattggagaggagtaccagcgcaggaacagcattcctttggagaaagctattaccaaagacactcgtggagattacgagaagatgctcgtcgcacttctcggtgaagatgatgcttaatcaatcaatcctccacagagaaacataagctgctctacagcttctgttatctcttatctccctctctctctctttgatgagtttcaaatcgtttgattttgtttctacaaaaaccttgtttgtttctgttgtgtgttttgagttcctaaataatgcaaaagagagagacagagagaaccagtgtggtctcttaagttatatac

SEQ ID NO: 1104 - protein, 328 aa, Arabidopsis thaliana
  peptide (1)..(328): Ceres Seq. ID no. 12606734
  misc_feature (24)..(91): Pfam Name: Pfam Description:  Annexin
  misc_feature (12)..(328): NCBI GI NO: 15220216 NR Description: Ca2+-dependent membrane-binding protein annexin
  misc_feature (12)..(328): NCBI GI NO: 1621539 NR Description: annexin-like protein
  misc_feature (14)..(328): NCBI GI NO: 1429207 NR Description: annexin [Arabidopsis thaliana]
  misc_feature (12)..(324): NCBI GI NO: 7484723 NR Description: fiber annexin - upland cotton
  misc_feature (13)..(324): NCBI GI NO: 15214410 NR Description: annexin [Gossypium hirsutum]
  misc_feature (13)..(324): NCBI GI NO: 33357398 NR Description: Chain A, Annexin Gh1 From Cotton
  misc_feature (12)..(328): NCBI GI NO: 2459926 NR Description: annexin [Lavatera thuringiaca]
  misc_feature (13)..(324): NCBI GI NO: 7441510 NR Description: annexin - upland cotton (fragment)
  misc_feature (12)..(327): NCBI GI NO: 2129923 NR Description: annexin - pepper
  misc_feature (12)..(327): NCBI GI NO: 12084607 NR Description: Chain A, Crystal Structure Of Annexin 24
QHTQNTKSRRKMATLKVSDSVPAPSDDAEQLRTAFEGWGTNEDLIISILAHRSAEQRKVIRQAYHETYGEDLLKTLDKELSNDFERAILLWTLEPGERDALLANEATKRWTSSNQVLMEVACTRTSTQLLHARQAYHARYKKSLEEDVAHHTTGDFRKLLVSLVTSYRYEGDEVNMTLAKQEAKLVHEKIKDKHYNDEDVIRILSTRSKAQINATFNRYQDDHGEEILKSLEEGDDDDKFLALLRSTIQCLTRPELYFVDVLRSAINKTGTDEGALTRIVTTRAEIDLKVIGEEYQRRNSIPLEKAITKDTRGDYEKMLVALLGEDDA

SEQ ID NO: 1105 - protein, 317 aa, Arabidopsis thaliana; identical to SEQ ID NO: 612
  peptide (1)..(317): Ceres Seq. ID no. 12606735
  misc_feature (13)..(80): Pfam Name: Pfam Description:  Annexin
  misc_feature (1)..(317): NCBI GI NO: 15220216 NR Description: Ca2+-dependent membrane-binding protein annexin
  misc_feature (1)..(317): NCBI GI NO: 1621539 NR Description: annexin-like protein
  misc_feature (3)..(317): NCBI GI NO: 1429207 NR Description: annexin [Arabidopsis thaliana]
  misc_feature (1)..(313): NCBI GI NO: 7484723 NR Description: fiber annexin - upland cotton
  misc_feature (2)..(313): NCBI GI NO: 15214410 NR Description: annexin [Gossypium hirsutum]
  misc_feature (2)..(313): NCBI GI NO: 33357398 NR Description: Chain A, Annexin Gh1 From Cotton
  misc_feature (1)..(317): NCBI GI NO: 2459926 NR Description: annexin [Lavatera thuringiaca]
  misc_feature (2)..(313): NCBI GI NO: 7441510 NR Description: annexin - upland cotton (fragment)
  misc_feature (1)..(316): NCBI GI NO: 2129923 NR Description: annexin - pepper
  misc_feature (1)..(316): NCBI GI NO: 12084607 NR Description: Chain A, Crystal Structure Of Annexin 24

SEQ ID NO: 1106 - protein, 211 aa, Arabidopsis thaliana; identical to SEQ ID NO: 613
  peptide (1)..(211): Ceres Seq. ID no. 12606736
  misc_feature (1)..(211): NCBI GI NO: 15220216 NR Description: Ca2+-dependent membrane-binding protein annexin
  misc_feature (1)..(211): NCBI GI NO: 1621539 NR Description: annexin-like protein
  misc_feature (1)..(211): NCBI GI NO: 1429207 NR Description: annexin [Arabidopsis thaliana]
  misc_feature (1)..(207): NCBI GI NO: 7484723 NR Description: fiber annexin - upland cotton
  misc_feature (1)..(207): NCBI GI NO: 15214410 NR Description: annexin [Gossypium hirsutum]
  misc_feature (1)..(207): NCBI GI NO: 33357398 NR Description: Chain A, Annexin Gh1 From Cotton
  misc_feature (1)..(211): NCBI GI NO: 2459926 NR Description: annexin [Lavatera thuringiaca]
  misc_feature (1)..(207): NCBI GI NO: 7441510 NR Description: annexin - upland cotton (fragment)
  misc_feature (1)..(210): NCBI GI NO: 2129923 NR Description: annexin - pepper
  misc_feature (1)..(210): NCBI GI NO: 12084607 NR Description: Chain A, Crystal Structure Of Annexin 24

SEQ ID NO: 1107 - DNA, 743 bp, Arabidopsis thaliana
  misc_feature (1)..(743): Ceres Seq. ID no. 13592706
gaagtcagtaagtaaacgagcaaaagaagaagagaaacaacaagaagtagtaatggcttcctctatgctctcctccgccgctgtggttacatccccggctcaggccaccatggtcgctccattcaccggcttgaagtcatccgctgcattcccggtcacccgcaagaccaacaaggacatcacttccatcgcaagcaacgggggaagagttagctgcatgaaggtgtggccaccaattggaaagaagaagtttgagactctatcttacctccctgaccttagtgacgtcgaattggctaaggaagttgactaccttctccgcaacaagtggattccttgtgttgaattcgagttagagcacggatttgtgtaccgtgagcacggaaacactcccggatactacgatggacggtactggacaatgtggaagcttccattgttcggatgcaccgactccgctcaagtgttgaaggaagttgaagaatgcaagaaggagtacccgggcgccttcattaggatcatcggattcgacaacacacgtcaagtccaatgcatcagtttcattgcctacaagcccccaagcttcaccgaagcttaatttcttttctaaaacattcttatgaattatctctgctcatttcatttcctattgtctgtgttctttttctctttatgagacaatttctatcggattgtcaaatgtctgatttatgaatatgtaatttatatatccgtgcgtcttg

SEQ ID NO: 1108 - protein, 198 aa, Arabidopsis thaliana
  peptide (1)..(198): Ceres Seq. ID no. 13592707
  misc_feature (18)..(198): NCBI GI NO: 15240901 NR Description: ribulose bisphosphate carboxylase small chain 3b precursor
  misc_feature (18)..(198): NCBI GI NO: 68060 NR Description: ribulose-bisphosphate carboxylase (EC 4
  misc_feature (18)..(198): NCBI GI NO: 68061 NR Description: ribulose-bisphosphate carboxylase (EC 4
  misc_feature (18)..(198): NCBI GI NO: 15240912 NR Description: ribulose bisphosphate carboxylase small chain 1b precursor
  misc_feature (18)..(198): NCBI GI NO: 15240903 NR Description: ribulose bisphosphate carboxylase small chain 2b precursor
  misc_feature (18)..(198): NCBI GI NO: 132154 NR Description: Ribulose bisphosphate carboxylase small chain
  misc_feature (18)..(198): NCBI GI NO: 132091 NR Description: Ribulose bisphosphate carboxylase small chain F1
  misc_feature (18)..(198): NCBI GI NO: 266891 NR Description: Ribulose bisphosphate carboxylase small chain
  misc_feature (18)..(198): NCBI GI NO: 480983 NR Description: ribulose-bisphosphate carboxylase (EC 4
  misc_feature (18)..(196): NCBI GI NO: 15219826 NR Description: ribulose -bisphosphate carboxylase small unit -related
KSVSKRAKEEEKQQEVVMASSMLSSAAVVTSPAQATMVAPFTGLKSSAAFPVTRKTNKDITSIASNGGRVSCMKVWPPIGKKKFETLSYLPDLSDVELAKEVDYLLRNKWIPCVEFELEHGFVYREHGNTPGYYDGRYWTMWKLPLFGCTDSAQVLKEVEECKKEYPGAFIRIIGFDNTRQVQCISFIAYKPPSFTEA

SEQ ID NO: 1109 - protein, 181 aa, Arabidopsis thaliana
  peptide (1)..(181): Ceres Seq. ID no. 13592708
  misc_feature (1)..(181): NCBI GI NO: 15240901 NR Description: ribulose bisphosphate carboxylase small chain 3b precursor
  misc_feature (1)..(181): NCBI GI NO: 68060 NR Description: ribulose-bisphosphate carboxylase (EC 4
  misc_feature (1)..(181): NCBI GI NO: 68061 NR Description: ribulose-bisphosphate carboxylase (EC 4
  misc_feature (1)..(181): NCBI GI NO: 15240912 NR Description: ribulose bisphosphate carboxylase small chain 1b precursor
  misc_feature (1)..(181): NCBI GI NO: 15240903 NR Description: ribulose bisphosphate carboxylase small chain 2b precursor
  misc_feature (1)..(181): NCBI GI NO: 132154 NR Description: Ribulose bisphosphate carboxylase small chain
  misc_feature (1)..(181): NCBI GI NO: 132091 NR Description: Ribulose bisphosphate carboxylase small chain F1
  misc_feature (1)..(181): NCBI GI NO: 266891 NR Description: Ribulose bisphosphate carboxylase small chain
  misc_feature (1)..(181): NCBI GI NO: 480983 NR Description: ribulose-bisphosphate carboxylase (EC 4
  misc_feature (1)..(179): NCBI GI NO: 15219826 NR Description: ribulose -bisphosphate carboxylase small unit -related
MASSMLSSAAVVTSPAQATMVAPFTGLKSSAAFPVTRKTNKDITSIASNGGRVSCMKVWPPIGKKKFETLSYLPDLSDVELAKEVDYLLRNKWIPCVEFELEHGFVYREHGNTPGYYDGRYWTMWKLPLFGCTDSAQVLKEVEECKKEYPGAFIRIIGFDNTRQVQCISFIAYKPPSFTEA

SEQ ID NO: 1110 - protein, 177 aa, Arabidopsis thaliana
  peptide (1)..(177): Ceres Seq. ID no. 13592709
  misc_feature (1)..(177): NCBI GI NO: 15240901 NR Description: ribulose bisphosphate carboxylase small chain 3b precursor
  misc_feature (1)..(177): NCBI GI NO: 68060 NR Description: ribulose-bisphosphate carboxylase (EC 4
  misc_feature (1)..(177): NCBI GI NO: 68061 NR Description: ribulose-bisphosphate carboxylase (EC 4
  misc_feature (1)..(177): NCBI GI NO: 15240912 NR Description: ribulose bisphosphate carboxylase small chain 1b precursor
  misc_feature (1)..(177): NCBI GI NO: 15240903 NR Description: ribulose bisphosphate carboxylase small chain 2b precursor
  misc_feature (1)..(177): NCBI GI NO: 132154 NR Description: Ribulose bisphosphate carboxylase small chain
  misc_feature (1)..(177): NCBI GI NO: 132091 NR Description: Ribulose bisphosphate carboxylase small chain F1
  misc_feature (1)..(177): NCBI GI NO: 266891 NR Description: Ribulose bisphosphate carboxylase small chain
  misc_feature (1)..(177): NCBI GI NO: 480983 NR Description: ribulose-bisphosphate carboxylase (EC 4
  misc_feature (1)..(175): NCBI GI NO: 15219826 NR Description: ribulose -bisphosphate carboxylase small unit -related
MLSSAAVVTSPAQATMVAPFTGLKSSAAFPVTRKTNKDITSIASNGGRVSCMKVWPPIGKKKFETLSYLPDLSDVELAKEVDYLLRNKWIPCVEFELEHGFVYREHGNTPGYYDGRYWTMWKLPLFGCTDSAQVLKEVEECKKEYPGAFIRIIGFDNTRQVQCISFIAYKPPSFTEA

SEQ ID NO: 1111 - DNA, 1365 bp, Arabidopsis thaliana
  misc_feature (1)..(1365): Ceres Seq. ID no. 12371989
aaagcaacaaaaacttaacccatttcttcttctttttttgtttctctctcacaaacacaacaaatatggaatacagctgtgtagacgacagtagtacaacgtcagaatctctctccatctctactactccaaagccgacaacgacgacggagaagaaactctcttctccgccggcgacgtcgatgcgtctctacagaatgggaagcggcggaagcagcgtcgttttggattcagagaacggcgtcgagaccgagtcacgtaagcttccttcgtcgaaatataaaggcgttgtgcctcagcctaacggaagatggggagctcagatttacgagaagcatcagcgagtttggctcggtactttcaacgaggaagaagaagctgcgtcttcttacgacatcgccgtgaggagattccgcggccgcgacgccgtcactaacttcaaatctcaagttgatggaaacgacgccgaatcggcttttcttgacgctcattctaaagctgagatcgtggatatgttgaggaaacacacttacgccgatgagtttgagcagagtagacggaagtttgttaacggcgacggaaaacgctctgggttggagacggcgacgtacggaaacgacgctgttttgagagcgcgtgaggttttgttcgagaagactgttacgccgagcgacgtcgggaagctgaaccgtttagtgataccgaaacaacacgcggagaagcattttccgttaccggcgatgacgacggcgatggggatgaatccgtctccgacgaaaggcgttttgattaacttggaagatagaacagggaaagtgtggcggttccgttacagttactggaacagcagtcaaagttacgtgttgaccaagggctggagccggttcgttaaagagaagaatcttcgagccggtgatgtggtttgtttcgagagatcaaccggaccagaccggcaattgtatatccactggaaagtccggtctagtccggttcagactgtggttaggctattcggagtcaacattttcaatgtgagtaacgagaaaccaaacgacgtcgcagtagagtgtgttggcaagaagagatctcgggaagatgatttgttttcgttagggtgttccaagaagcaggcgattatcaacatcttgtgacaaattctttttttttggttttttttcttcaatttgtttctcctttttcaatattttgtattgaaatgacaagttgtaaattaggacaagacaagaaaaaatgacaactagacaaaatagtttttgtttacatctaatttaggatctgttttttcaccctttcctgaaatatgatatgtgttctcctccttaatctaataatcttgtttaatct

SEQ ID NO: 1112 - protein, 382 aa, Arabidopsis thaliana
  peptide (1)..(382): Ceres Seq. ID no. 12371990
  misc_feature (215)..(329): Pfam Name: Pfam Description:  B3 DNA binding domain
  misc_feature (22)..(382): NCBI GI NO: 15222622 NR Description: DNA-binding protein RAV2, putative
  misc_feature (22)..(382): NCBI GI NO: 18409138 NR Description: AP2 domain protein RAP2
  misc_feature (22)..(382): NCBI GI NO: 21554039 NR Description: putative RAV2-like DNA-binding protein
  misc_feature (48)..(382): NCBI GI NO: 2281641 NR Description: AP2 domain containing protein RAP2.8
  misc_feature (22)..(380): NCBI GI NO: 15222217 NR Description: DNA-binding protein (RAV1); protein id: At1g13260
  misc_feature (25)..(379): NCBI GI NO: 15230871 NR Description: AP2 domain transcription factor RAV, putative
  misc_feature (25)..(341): NCBI GI NO: 21593532 NR Description: AP2 domain transcription factor
  misc_feature (67)..(328): NCBI GI NO: 34911404 NR Description: DNA-binding protein RAV2-like
  misc_feature (30)..(332): NCBI GI NO: 34895690 NR Description: putative DNA binding protein RAV2
  misc_feature (89)..(341): NCBI GI NO: 34895676 NR Description: putative DNA binding protein RAV2
SNKNLTHFFFFFCFSLTNTTNMEYSCVDDSSTTSESLSISTTPKPTTTTEKKLSSPPATSMRLYRMGSGGSSVVLDSENGVETESRKLPSSKYKGVVPQPNGRWGAQIYEKHQRVWLGTFNEEEEAASSYDIAVRRFRGRDAVTNFKSQVDGNDAESAFLDAHSKAEIVDMLRKHTYADEFEQSRRKFVNGDGKRSGLETATYGNDAVLRAREVLFEKTVTPSDVGKLNRLVIPKQHAEKHFPLPAMTTAMGMNPSPTKGVLINLEDRTGKVWRFRYSYWNSSQSYVLTKGWSRFVKEKNLRAGDVVCFERSTGPDRQLYIHWKVRSSPVQTVVRLFGVNIFNVSNEKPNDVAVECVGKKRSREDDLFSLGCSKKQAIINIL

SEQ ID NO: 1113 - protein, 361 aa, Arabidopsis thaliana
  peptide (1)..(361): Ceres Seq. ID no. 12371991
  misc_feature (194)..(308): Pfam Name: Pfam Description:  B3 DNA binding domain
  misc_feature (1)..(361): NCBI GI NO: 15222622 NR Description: DNA-binding protein RAV2, putative
  misc_feature (1)..(361): NCBI GI NO: 18409138 NR Description: AP2 domain protein RAP2
  misc_feature (1)..(361): NCBI GI NO: 21554039 NR Description: putative RAV2-like DNA-binding protein
  misc_feature (27)..(361): NCBI GI NO: 2281641 NR Description: AP2 domain containing protein RAP2.8
  misc_feature (1)..(359): NCBI GI NO: 15222217 NR Description: DNA-binding protein (RAV1); protein id: At1g13260
  misc_feature (4)..(358): NCBI GI NO: 15230871 NR Description: AP2 domain transcription factor RAV, putative
  misc_feature (4)..(320): NCBI GI NO: 21593532 NR Description: AP2 domain transcription factor
  misc_feature (46)..(307): NCBI GI NO: 34911404 NR Description: DNA-binding protein RAV2-like
  misc_feature (9)..(311): NCBI GI NO: 34895690 NR Description: putative DNA binding protein RAV2
  misc_feature (68)..(320): NCBI GI NO: 34895676 NR Description: putative DNA binding protein RAV2
MEYSCVDDSSTTSESLSISTTPKPTTTTEKKLSSPPATSMRLYRMGSGGSSVVLDSENGVETESRKLPSSKYKGVVPQPNGRWGAQIYEKHQRVWLGTFNEEEEAASSYDIAVRRFRGRDAVTNFKSQVDGNDAESAFLDAHSKAEIVDMLRKHTYADEFEQSRRKFVNGDGKRSGLETATYGNDAVLRAREVLFEKTVTPSDVGKLNRLVIPKQHAEKHFPLPAMTTAMGMNPSPTKGVLINLEDRTGKVWRFRYSYWNSSQSYVLTKGWSRFVKEKNLRAGDVVCFERSTGPDRQLYIHWKVRSSPVQTVVRLFGVNIFNVSNEKPNDVAVECVGKKRSREDDLFSLGCSKKQAIINIL

SEQ ID NO: 1114 - protein, 322 aa, Arabidopsis thaliana
  peptide (1)..(322): Ceres Seq. ID no. 12371992
  misc_feature (155)..(269): Pfam Name: Pfam Description:  B3 DNA binding domain
  misc_feature (1)..(322): NCBI GI NO: 15222622 NR Description: DNA-binding protein RAV2, putative
  misc_feature (1)..(322): NCBI GI NO: 18409138 NR Description: AP2 domain protein RAP2
  misc_feature (1)..(322): NCBI GI NO: 21554039 NR Description: putative RAV2-like DNA-binding protein
  misc_feature (1)..(322): NCBI GI NO: 2281641 NR Description: AP2 domain containing protein RAP2.8
  misc_feature (1)..(320): NCBI GI NO: 15222217 NR Description: DNA-binding protein (RAV1); protein id: At1g13260
  misc_feature (1)..(319): NCBI GI NO: 15230871 NR Description: AP2 domain transcription factor RAV, putative
  misc_feature (1)..(281): NCBI GI NO: 21593532 NR Description: AP2 domain transcription factor
  misc_feature (7)..(268): NCBI GI NO: 34911404 NR Description: DNA-binding protein RAV2-like
  misc_feature (1)..(272): NCBI GI NO: 34895690 NR Description: putative DNA binding protein RAV2
  misc_feature (29)..(281): NCBI GI NO: 34895676 NR Description: putative DNA binding protein RAV2
MRLYRMGSGGSSVVLDSENGVETESRKLPSSKYKGVVPQPNGRWGAQIYEKHQRVWLGTFNEEEEAASSYDIAVRRFRGRDAVTNFKSQVDGNDAESAFLDAHSKAEIVDMLRKHTYADEFEQSRRKFVNGDGKRSGLETATYGNDAVLRAREVLFEKTVTPSDVGKLNRLVIPKQHAEKHFPLPAMTTAMGMNPSPTKGVLINLEDRTGKVWRFRYSYWNSSQSYVLTKGWSRFVKEKNLRAGDVVCFERSTGPDRQLYIHWKVRSSPVQTVVRLFGVNIFNVSNEKPNDVAVECVGKKRSREDDLFSLGCSKKQAIINIL

SEQ ID NO: 1115 - DNA, 1370 bp, Arabidopsis thaliana
  misc_feature (1)..(1370): Ceres Seq. ID no. 12324809
aaaatcagtcacgaaaacccccaaatccacagattaattagggttttcgatttctctgatgaaactgagaagaatctctcattagggttcttcattcttcagagggatttctcatatctctctcattgagcttgctaaagctgaaatctgagtttgaaattggaattcagattcccatcccatgttgacctcttcttgctcttcttcgtctctcctctgccatcgcccagctctctctagttcgcgttccaagtttagggttccttgtcgaactgttttctctcctgctcttaccaagatttcccctttaactgcttcttcaccttctaagtccgccaagcataaatggaagattttgtgttttagaaatgaagattctgctcccgagaatccggagcattttgtgcctgaggaattagttaagccagatcaagattctccatgtacagataaaacagattggaaggcaacttttcaaaaggctgcagatgcagttttgaaggccattgggactcgttggaaggtaccatggactgtcgagaccattgtgcaggtaatgcttctgtgggtagccgctttctggttcattggttcatggatgatcccattcatggctcatatatcaggtttccacaaagaatccctaacatttagaggccaagctttgttcagtctgataaccgatgtaacagaaggcctagccgggattgctatcctccaccgttgcctctccatgttccgtccacttgcaagtgattggttccgctttacccttaaaggaaactggcaactagatgttatcataggctgtttcatgttccctttcgttaaccggctctcccaattaaacctaaacctcttgccactcccaccaacctcaagtccagtctcactctcaagtgtcgagcagtctataatggctagagaccctgtggcaatggcactgtatgcagttgtagtatcaatttgtgcaccggtttgggaagagatagtgttcagagggttcttgttaccgtctctaactaggtacatgccagtttggtgtgcgattcttgtgagttcgattgcatttgctttggcacatttcaatgtgcagaggatgttaccattggtgttccttggagtggtattgggtttgatattcgcaaggtcaaggaacttgttaccttcaatgctgttgcatagcttgtggaacggctttgtattcatggaattgatgcgatgatgactatcttttgtaggtgtcttgtttcttattcttcttgtaattgattcaaagtatgatgttagcttttatttttttataataaatggacagttcaattgtacaaagataaaaccaaaaaaggtcaaaaagaaattctaatttt

SEQ ID NO: 1116 - protein, 347 aa, Arabidopsis thaliana
  peptide (1)..(347): Ceres Seq. ID no. 12324810
  misc_feature (255)..(345): Pfam Name: Pfam Description:  CAAX amino terminal protease family
  misc_feature (1)..(347): NCBI GI NO: 18424393 NR Description: putative protein; protein id: At5g60750
  misc_feature (55)..(347): NCBI GI NO: 9759339 NR Description: gene_id:MUP24
  misc_feature (113)..(345): NCBI GI NO: 23130090 NR Description: hypothetical protein [Nostoc punctiforme]
  misc_feature (113)..(345): NCBI GI NO: 17231277 NR Description: hypothetical protein [Nostoc sp. PCC 7120]
  misc_feature (111)..(345): NCBI GI NO: 16331018 NR Description: unknown protein [Synechocystis sp. PCC 6803]
  misc_feature (244)..(345): NCBI GI NO: 23043203 NR Description: hypothetical protein
  misc_feature (113)..(345): NCBI GI NO: 37522744 NR Description: hypothetical protein gll3175
  misc_feature (112)..(345): NCBI GI NO: 21593106 NR Description: unknown [Arabidopsis thaliana]
  misc_feature (112)..(345): NCBI GI NO: 30683693 NR Description: CAAX amino terminal protease family
  misc_feature (115)..(346): NCBI GI NO: 22299433 NR Description: ORF_ID:tlr1890~hypothetical protein
MLTSSCSSSSLLCHRPALSSSRSKFRVPCRTVFSPALTKISPLTASSPSKSAKHKWKILCFRNEDSAPENPEHFVPEELVKPDQDSPCTDKTDWKATFQKAADAVLKAIGTRWKVPWTVETIVQVMLLWVAAFWFIGSWMIPFMAHISGFHKESLTFRGQALFSLITDVTEGLAGIAILHRCLSMFRPLASDWFRFTLKGNWQLDVIIGCFMFPFVNRLSQLNLNLLPLPPTSSPVSLSSVEQSIMARDPVAMALYAVVVSICAPVWEEIVFRGFLLPSLTRYMPVWCAILVSSIAFALAHFNVQRMLPLVFLGVVLGLIFARSRNLLPSMLLHSLWNGFVFMELMR

SEQ ID NO: 1117 - protein, 222 aa, Arabidopsis thaliana
  peptide (1)..(222): Ceres Seq. ID no. 12324811
  misc_feature (130)..(220): Pfam Name: Pfam Description:  CAAX amino terminal protease family
  misc_feature (1)..(222): NCBI GI NO: 18424393 NR Description: putative protein; protein id: At5g60750
  misc_feature (1)..(222): NCBI GI NO: 9759339 NR Description: gene_id:MUP24
  misc_feature (1)..(220): NCBI GI NO: 23130090 NR Description: hypothetical protein [Nostoc punctiforme]
  misc_feature (1)..(220): NCBI GI NO: 17231277 NR Description: hypothetical protein [Nostoc sp. PCC 7120]
  misc_feature (1)..(220): NCBI GI NO: 16331018 NR Description: unknown protein [Synechocystis sp. PCC 6803]
  misc_feature (119)..(220): NCBI GI NO: 23043203 NR Description: hypothetical protein
  misc_feature (1)..(220): NCBI GI NO: 37522744 NR Description: hypothetical protein gll3175
  misc_feature (1)..(220): NCBI GI NO: 21593106 NR Description: unknown [Arabidopsis thaliana]
  misc_feature (1)..(220): NCBI GI NO: 30683693 NR Description: CAAX amino terminal protease family
  misc_feature (1)..(221): NCBI GI NO: 22299433 NR Description: ORF_ID:tlr1890~hypothetical protein
MLLWVAAFWFIGSWMIPFMAHISGFHKESLTFRGQALFSLITDVTEGLAGIAILHRCLSMFRPLASDWFRFTLKGNWQLDVIIGCFMFPFVNRLSQLNLNLLPLPPTSSPVSLSSVEQSIMARDPVAMALYAVVVSICAPVWEEIVFRGFLLPSLTRYMPVWCAILVSSIAFALAHFNVQRMLPLVFLGVVLGLIFARSRNLLPSMLLHSLWNGFVFMELMR

SEQ ID NO: 1118 - protein, 208 aa, Arabidopsis thaliana
  peptide (1)..(208): Ceres Seq. ID no. 12324812
  misc_feature (116)..(206): Pfam Name: Pfam Description:  CAAX amino terminal protease family
  misc_feature (1)..(208): NCBI GI NO: 18424393 NR Description: putative protein; protein id: At5g60750
  misc_feature (1)..(208): NCBI GI NO: 9759339 NR Description: gene_id:MUP24
  misc_feature (1)..(206): NCBI GI NO: 23130090 NR Description: hypothetical protein [Nostoc punctiforme]
  misc_feature (1)..(206): NCBI GI NO: 17231277 NR Description: hypothetical protein [Nostoc sp. PCC 7120]
  misc_feature (1)..(206): NCBI GI NO: 16331018 NR Description: unknown protein [Synechocystis sp. PCC 6803]
  misc_feature (105)..(206): NCBI GI NO: 23043203 NR Description: hypothetical protein
  misc_feature (1)..(206): NCBI GI NO: 37522744 NR Description: hypothetical protein gll3175
  misc_feature (1)..(206): NCBI GI NO: 21593106 NR Description: unknown [Arabidopsis thaliana]
  misc_feature (1)..(206): NCBI GI NO: 30683693 NR Description: CAAX amino terminal protease family
  misc_feature (1)..(207): NCBI GI NO: 22299433 NR Description: ORF_ID:tlr1890~hypothetical protein
MIPFMAHISGFHKESLTFRGQALFSLITDVTEGLAGIAILHRCLSMFRPLASDWFRFTLKGNWQLDVIIGCFMFPFVNRLSQLNLNLLPLPPTSSPVSLSSVEQSIMARDPVAMALYAVVVSICAPVWEEIVFRGFLLPSLTRYMPVWCAILVSSIAFALAHFNVQRMLPLVFLGVVLGLIFARSRNLLPSMLLHSLWNGFVFMELMR

SEQ ID NO: 1119 - DNA, 795 bp, Arabidopsis thaliana
  misc_feature (1)..(795): Ceres Seq. ID no. 12561477
atgattaatgtctgaaaaatttgatatttgaagcgaatcaacaacaacagtcgggttcgtgaaaaaaaaagatttgatcggctaaacttggtcggtttatcgtggaaggacttgtcaatggcagacgtacctggatacctgcgcacttgtttggatatggggaagatagctttcttagcaatccttgtatctacagggattgtgttgcagattctggcttgtgctctgttcaataactggtggccaatgctaagtgttataatgtatgtgctcctcccaatgcctttgctcttctttggtggatcagacagtacatctctattcaacgagtcagataatagttggatcaatgcagccaagttcttgactggtgcatcagcagttggaagcgtcgcgataccatcgattctaaaacacgccggactcatcggttggggcgcattagcccttgatctctcatcctacgttgtcttcctcgtggctattttgggttacatttgcataggagatgccagtgacaactattacagctacatttaaaaagacacacacaaattcatcatcatttgtttaaacctcaacaaagtctcagccttttatcacttccccgttcgattgatgcttcgaaacgaaaacatcttgtttctatggaatgactcactgattggattttcacaagtttaagagtttgtgtgtcaagtgtatgtatgaatgattttttttttgggtggttttgttacgttttgatgtatagaacatatttattatttggtggaatatatataaattttcttt

SEQ ID NO: 1120 - protein, 140 aa, Arabidopsis thaliana
  peptide (1)..(140): Ceres Seq. ID no. 12561478
  misc_feature (1)..(140): NCBI GI NO: 18398420 NR Description: Expressed protein; protein id: At1g32410
  misc_feature (1)..(140): NCBI GI NO: 21554354 NR Description: unknown [Arabidopsis thaliana]
  misc_feature (1)..(139): NCBI GI NO: 25518386 NR Description: hypothetical protein F5D14
  misc_feature (17)..(124): NCBI GI NO: 12322900 NR Description: unknown protein; 72859-71336
  misc_feature (17)..(124): NCBI GI NO: 16648828 NR Description: AT3g11530/F24K9_21 [Arabidopsis thaliana]
  misc_feature (23)..(124): NCBI GI NO: 18399269 NR Description: expressed protein; protein id: At3g11530
  misc_feature (55)..(124): NCBI GI NO: 34905898 NR Description: P0458E05.25
  misc_feature (16)..(105): NCBI GI NO: 6322504 NR Description: Vacuolar Protein Sorting; Vps55p
  misc_feature (13)..(124): NCBI GI NO: 19113819 NR Description: Protein with similarity to Drosophila yakuba NADHdehydrogenase chain 5
  misc_feature (27)..(136): NCBI GI NO: 13386094 NR Description: RIKEN cDNA 1520402O14 [Mus musculus]
MADVPGYLRTCLDMGKIAFLAILVSTGIVLQILACALFNNWWPMLSVIMYVLLPMPLLFFGGSDSTSLFNESDNSWINAAKFLTGASAVGSVAIPSILKHAGLIGWGALALDLSSYVVFLVAILGYICIGDASDNYYSYI

SEQ ID NO: 1121 - protein, 127 aa, Arabidopsis thaliana
  peptide (1)..(127): Ceres Seq. ID no. 12561479
  misc_feature (1)..(127): NCBI GI NO: 18398420 NR Description: Expressed protein; protein id: At1g32410
  misc_feature (1)..(127): NCBI GI NO: 21554354 NR Description: unknown [Arabidopsis thaliana]
  misc_feature (1)..(126): NCBI GI NO: 25518386 NR Description: hypothetical protein F5D14
  misc_feature (4)..(111): NCBI GI NO: 12322900 NR Description: unknown protein; 72859-71336
  misc_feature (4)..(111): NCBI GI NO: 16648828 NR Description: AT3g11530/F24K9_21 [Arabidopsis thaliana]
  misc_feature (10)..(111): NCBI GI NO: 18399269 NR Description: expressed protein; protein id: At3g11530
  misc_feature (42)..(111): NCBI GI NO: 34905898 NR Description: P0458E05.25
  misc_feature (3)..(92): NCBI GI NO: 6322504 NR Description: Vacuolar Protein Sorting; Vps55p
  misc_feature (1)..(111): NCBI GI NO: 19113819 NR Description: Protein with similarity to Drosophila yakuba NADHdehydrogenase chain 5
  misc_feature (14)..(123): NCBI GI NO: 13386094 NR Description: RIKEN cDNA 1520402O14 [Mus musculus]
MGKIAFLAILVSTGIVLQILACALFNNWWPMLSVIMYVLLPMPLLFFGGSDSTSLFNESDNSWINAAKFLTGASAVGSVAIPSILKHAGLIGWGALALDLSSYVVFLVAILGYICIGDASDNYYSYI

SEQ ID NO: 1122 - protein, 97 aa, Arabidopsis thaliana
  peptide (1)..(97): Ceres Seq. ID no. 12561480
  misc_feature (1)..(97): NCBI GI NO: 18398420 NR Description: Expressed protein; protein id: At1g32410
  misc_feature (1)..(97): NCBI GI NO: 21554354 NR Description: unknown [Arabidopsis thaliana]
  misc_feature (1)..(96): NCBI GI NO: 25518386 NR Description: hypothetical protein F5D14
  misc_feature (1)..(81): NCBI GI NO: 12322900 NR Description: unknown protein; 72859-71336
  misc_feature (1)..(81): NCBI GI NO: 16648828 NR Description: AT3g11530/F24K9_21 [Arabidopsis thaliana]
  misc_feature (1)..(81): NCBI GI NO: 18399269 NR Description: expressed protein; protein id: At3g11530
  misc_feature (12)..(81): NCBI GI NO: 34905898 NR Description: P0458E05.25
  misc_feature (1)..(62): NCBI GI NO: 6322504 NR Description: Vacuolar Protein Sorting; Vps55p
  misc_feature (1)..(81): NCBI GI NO: 19113819 NR Description: Protein with similarity to Drosophila yakuba NADHdehydrogenase chain 5
  misc_feature (1)..(93): NCBI GI NO: 13386094 NR Description: RIKEN cDNA 1520402O14 [Mus musculus]
MLSVIMYVLLPMPLLFFGGSDSTSLFNESDNSWINAAKFLTGASAVGSVAIPSILKHAGLIGWGALALDLSSYVVFLVAILGYICIGDASDNYYSYI

SEQ ID NO: 1123 - DNA, 753 bp, Arabidopsis thaliana
  misc_feature (1)..(753): Ceres Seq. ID no. 13621980
aagtctacaaaccaaaagcacgctacagaagaagaggaagaagaagaagaagcagagacaacaagaagaagaagaaacagtctcatctcgccggagaagaagaaagatgtcgtggcaatcatacgtcgatgaccatctcatgtgcgaggtcgaaggcaaccacctcacacacgccgccatcttcggccaagacggcagtgtctgggctcagagctcagctttccctcagttgaagcctgcagagatagcaggaatcaacaaagactttgaagaagccggacatcttgccccaaccgggctattccttggcggtgagaagtacatggttgtccaaggtgaggctggagccgtcatccgagggaaaaagggacctggtggagtcactatcaagaagactactcaagctctagtctttggtatctatgatgaaccgatgaccggagggcaatgcaacttggtcgtggagaggctcggcgattaccttatcgagtctggtctctaagttcactcaaagtgcttcaaacaaatttcatttttcgggttctttcttcactagagaagcacccttctgccatgtattgtgatttgattgttgttgtgcatcaaacaaagttattatactcttaaaaagaacaaagaaacaatcatatttgttatggttttgatcctctcctatgatggctcttatgtttttctcttgtactgtatttcgtaatgtataattacgctttggaataaaaatttgagtttgtg

SEQ ID NO: 1124 - protein, 166 aa, Arabidopsis thaliana
  peptide (1)..(166): Ceres Seq. ID no. 13621981
  misc_feature (37)..(161): Pfam Name: Pfam Description:  Profilin
  misc_feature (36)..(166): NCBI GI NO: 15233538 NR Description: profilin 2 [Arabidopsis thaliana]
  misc_feature (36)..(166): NCBI GI NO: 21554627 NR Description: profilin 2 [Arabidopsis thaliana]
  misc_feature (36)..(166): NCBI GI NO: 9965571 NR Description: profilin [Arabidopsis thaliana]
  misc_feature (36)..(166): NCBI GI NO: 15224838 NR Description: profilin 1 [Arabidopsis thaliana]
  misc_feature (37)..(166): NCBI GI NO: 2781152 NR Description: Profilin I From Arabidopsis Thaliana
  misc_feature (36)..(166): NCBI GI NO: 1346802 NR Description: PROFILIN 1
  misc_feature (36)..(166): NCBI GI NO: 12230421 NR Description: Profilin 1
  misc_feature (36)..(166): NCBI GI NO: 15809696 NR Description: profilin [Litchi chinensis]
  misc_feature (36)..(166): NCBI GI NO: 34922934 NR Description: Profilin (Allergen Pru p 4.02)
  misc_feature (36)..(166): NCBI GI NO: 16555785 NR Description: profilin [Capsicum annuum]
SLQTKSTLQKKRKKKKKQRQQEEEETVSSRRRRRKMSWQSYVDDHLMCEVEGNHLTHAAIFGQDGSVWAQSSAFPQLKPAEIAGINKDFEEAGHLAPTGLFLGGEKYMVVQGEAGAVIRGKKGPGGVTIKKTTQALVFGIYDEPMTGGQCNLVVERLGDYLIESGL

SEQ ID NO: 1125 - protein, 131 aa, Arabidopsis thaliana
  peptide (1)..(131): Ceres Seq. ID no. 13621982
  misc_feature (2)..(126): Pfam Name: Pfam Description:  Profilin
  misc_feature (1)..(131): NCBI GI NO: 15233538 NR Description: profilin 2 [Arabidopsis thaliana]
  misc_feature (1)..(131): NCBI GI NO: 21554627 NR Description: profilin 2 [Arabidopsis thaliana]
  misc_feature (1)..(131): NCBI GI NO: 9965571 NR Description: profilin [Arabidopsis thaliana]
  misc_feature (1)..(131): NCBI GI NO: 15224838 NR Description: profilin 1 [Arabidopsis thaliana]
  misc_feature (2)..(131): NCBI GI NO: 2781152 NR Description: Profilin I From Arabidopsis Thaliana
  misc_feature (1)..(131): NCBI GI NO: 1346802 NR Description: PROFILIN 1
  misc_feature (1)..(131): NCBI GI NO: 12230421 NR Description: Profilin 1
  misc_feature (1)..(131): NCBI GI NO: 15809696 NR Description: profilin [Litchi chinensis]
  misc_feature (1)..(131): NCBI GI NO: 34922934 NR Description: Profilin (Allergen Pru p 4.02)
  misc_feature (1)..(131): NCBI GI NO: 16555785 NR Description: profilin [Capsicum annuum]
MSWQSYVDDHLMCEVEGNHLTHAAIFGQDGSVWAQSSAFPQLKPAEIAGINKDFEEAGHLAPTGLFLGGEKYMVVQGEAGAVIRGKKGPGGVTIKKTTQALVFGIYDEPMTGGQCNLVVERLGDYLIESGL

SEQ ID NO: 1126 - protein, 120 aa, Arabidopsis thaliana
  peptide (1)..(120): Ceres Seq. ID no. 13621983
  misc_feature (1)..(115): Pfam Name: Pfam Description:  Profilin
  misc_feature (1)..(120): NCBI GI NO: 15233538 NR Description: profilin 2 [Arabidopsis thaliana]
  misc_feature (1)..(120): NCBI GI NO: 21554627 NR Description: profilin 2 [Arabidopsis thaliana]
  misc_feature (1)..(120): NCBI GI NO: 9965571 NR Description: profilin [Arabidopsis thaliana]
  misc_feature (1)..(120): NCBI GI NO: 15224838 NR Description: profilin 1 [Arabidopsis thaliana]
  misc_feature (1)..(120): NCBI GI NO: 2781152 NR Description: Profilin I From Arabidopsis Thaliana
  misc_feature (1)..(120): NCBI GI NO: 1346802 NR Description: PROFILIN 1
  misc_feature (1)..(120): NCBI GI NO: 12230421 NR Description: Profilin 1
  misc_feature (1)..(120): NCBI GI NO: 15809696 NR Description: profilin [Litchi chinensis]
  misc_feature (1)..(120): NCBI GI NO: 34922934 NR Description: Profilin (Allergen Pru p 4.02)
  misc_feature (1)..(120): NCBI GI NO: 16555785 NR Description: profilin [Capsicum annuum]
MCEVEGNHLTHAAIFGQDGSVWAQSSAFPQLKPAEIAGINKDFEEAGHLAPTGLFLGGEKYMVVQGEAGAVIRGKKGPGGVTIKKTTQALVFGIYDEPMTGGQCNLVVERLGDYLIESGL

SEQ ID NO: 1127 - DNA, 860 bp, Arabidopsis thaliana
  misc_feature (1)..(860): Ceres Seq. ID no. 12393628
gcacagtatgtgttttgacttcttcgcgtcggcgatattatccagaaacagtagtgtcgaagaagaagaagaagaagaaggagagattctgagtttagggttttgtttgtgttgcttcgaattgagcagctatggcttccgtgttgctacttcttctggtgttcgtgtttgatctcattgcttttggtcttgctgttgctgcagagcaacgaagaaccacctggcaaatttctagagaatcaagagatttgagctactgtgtgtatgacaaggacatagcaacgggtctcggagtcggttctttcttggtcttattagcgagtcagctcttaataatggtggcgagccgatgtttatgctgtggaagagcattgacaccaagtggttcaagatcttgggcaatttttctcttcatcaccacctgggttttcttcttcatagcacaagtgtgtttacttgctggctctgtacgaaacgcttaccatacaaagtaccgtgtctactttggtaacacttccccttcttgtcgatcactgaggaaaggcgtgtttggggctggagcagcattcatagtgctcacggggattgtctccgagctttactatgtgaccctttcgagggccaaagactttcaaccttcaagagatcccggtatccgaatgagtagcctgtagaacttacacctgctttgtagatttagaatagttatgttcattgttgttatcatcttactatcttaggtcattgttgttatgattttaatagtatggaggaaactaacattattttcaatttcttaaaatatatgtacctatcaaaaacgatagattgaaaacaataaagaaccataaagttgatat

SEQ ID NO: 1128 - protein, 180 aa, Arabidopsis thaliana
  peptide (1)..(180): Ceres Seq. ID no. 12393629
  misc_feature (1)..(180): NCBI GI NO: 18407003 NR Description: Expressed protein; protein id: At1g61065
  misc_feature (1)..(180): NCBI GI NO: 21554630 NR Description: unknown [Arabidopsis thaliana]
  misc_feature (1)..(179): NCBI GI NO: 38016521 NR Description: fiber protein Fb34 [Gossypium barbadense]
  misc_feature (1)..(158): NCBI GI NO: 18416991 NR Description: Expressed protein; protein id: At4g27435
  misc_feature (1)..(170): NCBI GI NO: 18400781 NR Description: expressed protein; protein id: At3g15480
  misc_feature (1)..(166): NCBI GI NO: 34394069 NR Description: unknown protein
  misc_feature (1)..(166): NCBI GI NO: 18404242 NR Description: expressed protein; protein id: At1g52910
  misc_feature (1)..(165): NCBI GI NO: 38344206 NR Description: OSJNBa0064G10.22
  misc_feature (3)..(178): NCBI GI NO: 22748411 NR Description: hypothetical protein
  misc_feature (2)..(179): NCBI GI NO: 18391509 NR Description: expressed protein; protein id: At1g13380
MASVLLLLLVFVFDLIAFGLAVAAEQRRTTWQISRESRDLSYCVYDKDIATGLGVGSFLVLLASQLLIMVASRCLCCGRALTPSGSRSWAIFLFITTWVFFFIAQVCLLAGSVRNAYHTKYRVYFGNTSPSCRSLRKGVFGAGAAFIVLTGIVSELYYVTLSRAKDFQPSRDPGIRMSSL

SEQ ID NO: 1129 - protein, 112 aa, Arabidopsis thaliana
  peptide (1)..(112): Ceres Seq. ID no. 12393630
  misc_feature (1)..(112): NCBI GI NO: 18407003 NR Description: Expressed protein; protein id: At1g61065
  misc_feature (1)..(112): NCBI GI NO: 21554630 NR Description: unknown [Arabidopsis thaliana]
  misc_feature (1)..(111): NCBI GI NO: 38016521 NR Description: fiber protein Fb34 [Gossypium barbadense]
  misc_feature (1)..(90): NCBI GI NO: 18416991 NR Description: Expressed protein; protein id: At4g27435
  misc_feature (1)..(102): NCBI GI NO: 18400781 NR Description: expressed protein; protein id: At3g15480
  misc_feature (1)..(98): NCBI GI NO: 34394069 NR Description: unknown protein
  misc_feature (1)..(98): NCBI GI NO: 18404242 NR Description: expressed protein; protein id: At1g52910
  misc_feature (1)..(97): NCBI GI NO: 38344206 NR Description: OSJNBa0064G10.22
  misc_feature (1)..(110): NCBI GI NO: 22748411 NR Description: hypothetical protein
  misc_feature (1)..(111): NCBI GI NO: 18391509 NR Description: expressed protein; protein id: At1g13380
MVASRCLCCGRALTPSGSRSWAIFLFITTWVFFFIAQVCLLAGSVRNAYHTKYRVYFGNTSPSCRSLRKGVFGAGAAFIVLTGIVSELYYVTLSRAKDFQPSRDPGIRMSSL

SEQ ID NO: 1130 - DNA, 1894 bp, Arabidopsis thaliana
  misc_feature (1)..(1894): Ceres Seq. ID no. 12338010
aacaaattcctacaccaatatctttagctagagagaaaaaaagagtgaggaaactagagagagagaccacccaataatggtgaggttcgagaaggttcatttagtgttagggttagctctggttctaactctggtcggagctccgaccaaagcccaaggacctgtttgcggtgcaggcctgcctgacaaatttagcagattaaacttccctgaaggcttcatttggggaaccgcaacagcagcatttcaggttgaaggagctgttaatgaaggttgcagaggtccaagcatgtgggatactttcactaagaagttcccacatagatgtgaaaatcataacgctgatgttgctgtggatttctatcatcgttacaaggaagatatccagttgatgaaagaccttaacactgatgcttttagactttctattgcgtggcccagaatattcccccatggaaggatgtctaagggaataagcaaagtgggagtccaattctaccacgacctcatcgatgagcttctcaaaaacaatataataccattagttacagtctttcattgggatactccccaagacttggaagatgaatatggtggtttcttaagtggtcgcatcgtgcaagattttaccgaatatgcgaatttcactttccacgaatatggacacaaagtgaaacattggatcacatttaacgagccatgggtgtttagtcgtgccggttacgacaacggaaagaaagctccgggacgttgttcgccgtacatccccggttatggacagcattgtcaggatgggcggtctggatacgaagcttatcaagtcagtcacaacttactcttgtcgcatgcttacgctgttgacgcattcagaaactgcaaacagtgtgctggaggtaaaattggaattgcacacagtccagcttggttcgaaccacaagaccttgagcatgttggaggttccattgaacgtgtgcttgatttcatcctaggatggcatttggctccaacaacttatggagattatccacaatcgatgaaggatcgtgtcggtcatagattgccaaaattcacagaagctgagaagaagttgctaaagggttctacagattacgtaggaatgaattactatacttcagtgtttgcaaaagaaattagccctgatcctaagagtccgagttggacgactgattctcttgttgattgggatagcaagagtgtggatggatacaaaattggtagcaagccgtttaatggtaaactggatgtgtattcaaaaggtttgagataccttttgaagtatattaaggataactatggcgacccagaagttatcattgccgagaatggatacggagaagaccttggagagaagcacaatgacgtaaactttgggacacaagatcacaacagaaaatattatatccaaaggcatctcttgagtatgcacgacgccatttgcaaggacaaagtgaacgttacgggatactttgtgtggtctttgatggacaactttgagtggcaagatgggtacaaggcgaggttcggactttactacatcgatttccagaacaacttgacccgtcaccaaaaagtttcgggcaaatggtattccgaattcctcaaaccacagtttccaacctccaagctgagggaagaactctagatgatcaagaatcctatcgggacaaaataattgagtacaagagtcttgaagatgttgttgaggataatatcagtttgtgtgttctatggatcgttttcatctaccggtccttcctatgttagaaggacttgtgagttgttcgagttttaataatatcaataaatgtcttcttttttaatatatgttgagttaataattaaatctgcttatcgaaaagaacagataaaatag

SEQ ID NO: 1131 - protein, 528 aa, Arabidopsis thaliana [sequence omitted]

SEQ ID NO: 1132 - protein, 457 aa, Arabidopsis thaliana
  peptide (1)..(457): Ceres Seq. ID no. 12338012
  misc_feature (1)..(457): NCBI GI NO: 15218992 NR Description: glycosyl hydrolase family 1, beta-glucosidase
  misc_feature (1)..(457): NCBI GI NO: 12229686 NR Description: Beta-glucosidase homolog precursor
  misc_feature (1)..(457): NCBI GI NO: 23397037 NR Description: putative beta-glucosidase [Arabidopsis thaliana]
  misc_feature (1)..(457): NCBI GI NO: 12043529 NR Description: beta-glucosidase 1 [Arabidopsis thaliana]
  misc_feature (1)..(457): NCBI GI NO: 22331243 NR Description: glycosyl hydrolase family 1; protein id: At3g21370
  misc_feature (1)..(457): NCBI GI NO: 16604493 NR Description: AT3g21370/MHC9_5 [Arabidopsis thaliana]
  misc_feature (1)..(444): NCBI GI NO: 25404995 NR Description: protein T4O12.15 [imported] - Arabidopsis thaliana
  misc_feature (1)..(444): NCBI GI NO: 15222905 NR Description: glycosyl hydrolase family 1, beta-glucosidase
  misc_feature (1)..(436): NCBI GI NO: 1076442 NR Description: beta-glucosidase (EC 3.2.1.21) - rape
  misc_feature (1)..(444): NCBI GI NO: 25289457 NR Description: probable beta-glucosidase (EC 3.2.1.21) ATA27
MWDTFTKKFPHRCENHNADVAVDFYHRYKEDIQLMKDLNTDAFRLSIAWPRIFPHGRMSKGISKVGVQFYHDLIDELLKNNIIPLVTVFHWDTPQDLEDEYGGFLSGRIVQDFTEYANFTFHEYGHKVKHWITFNEPWVFSRAGYDNGKKAPGRCSPYIPGYGQHCQDGRSGYEAYQVSHNLLLSHAYAVDAFRNCKQCAGGKIGIAHSPAWFEPQDLEHVGGSIERVLDFILGWHLAPTTYGDYPQSMKDRVGHRLPKFTEAEKKLLKGSTDYVGMNYYTSVFAKEISPDPKSPSWTTDSLVDWDSKSVDGYKIGSKPFNGKLDVYSKGLRYLLKYIKDNYGDPEVIIAENGYGEDLGEKHNDVNFGTQDHNRKYYIQRHLLSMHDAICKDKVNVTGYFVWSLMDNFEWQDGYKARFGLYYIDFQNNLTRHQKVSGKWYSEFLKPQFPTSKLREEL

SEQ ID NO: 1133 - protein, 423 aa, Arabidopsis thaliana
  peptide (1)..(423): Ceres Seq. ID no. 12338013
  misc_feature (1)..(423): NCBI GI NO: 15218992 NR Description: glycosyl hydrolase family 1, beta-glucosidase
  misc_feature (1)..(423): NCBI GI NO: 12229686 NR Description: Beta-glucosidase homolog precursor
  misc_feature (1)..(423): NCBI GI NO: 23397037 NR Description: putative beta-glucosidase [Arabidopsis thaliana]
  misc_feature (1)..(423): NCBI GI NO: 12043529 NR Description: beta-glucosidase 1 [Arabidopsis thaliana]
  misc_feature (1)..(423): NCBI GI NO: 22331243 NR Description: glycosyl hydrolase family 1; protein id: At3g21370
  misc_feature (1)..(423): NCBI GI NO: 16604493 NR Description: AT3g21370/MHC9_5 [Arabidopsis thaliana]
  misc_feature (1)..(410): NCBI GI NO: 25404995 NR Description: protein T4O12.15 [imported] - Arabidopsis thaliana
  misc_feature (1)..(410): NCBI GI NO: 15222905 NR Description: glycosyl hydrolase family 1, beta-glucosidase
  misc_feature (1)..(402): NCBI GI NO: 1076442 NR Description: beta-glucosidase (EC 3.2.1.21) - rape
  misc_feature (1)..(410): NCBI GI NO: 25289457 NR Description: probable beta-glucosidase (EC 3.2.1.21) ATA27
MKDLNTDAFRLSIAWPRIFPHGRMSKGISKVGVQFYHDLIDELLKNNIIPLVTVFHWDTPQDLEDEYGGFLSGRIVQDFTEYANFTFHEYGHKVKHWITFNEPWVFSRAGYDNGKKAPGRCSPYIPGYGQHCQDGRSGYEAYQVSHNLLLSHAYAVDAFRNCKQCAGGKIGIAHSPAWFEPQDLEHVGGSIERVLDFILGWHLAPTTYGDYPQSMKDRVGHRLPKFTEAEKKLLKGSTDYVGMNYYTSVFAKEISPDPKSPSWTTDSLVDWDSKSVDGYKIGSKPFNGKLDVYSKGLRYLLKYIKDNYGDPEVIIAENGYGEDLGEKHNDVNFGTQDHNRKYYIQRHLLSMHDAICKDKVNVTGYFVWSLMDNFEWQDGYKARFGLYYIDFQNNLTRHQKVSGKWYSEFLKPQFPTSKLREEL

SEQ ID NO: 1134 - DNA, 1227 bp, Arabidopsis thaliana
  misc_feature (1)..(1227): Ceres Seq. ID no. 12334796
acactttggatagctgccgccgaagttttgtgcaatggcgacgaaaccgacgtttcagctgttttcttcttctcaaggttctggtctaggtttagggttccttgattcatcagagccagctcttcctccacctcctcctcctgttgaagtattatccttcgaggtgtcttcctccactgatttcgaagtggataaattgactatcggcgagatcactcttttgaagggtcgtgtgagcactaaagaggtttttggattgcctaattcagatttggttcctggagtctatgaaggcgggcttaagctttgggaaggatcgattgatcttgttaaagctcttgagaaagaatcacaaaccggaaacttatcattttccggaaagcgggttctcgagcttggatgtggtcatgcacttccaggaatctatgcgtgtctcaagggttcagatgctgttcatttccaggacttcaatgctgaggttcttcgatgtctcaccattccgaatctgaatgctaatctgtctgagaagtcttcctctgtctcagtaagtgaaacagaagtacgcttctttgctggtgagtggagtgaagttcatcaggttcttccactagttaatagtgatggtgagactaataagaagggtggttatgacatcattctaatggctgagacgatatattccatctccgctcagaaaagtcaatatgaattgattaaaaggtgtctggcgtatcctgatggagcagtgtatatggctgcaaagaagtactatttcggggtcggtggagggacaaggcaattcttgtctatgatagagaaagacggtgctcttgcttcaacgttggtgtctcaagtcacagatggttcctcaaatgtcagagaggtatggaagctttcgtacaagtaagtcgaagctatactggaattcagtgtccaacgatctgattttagtggatttgggttgctcataaaaatgagtggaaattcaaaatctctcatccatgtgtttagcttatagactctcctgactgtgttataataattgcttagtttttcattttggtacattttctggcttaacgaaaggcttatgtgatctgccgttgattctcaccggaccaaagttccaaactaagctttagttggagtcgcagtttatatattgtaaatctctcacatgattagttatgcttttgagaataaatccaccagctcgacctgtcttgc

SEQ ID NO: 1135 - protein, 290 aa, Arabidopsis thaliana
  peptide (1)..(290): Ceres Seq. ID no. 12334797
  misc_feature (1)..(290): NCBI GI NO: 18414120 NR Description: expressed protein; protein id: At4g14000
  misc_feature (1)..(290): NCBI GI NO: 21554662 NR Description: unknown [Arabidopsis thaliana]
  misc_feature (1)..(148): NCBI GI NO: 7485012 NR Description: hypothetical protein - Arabidopsis thaliana
  misc_feature (161)..(271): NCBI GI NO: 7485012 NR Description: hypothetical protein - Arabidopsis thaliana
  misc_feature (26)..(196): NCBI GI NO: 18406207 NR Description: expressed protein; protein id: At2g43320
  misc_feature (198)..(290): NCBI GI NO: 18406207 NR Description: expressed protein; protein id: At2g43320
  misc_feature (26)..(196): NCBI GI NO: 16226903 NR Description: At2g43320/T1O24.6 [Arabidopsis thaliana]
  misc_feature (198)..(290): NCBI GI NO: 16226903 NR Description: At2g43320/T1O24.6 [Arabidopsis thaliana]
  misc_feature (26)..(194): NCBI GI NO: 38346224 NR Description: OJ990528_30.4
  misc_feature (198)..(290): NCBI GI NO: 38346224 NR Description: OJ990528_30.4
MATKPTFQLFSSSQGSGLGLGFLDSSEPALPPPPPPVEVLSFEVSSSTDFEVDKLTIGEITLLKGRVSTKEVFGLPNSDLVPGVYEGGLKLWEGSIDLVKALEKESQTGNLSFSGKRVLELGCGHALPGIYACLKGSDAVHFQDFNAEVLRCLTIPNLNANLSEKSSSVSVSETEVRFFAGEWSEVHQVLPLVNSDGETNKKGGYDIILMAETIYSISAQKSQYELIKRCLAYPDGAVYMAAKKYYFGVGGGTRQFLSMIEKDGALASTLVSQVTDGSSNVREVWKLSYK

SEQ ID NO: 1136 - DNA, 1289 bp, Arabidopsis thaliana
  misc_feature (1)..(1289): Ceres Seq. ID no. 12321766
gagagttctggtttctgcatctctctccttcttcgtttagactttagccattgaaggtcgcttcgattcgaaatcatggcggccgtaccgagaggcctcctttctcgaatcaatcagtttctatcaatacggtctataactccttcatcctctgaatctcttcctcattgtagtagcttctttctcctccgacgattcagctccgatactgggttgatggacggtggtggatctgatattatcggggctcagacccgaatcattgaggcgaaacaaggtgagatgtctagtagatccaagaggactgggatcatcgccgttaagtgtgggatgactgcgctctgggacaaatggggaaagaggattccgatttctattctttgggttgatgataatatcgtctctcaggttaaaactgttgagaaagaaggcatttttgcgttacagatcggatgtgggcaaaagaaaccgaagcatttgtcaaaagctgtggtggggcatttcagagcacaaggtgtgccgttaaagaggaagttgagggaatttcctgtgactgaagacgctcttcttcctgttggtacttcactcggtgtccgccattttgttccgggacagtacgttgatgtcactgggatcactcgaggaaaaggttttcagggatgcatgaaaagacatggtttcagtggaatgccggcatcacatggtgcttcattgtcccatcgaagcgggggttccacagggcaaagagatgctcctggaaaggtgttcaagggcagaaagatggctgggagaatgggtgcagatcagaggacagtaaagaacgtttgggtctacaagatcgatcctgcgaggaacctcatgtgggtgagaggacaagttcctggtgcagaaggaaactttgtgttcataaaagatgcatggtgcaagaaaccagacatctcaaagcttccgtttccaacttacttagctccagaagatgaagatccatcagaattagaaccgttggttgcagatcttggagaagttgacccatttatgttggcagagtgatgaaaacagcatgatcttgatctttatttgggcttttacaatgattagagaccagaaagaagctgtggaagtgaaggaatcacagagctaaagctttttgcagatgaatttgtctttttcttattttagttgtttggatgtatgatttgaaaacgattaaatagaggaatttaggcttgctcgcatttgttatatcacaatgcttaagagtttgcaataagcaatgaggaaaacacaag

SEQ ID NO: 1137 - protein, 324 aa, Arabidopsis thaliana
  peptide (1)..(324): Ceres Seq. ID no. 12321767
  misc_feature (83)..(279): Pfam Name: Pfam Description:  Ribosomal protein L3
  misc_feature (1)..(324): NCBI GI NO: 18401521 NR Description: ribosomal protein L3; protein id: At3g17465.1
  misc_feature (1)..(324): NCBI GI NO: 34902796 NR Description: unnamed protein product
  misc_feature (191)..(324): NCBI GI NO: 21450877 NR Description: putative ribosomal protein L3
  misc_feature (76)..(297): NCBI GI NO: 23108389 NR Description: hypothetical protein
  misc_feature (66)..(294): NCBI GI NO: 16125497 NR Description: ribosomal protein L3 [Caulobacter crescentus CB15]
  misc_feature (76)..(294): NCBI GI NO: 23014088 NR Description: hypothetical protein
  misc_feature (76)..(286): NCBI GI NO: 22956505 NR Description: hypothetical protein [Rhodobacter sphaeroides]
  misc_feature (76)..(281): NCBI GI NO: 17987040 NR Description: LSU ribosomal protein L3P [Brucella melitensis]
  misc_feature (76)..(281): NCBI GI NO: 23502110 NR Description: ribosomal protein L3 [Brucella suis 1330]
  misc_feature (76)..(305): NCBI GI NO: 13470551 NR Description: 50S ribosomal protein L3 [Mesorhizobium loti]
MAAVPRGLLSRINQFLSIRSITPSSSESLPHCSSFFLLRRFSSDTGLMDGGGSDIIGAQTRIIEAKQGEMSSRSKRTGIIAVKCGMTALWDKWGKRIPISILWVDDNIVSQVKTVEKEGIFALQIGCGQKKPKHLSKAVVGHFRAQGVPLKRKLREFPVTEDALLPVGTSLGVRHFVPGQYVDVTGITRGKGFQGCMKRHGFSGMPASHGASLSHRSGGSTGQRDAPGKVFKGRKMAGRMGADQRTVKNVWVYKIDPARNLMWVRGQVPGAEGNFVFIKDAWCKKPDISKLPFPTYLAPEDEDPSELEPLVADLGEVDPFMLAE

SEQ ID NO: 1138 - protein, 277 aa, Arabidopsis thaliana
  peptide (1)..(277): Ceres Seq. ID no. 12321768
  misc_feature (36)..(232): Pfam Name: Pfam Description:  Ribosomal protein L3
  misc_feature (1)..(277): NCBI GI NO: 18401521 NR Description: ribosomal protein L3; protein id: At3g17465.1
  misc_feature (1)..(277): NCBI GI NO: 34902796 NR Description: unnamed protein product
  misc_feature (144)..(277): NCBI GI NO: 21450877 NR Description: putative ribosomal protein L3
  misc_feature (29)..(250): NCBI GI NO: 23108389 NR Description: hypothetical protein
  misc_feature (19)..(247): NCBI GI NO: 16125497 NR Description: ribosomal protein L3 [Caulobacter crescentus CB15]
  misc_feature (29)..(247): NCBI GI NO: 23014088 NR Description: hypothetical protein
  misc_feature (29)..(239): NCBI GI NO: 22956505 NR Description: hypothetical protein [Rhodobacter sphaeroides]
  misc_feature (29)..(234): NCBI GI NO: 17987040 NR Description: LSU ribosomal protein L3P [Brucella melitensis]
  misc_feature (29)..(234): NCBI GI NO: 23502110 NR Description: ribosomal protein L3 [Brucella suis 1330]
  misc_feature (29)..(258): NCBI GI NO: 13470551 NR Description: 50S ribosomal protein L3 [Mesorhizobium loti]
MDGGGSDIIGAQTRIIEAKQGEMSSRSKRTGIIAVKCGMTALWDKWGKRIPISILWVDDNIVSQVKTVEKEGIFALQIGCGQKKPKHLSKAVVGHFRAQGVPLKRKLREFPVTEDALLPVGTSLGVRHFVPGQYVDVTGITRGKGFQGCMKRHGFSGMPASHGASLSHRSGGSTGQRDAPGKVFKGRKMAGRMGADQRTVKNVWVYKIDPARNLMWVRGQVPGAEGNFVFIKDAWCKKPDISKLPFPTYLAPEDEDPSELEPLVADLGEVDPFMLAE

SEQ ID NO: 1139 - protein, 255 aa, Arabidopsis thaliana
  peptide (1)..(255): Ceres Seq. ID no. 12321769
  misc_feature (14)..(210): Pfam Name: Pfam Description:  Ribosomal protein L3
  misc_feature (1)..(255): NCBI GI NO: 18401521 NR Description: ribosomal protein L3; protein id: At3g17465.1
  misc_feature (1)..(255): NCBI GI NO: 34902796 NR Description: unnamed protein product
  misc_feature (122)..(255): NCBI GI NO: 21450877 NR Description: putative ribosomal protein L3
  misc_feature (7)..(228): NCBI GI NO: 23108389 NR Description: hypothetical protein
  misc_feature (1)..(225): NCBI GI NO: 16125497 NR Description: ribosomal protein L3 [Caulobacter crescentus CB15]
  misc_feature (7)..(225): NCBI GI NO: 23014088 NR Description: hypothetical protein
  misc_feature (7)..(217): NCBI GI NO: 22956505 NR Description: hypothetical protein [Rhodobacter sphaeroides]
  misc_feature (7)..(212): NCBI GI NO: 17987040 NR Description: LSU ribosomal protein L3P [Brucella melitensis]
  misc_feature (7)..(212): NCBI GI NO: 23502110 NR Description: ribosomal protein L3 [Brucella suis 1330]
  misc_feature (7)..(236): NCBI GI NO: 13470551 NR Description: 50S ribosomal protein L3 [Mesorhizobium loti]
MSSRSKRTGIIAVKCGMTALWDKWGKRIPISILWVDDNIVSQVKTVEKEGIFALQIGCGQKKPKHLSKAVVGHFRAQGVPLKRKLREFPVTEDALLPVGTSLGVRHFVPGQYVDVTGITRGKGFQGCMKRHGFSGMPASHGASLSHRSGGSTGQRDAPGKVFKGRKMAGRMGADQRTVKNVWVYKIDPARNLMWVRGQVPGAEGNFVFIKDAWCKKPDISKLPFPTYLAPEDEDPSELEPLVADLGEVDPFMLAE

SEQ ID NO: 1140 - DNA, 964 bp, Arabidopsis thaliana
  misc_feature (1)..(964): Ceres Seq. ID no. 13647095
atcataactcacactctctcttcaatcctttcctttcattgtagttaaacaaagattacgattatggccacatcagctatccaacaatcctccttcgccggccaaacggctctcaagccctccagcgacctcatccaaaaggtgggcgtcttgggcggtggccgtgtgaccatgcgtcgtaccgtcaagtctactccccaaagcatttggtatggaccagaccgtcccaagtacttgggaccattctcggagaacacaccgtcttacttaactggagaataccccggagactacggttgggacaccgctggactctcggctgacccggagacattcgctaagaaccgtgagcttgaagtaatccacagcagatgggctatgttgggtgctctcggatgcacattccctgagattctctccaagaacggtgttaaattcggagaagccgtgtggttcaaggcaggctctcagattttctcagaaggaggtcttgattacctcggaaaccctaacttgatccacgcgcaaagcatcttaagccatttgggctgttcaagttgtgctcatggggttcattgaaggctacagaatcggaggtggaccactcggagaaggacttgacccgctttaycccggaggtgcgttcgacccattgaacttggctgaggatccagaggctttctctgagctgaaggtgaaggagctcaagaacggtcgtcttgccatgttctctatgtttggattctttgtccaagccattgttactggtaaaggycccattgagaacttrtttgatcatttggctgatcctgtggctaacaacgcctggtyttacgctactaactttgtccccggaaagtaawtatcttttawgtatttgcytmataatctctcygctttgtaaactygtgattgtgtaatattgacgtttgatgygaatttggcacttaatgatgtttcttgg

SEQ ID NO: 1141 - protein, 171 aa, Arabidopsis thaliana
  peptide (1)..(171): Ceres Seq. ID no. 15218720
  misc_feature (64)..(159): Pfam Name: Pfam Description:  Chlorophyll A-B binding protein
  misc_feature (1)..(159): NCBI GI NO: 15224465 NR Description: light-harvesting chlorophyll a/b binding protein
  misc_feature (1)..(159): NCBI GI NO: 25299029 NR Description: chlorophyll a/b-binding protein Lhcb2
  misc_feature (1)..(159): NCBI GI NO: 25299022 NR Description: chlorophyll a/b-binding protein Lhcb2
  misc_feature (1)..(159): NCBI GI NO: 15224471 NR Description: light-harvesting chlorophyll a/b binding protein
  misc_feature (1)..(163): NCBI GI NO: 15232249 NR Description: light harvesting chlorophyll A/B binding protein
  misc_feature (1)..(159): NCBI GI NO: 3560529 NR Description: light harvesting chlorophyll A/B binding protein
  misc_feature (1)..(163): NCBI GI NO: 1345698 NR Description: Chlorophyll A-B binding protein 151
  misc_feature (1)..(159): NCBI GI NO: 16805332 NR Description: chlorophyll a/b binding protein type II
  misc_feature (1)..(163): NCBI GI NO: 99600 NR Description: chlorophyll a/b-binding protein - upland cotton
  misc_feature (1)..(159): NCBI GI NO: 115811 NR Description: Chlorophyll A-B binding protein 37
MATSAIQQSSFAGQTALKPSSDLIQKVGVLGGGRVTMRRTVKSTPQSIWYGPDRPKYLGPFSENTPSYLTGEYPGDYGWDTAGLSADPETFAKNRELEVIHSRWAMLGALGCTFPEILSKNGVKFGEAVWFKAGSQIFSEGGLDYLGNPNLIHAQSILSHLGCSSCAHGVH

SEQ ID NO: 1142 - protein, 135 aa, Arabidopsis thaliana
  peptide (1)..(135): Ceres Seq. ID no. 15218721
  misc_feature (28)..(123): Pfam Name: Pfam Description:  Chlorophyll A-B binding protein
  misc_feature (1)..(123): NCBI GI NO: 15224465 NR Description: light-harvesting chlorophyll a/b binding protein
  misc_feature (1)..(123): NCBI GI NO: 25299029 NR Description: chlorophyll a/b-binding protein Lhcb2
  misc_feature (1)..(123): NCBI GI NO: 25299022 NR Description: chlorophyll a/b-binding protein Lhcb2
  misc_feature (1)..(123): NCBI GI NO: 15224471 NR Description: light-harvesting chlorophyll a/b binding protein
  misc_feature (1)..(127): NCBI GI NO: 15232249 NR Description: light harvesting chlorophyll A/B binding protein
  misc_feature (1)..(123): NCBI GI NO: 3560529 NR Description: light harvesting chlorophyll A/B binding protein
  misc_feature (1)..(127): NCBI GI NO: 1345698 NR Description: Chlorophyll A-B binding protein 151
  misc_feature (1)..(123): NCBI GI NO: 16805332 NR Description: chlorophyll a/b binding protein type II
  misc_feature (1)..(127): NCBI GI NO: 99600 NR Description: chlorophyll a/b-binding protein - upland cotton
  misc_feature (1)..(123): NCBI GI NO: 115811 NR Description: Chlorophyll A-B binding protein 37
MRRTVKSTPQSIWYGPDRPKYLGPFSENTPSYLTGEYPGDYGWDTAGLSADPETFAKNRELEVIHSRWAMLGALGCTFPEILSKNGVKFGEAVWFKAGSQIFSEGGLDYLGNPNLIHAQSILSHLGCSSCAHGVH

SEQ ID NO: 1143 - protein, 98 aa, Arabidopsis thaliana
  peptide (1)..(98): Ceres Seq. ID no. 15218722
  misc_feature (1)..(65): Pfam Name: Pfam Description:  Chlorophyll A-B binding protein
  misc_feature (1)..(98): NCBI GI NO: 15224465 NR Description: light-harvesting chlorophyll a/b binding protein
  misc_feature (1)..(98): NCBI GI NO: 25299029 NR Description: chlorophyll a/b-binding protein Lhcb2
  misc_feature (1)..(98): NCBI GI NO: 25299022 NR Description: chlorophyll a/b-binding protein Lhcb2
  misc_feature (1)..(97): NCBI GI NO: 15224471 NR Description: light-harvesting chlorophyll a/b binding protein
  misc_feature (1)..(98): NCBI GI NO: 15232249 NR Description: light harvesting chlorophyll A/B binding protein
  misc_feature (1)..(98): NCBI GI NO: 3560529 NR Description: light harvesting chlorophyll A/B binding protein
  misc_feature (1)..(98): NCBI GI NO: 1345698 NR Description: Chlorophyll A-B binding protein 151
  misc_feature (1)..(98): NCBI GI NO: 16805332 NR Description: chlorophyll a/b binding protein type II
  misc_feature (1)..(98): NCBI GI NO: 99600 NR Description: chlorophyll a/b-binding protein - upland cotton
  misc_feature (1)..(98): NCBI GI NO: 115811 NR Description: Chlorophyll A-B binding protein 37
  misc_feature (22)..(22): Xaa is any aa, unknown or other
  misc_feature (70)..(70): Xaa is any aa, unknown or other
  misc_feature (75)..(75): Xaa is any aa, unknown or other
  misc_feature (89)..(89): Xaa is any aa, unknown or other
MGFIEGYRIGGGPLGEGLDPLXPGGAFDPLNLAEDPEAFSELKVKELKNGRLAMFSMFGFFVQAIVTGKXPIENXFDHLADPVANNAWXYATNFVPGK

SEQ ID NO: 1144 - DNA, 939 bp, Arabidopsis thaliana
  misc_feature (1)..(939): Ceres Seq. ID no. 12333678
aaaaagtacgaaaggaaaatatgagtgaggagaagaggaagcaacacttcgtgctagtacatggtgcgtgccacggcgcatggtgctggtacaaggttaagcctcttctcgaggctttgggccatcgtgtaaccgccttagacctagctgcttccggtatagacacaaccaggtcaatcactgacatttctacatgtgaacaatattctgagccattgatgcagctaatgacttcattgccgaatgatgagaaggttgtactcgttggtcatagctttggaggtttgagtttagccttagccatggataagtttcccgataaaatctctgtctctgtcttcgtgactgcattcatgcccgacaccaaacactcaccatcgttcgtcgaggaaaagtttgcaagcagcatgacaccagaaggatggatgggctctgagctcgagacatatggttcagataattccggcttgtctgtgttcttcagcaccgacttcatgaagcaccgtctctaccaactttctcctgtggaggatcttgagcttggattgcttctaaagaggcctagttcattgtttattaatgaattatcgaagatggagaacttttctgagaaagggtatggatctgttcctcgagcttacattgtgtgcaaagaggacaacattatctcggaagaccatcaacgatggatgatccataattatccggcgaatttagtgattgagatggaagagactgatcatatgccaatgttttgcaaacctcaactactaagtgaccatctattggcaatcgctgacaatttctgttaaataatattttgatgaaaatgtatttggagtggatacaatcaaacgtgttctaaaatggatcttcataaaggttcaaacttatttcttagttcttactatggttgaaatgagaaacctaagtcaatcg

SEQ ID NO: 1145 - protein, 269 aa, Arabidopsis thaliana
  peptide (1)..(269): Ceres Seq. ID no. 12333679
  misc_feature (41)..(263): Pfam Name: Pfam Description:  alpha/beta hydrolase fold
  misc_feature (7)..(269): NCBI GI NO: 15227863 NR Description: putative acetone-cyanohydrin lyase
  misc_feature (7)..(268): NCBI GI NO: 21554666 NR Description: putative acetone-cyanohydrin lyase
  misc_feature (7)..(268): NCBI GI NO: 15227867 NR Description: putative acetone-cyanohydrin lyase
  misc_feature (7)..(268): NCBI GI NO: 27754457 NR Description: putative acetone-cyanohydrin lyase
  misc_feature (8)..(268): NCBI GI NO: 15227861 NR Description: putative acetone-cyanohydrin lyase
  misc_feature (7)..(268): NCBI GI NO: 15227865 NR Description: putative acetone-cyanohydrin lyase
  misc_feature (13)..(265): NCBI GI NO: 14279437 NR Description: ethylene-induced esterase [Citrus sinensis]
  misc_feature (11)..(268): NCBI GI NO: 40549303 NR Description: salicylic acid-binding protein 2
  misc_feature (14)..(268): NCBI GI NO: 15235445 NR Description: hydroxynitrile lyase like protein
  misc_feature (9)..(265): NCBI GI NO: 15227859 NR Description: putative acetone-cyanohydrin lyase
KVRKENMSEEKRKQHFVLVHGACHGAWCWYKVKPLLEALGHRVTALDLAASGIDTTRSITDISTCEQYSEPLMQLMTSLPNDEKVVLVGHSFGGLSLALAMDKFPDKISVSVFVTAFMPDTKHSPSFVEEKFASSMTPEGWMGSELETYGSDNSGLSVFFSTDFMKHRLYQLSPVEDLELGLLLKRPSSLFINELSKMENFSEKGYGSVPRAYIVCKEDNIISEDHQRWMIHNYPANLVIEMEETDHMPMFCKPQLLSDHLLAIADNFC

SEQ ID NO: 1146 - protein, 263 aa, Arabidopsis thaliana
  peptide (1)..(263): Ceres Seq. ID no. 12333680
  misc_feature (35)..(257): Pfam Name: Pfam Description:  alpha/beta hydrolase fold
  misc_feature (1)..(263): NCBI GI NO: 15227863 NR Description: putative acetone-cyanohydrin lyase
  misc_feature (1)..(262): NCBI GI NO: 21554666 NR Description: putative acetone-cyanohydrin lyase
  misc_feature (1)..(262): NCBI GI NO: 15227867 NR Description: putative acetone-cyanohydrin lyase
  misc_feature (1)..(262): NCBI GI NO: 27754457 NR Description: putative acetone-cyanohydrin lyase
  misc_feature (2)..(262): NCBI GI NO: 15227861 NR Description: putative acetone-cyanohydrin lyase
  misc_feature (1)..(262): NCBI GI NO: 15227865 NR Description: putative acetone-cyanohydrin lyase
  misc_feature (7)..(259): NCBI GI NO: 14279437 NR Description: ethylene-induced esterase [Citrus sinensis]
  misc_feature (5)..(262): NCBI GI NO: 40549303 NR Description: salicylic acid-binding protein 2
  misc_feature (8)..(262): NCBI GI NO: 15235445 NR Description: hydroxynitrile lyase like protein
  misc_feature (3)..(259): NCBI GI NO: 15227859 NR Description: putative acetone-cyanohydrin lyase
MSEEKRKQHFVLVHGACHGAWCWYKVKPLLEALGHRVTALDLAASGIDTTRSITDISTCEQYSEPLMQLMTSLPNDEKVVLVGHSFGGLSLALAMDKFPDKISVSVFVTAFMPDTKHSPSFVEEKFASSMTPEGWMGSELETYGSDNSGLSVFFSTDFMKHRLYQLSPVEDLELGLLLKRPSSLFINELSKMENFSEKGYGSVPRAYIVCKEDNIISEDHQRWMIHNYPANLVIEMEETDHMPMFCKPQLLSDHLLAIADNFC

SEQ ID NO: 1147 - protein, 197 aa, Arabidopsis thaliana
  peptide (1)..(197): Ceres Seq. ID no. 12333681
  misc_feature (1)..(191): Pfam Name: Pfam Description:  alpha/beta hydrolase fold
  misc_feature (1)..(197): NCBI GI NO: 15227863 NR Description: putative acetone-cyanohydrin lyase
  misc_feature (1)..(196): NCBI GI NO: 21554666 NR Description: putative acetone-cyanohydrin lyase
  misc_feature (1)..(196): NCBI GI NO: 15227867 NR Description: putative acetone-cyanohydrin lyase
  misc_feature (1)..(196): NCBI GI NO: 27754457 NR Description: putative acetone-cyanohydrin lyase
  misc_feature (1)..(196): NCBI GI NO: 15227861 NR Description: putative acetone-cyanohydrin lyase
  misc_feature (1)..(196): NCBI GI NO: 15227865 NR Description: putative acetone-cyanohydrin lyase
  misc_feature (1)..(193): NCBI GI NO: 14279437 NR Description: ethylene-induced esterase [Citrus sinensis]
  misc_feature (1)..(196): NCBI GI NO: 40549303 NR Description: salicylic acid-binding protein 2
  misc_feature (1)..(196): NCBI GI NO: 15235445 NR Description: hydroxynitrile lyase like protein
  misc_feature (1)..(193): NCBI GI NO: 15227859 NR Description: putative acetone-cyanohydrin lyase
MQLMTSLPNDEKVVLVGHSFGGLSLALAMDKFPDKISVSVFVTAFMPDTKHSPSFVEEKFASSMTPEGWMGSELETYGSDNSGLSVFFSTDFMKHRLYQLSPVEDLELGLLLKRPSSLFINELSKMENFSEKGYGSVPRAYIVCKEDNIISEDHQRWMIHNYPANLVIEMEETDHMPMFCKPQLLSDHLLAIADNFC

SEQ ID NO: 1148 - DNA, 647 bp, Arabidopsis thaliana
  misc_feature (1)..(647): Ceres Seq. ID no. 12334215
tcgaaaatcatcaatacaaacttagtagtgtattctttatacgtataataacatcccttgtgatcaaacaagtaaaccattcaaaagatgaaaggaagaattttgattttgagtttgctcataatgagtctggtcatggcacaagttcaagtagaagcaaagatctgctgcccttccaaccaagctagaaatggctatagtgtatgccgtataaggttttccaagggaaggtgtatgcaagtgagtggatgccaaaactctgatacatgccctcgaggttgggtaaacgccattctcgaaaactcagctgatgctaccaatgagcactgcaagttagggtgtgaaacttctgtgtgtggtgccatgaacactctccagaactctgatgcaagtgaaattgtgaatggagcgtcggaacaatgtgccaagggatgttctattttctgtaccaagagctatgtagtcccacctgggccgcctaaactgttgtaatggtcgtatatgtgaaaaaacaaatgctagactcttgctattctggtttgtgtgtgtgtgtgtgcatgtgtcgtagaaggtttgttcgatcactagattgtacatgccctctacttcctataacctaaataaagagttaaacgtacgtgtctttt

SEQ ID NO: 1149 - protein, 134 aa, Arabidopsis thaliana
  peptide (1)..(134): Ceres Seq. ID no. 12334216
  misc_feature (25)..(67): Pfam Name: Pfam Description:  Plant thionin
  misc_feature (1)..(134): NCBI GI NO: 18410037 NR Description: thionin; protein id: At1g72260
  misc_feature (13)..(134): NCBI GI NO: 21554677 NR Description: thionin [Arabidopsis thaliana]
  misc_feature (17)..(134): NCBI GI NO: 25294219 NR Description: thionin, 63255-62748
  misc_feature (1)..(122): NCBI GI NO: 15218931 NR Description: thionin, putative; protein id: At1g66100
  misc_feature (1)..(121): NCBI GI NO: 1181533 NR Description: thionin
  misc_feature (1)..(121): NCBI GI NO: 15239447 NR Description: thionin Thi2
  misc_feature (1)..(121): NCBI GI NO: 21553588 NR Description: thionin Thi2.2 [Arabidopsis thaliana]
  misc_feature (1)..(122): NCBI GI NO: 1076466 NR Description: thionin variant Thi2Ca2 - Abyssinian crambe
  misc_feature (1)..(122): NCBI GI NO: 1076463 NR Description: thionin variant Thi2Ca10 - Abyssinian crambe
  misc_feature (1)..(122): NCBI GI NO: 1076464 NR Description: thionin variant Thi2Ca11 - Abyssinian crambe
MKGRILILSLLIMSLVMAQVQVEAKICCPSNQARNGYSVCRIRFSKGRCMQVSGCQNSDTCPRGWVNAILENSADATNEHCKLGCETSVCGAMNTLQNSDASEIVNGASEQCAKGCSIFCTKSYVVPPGPPKLL

SEQ ID NO: 1150 - protein, 122 aa, Arabidopsis thaliana
  peptide (1)..(122): Ceres Seq. ID no. 12334217
  misc_feature (13)..(55): Pfam Name: Pfam Description:  Plant thionin
  misc_feature (1)..(122): NCBI GI NO: 18410037 NR Description: thionin; protein id: At1g72260
  misc_feature (1)..(122): NCBI GI NO: 21554677 NR Description: thionin [Arabidopsis thaliana]
  misc_feature (5)..(122): NCBI GI NO: 25294219 NR Description: thionin, 63255-62748
  misc_feature (1)..(110): NCBI GI NO: 15218931 NR Description: thionin, putative; protein id: At1g66100
  misc_feature (1)..(109): NCBI GI NO: 1181533 NR Description: thionin
  misc_feature (1)..(109): NCBI GI NO: 15239447 NR Description: thionin Thi2
  misc_feature (1)..(109): NCBI GI NO: 21553588 NR Description: thionin Thi2.2 [Arabidopsis thaliana]
  misc_feature (1)..(110): NCBI GI NO: 1076466 NR Description: thionin variant Thi2Ca2 - Abyssinian crambe
  misc_feature (1)..(110): NCBI GI NO: 1076463 NR Description: thionin variant Thi2Ca10 - Abyssinian crambe
  misc_feature (1)..(110): NCBI GI NO: 1076464 NR Description: thionin variant Thi2Ca11 - Abyssinian crambe
MSLVMAQVQVEAKICCPSNQARNGYSVCRIRFSKGRCMQVSGCQNSDTCPRGWVNAILENSADATNEHCKLGCETSVCGAMNTLQNSDASEIVNGASEQCAKGCSIFCTKSYVVPPGPPKLL

SEQ ID NO: 1151 - protein, 118 aa, Arabidopsis thaliana
  peptide (1)..(118): Ceres Seq. ID no. 12334218
  misc_feature (9)..(51): Pfam Name: Pfam Description:  Plant thionin
  misc_feature (1)..(118): NCBI GI NO: 18410037 NR Description: thionin; protein id: At1g72260
  misc_feature (1)..(118): NCBI GI NO: 21554677 NR Description: thionin [Arabidopsis thaliana]
  misc_feature (1)..(118): NCBI GI NO: 25294219 NR Description: thionin, 63255-62748
  misc_feature (1)..(106): NCBI GI NO: 15218931 NR Description: thionin, putative; protein id: At1g66100
  misc_feature (1)..(105): NCBI GI NO: 1181533 NR Description: thionin
  misc_feature (1)..(105): NCBI GI NO: 15239447 NR Description: thionin Thi2
  misc_feature (1)..(105): NCBI GI NO: 21553588 NR Description: thionin Thi2.2 [Arabidopsis thaliana]
  misc_feature (1)..(106): NCBI GI NO: 1076466 NR Description: thionin variant Thi2Ca2 - Abyssinian crambe
  misc_feature (1)..(106): NCBI GI NO: 1076463 NR Description: thionin variant Thi2Ca10 - Abyssinian crambe
  misc_feature (1)..(106): NCBI GI NO: 1076464 NR Description: thionin variant Thi2Ca11 - Abyssinian crambe
MAQVQVEAKICCPSNQARNGYSVCRIRFSKGRCMQVSGCQNSDTCPRGWVNAILENSADATNEHCKLGCETSVCGAMNTLQNSDASEIVNGASEQCAKGCSIFCTKSYVVPPGPPKLL

SEQ ID NO: 1152 - DNA, 3323 bp, Arabidopsis thaliana
  misc_feature (1)..(3323): Ceres Seq. ID no. 13488061
acttgggatttaaataccacttttttgcttcttgtacccctgcttcatcatcacgcacacctctcttaacttcttcgatctcttctttttctctacacgattcgattgattcaagtatcaatcaatcgaatccgagataagtcatgagtttcttcaaatgggtttcttttgttttgatccttcacttgcttaatccgactctgatttcatgttcctctaatgggttatctcaaataccttcaaagtttcttactttggctaaaaggaatgattttttcgattggatggttggaatcagaaggagaatccatgagaatccagagttaggttatgaggaagtagagacatctaagcttgttagagcagagttggagaagatgggtgtttcttataagtacccagttgctgttactggtgttgttgggtatgttggaactggtcatgctccttttgttgctttaagggctgatatggatgcacttgctatgcaggaaatggtggaatgggaacacaagagtaaggttccagggaagatgcacgcttgtggacatgacgctcacactacgatgcttctcggtgctgcaaaattgctcaaagaacatgaagaagagctacagggcacagtggttctagttttccaaccagctgaggaaggaggaggaggtgcaaagaagattgtggaggctggagtgttggagaatgtgagtgcaatctttggattacatgtcacaaatcaattggcattaggtcaagtgagctcgagagagggtcctatgttggctggtagtggctttttcaaagctaagataagcgggaaaggaggccacgcagctcttccgcagcataccatagatccgatactggcagcttcaaatgttattgttagcttacaacacctcgtttcacgagaggcagatcctttagactctcaggtggttacagttgctaaatttgaaggcggtggtgctttcaatgtgattcctgactctgttactatcggtggtacattccgagctttttcaactaaaagctttatgcaactcaagaaaagaattgagcaggttatcacaaggcaagcgagcgtgaatatgtgtaatgcaacagtggatttcattgaagaggagaaaccttttttcccaccaactgtaaatgacaaagccttacaccagtttttcaagaacgtttcaggcgatatgttagggattgagaattacgtcgagatgcaaccattaatgggatcagaagatttctctttctaccaacaagcaatcccgggacattttagcttcgttggaatgcaaaacaaagctcgttcaccaatggcgagccctcactcgccgtactttgaagttaacgaagaattactaccttatggtgcttcccttcatgcttccatggccacaagatatcttcttgaactaaaagcttcaactctaaataagagtaacaaaaaagatgaactttgatgccaacaaacattggcttctcctattcttctactctgaaaaatgtcaaaacatggtaacagttttttcttttttacagagcctgccatgtaaagattaataaattgttatgcagtgtcaagcttctattaaatccaagaaatgttattactgcaaacaaaaacagatttgggccattgcaatgacagagctgaaacggtcaatttaaacaaatcagattgagagatttcagaagattcgacgcataaacaaatgctaaaattcgagagcttgttaacatgtctaactgataaagattcaatttttctttcttgttttttcttcttcttctttagattcaagttctgatctttgcttctttgaaaatcacaaatcttttcttctgggtttctataaaaaacccattttttgttgttgtcgtacaaacatttcccgtaaagattggatttttgtgtaagcatttgaagatagctaagaaagtgagaagcttttagatgaaagtgatggtaatggagatggaggaatgtgttaaagaaaatggttcatcaacacctaaatctagagtcacaaaccaatctagagctctcttaccgttgcgtctgcttcagattctgttattgtttcttgttttgactcttgggatctctgttgttagtatacacatgatcaagtttttgaagattcaacgtttagatcctgtggctccaattactttgctctctacgtataatcatgagagtgttactttagatagctttattagacctccttccaatgtttggcacacaatgaatgatagtgaattgctttggcgtgcttctatagagccgcaaagaaatggttatccgtttaaacgtgtccctaaattggctttcatgtttcttgccaaaggtcctttaccatttgctccactttgggagaagttctgtaaaggacatgagggtctttattctatctatgttcattcgttgcctagttacaaatcggatttttcgaggtcgtctgtgttttacagaagatatatccctagtcaggctgtggcatggggagagatgagtatgggtgaagcagagaggaggcttttggctaatgcgttgcttgatatctctaatgaatggtttgttctgctgtctgaatcatgcattcctctgcgaggtttcagctttatctatagttatgtctctgaatcaagatatagttttatgggtgctgctgatgaggaaggacctgatggaagaggcagatacaggacagaaatggaacctgagatcacactaagccagtggcgaaaagggtctcagtggtttgaaattaaccggaaactcgctgttgagattgttcaagacactacttactatcccaaattcaaagagttttgtagacctccatgctatgtagatgaacattacttcccaacaatgttgtctatgaaacatcgggttttgcttgctaataggacattgacatggacagattggtcacgtggtggtgctcatccagctacttttggtaaggctgatgtaacggaaagttttctcaagaagcttacaggagccaaatcttgcctctacaatgatcatcagtctcaaatctgttatctctttgccagaaagtttgctccaagcgcattggagcctttactgcaacttgcacccaagattcttgagttaggctctaacatatcttccactcgtcactcttggtatttgttttgagaagttcttgagtttagagtatgatcatggaccgaactgatcattagttaatctcctctttcacaatgatattacaggtattgtgaaggttaaacatattttttgacatgacagattattgaataaagggagttttgagtcc

SEQ ID NO: 1153 - protein, 440 aa, Arabidopsis thaliana
  peptide (1)..(440): Ceres Seq. ID no. 13488062
  misc_feature (45)..(424): Pfam Name: Pfam Description:  Peptidase family M20/M25/M40
  misc_feature (1)..(440): NCBI GI NO: 15218027 NR Description: IAA-Ala hydrolase (IAR3) [Arabidopsis thaliana]
  misc_feature (1)..(440): NCBI GI NO: 2181184 NR Description: JR3 protein [Arabidopsis thaliana]
  misc_feature (1)..(433): NCBI GI NO: 15218029 NR Description: auxin conjugate hydrolase
  misc_feature (15)..(440): NCBI GI NO: 27948556 NR Description: IAA-amino acid hydrolase
  misc_feature (7)..(440): NCBI GI NO: 902791 NR Description: ILL2
  misc_feature (34)..(423): NCBI GI NO: 3559811 NR Description: gr1-protein [Arabidopsis thaliana]
  misc_feature (34)..(423): NCBI GI NO: 15219390 NR Description: gr1 protein [Arabidopsis thaliana]
  misc_feature (9)..(425): NCBI GI NO: 21741848 NR Description: OSJNBa0019D11.19
  misc_feature (46)..(422): NCBI GI NO: 18976969 NR Description: iaa-amino acid hydrolase homolog 1 precursor
  misc_feature (51)..(423): NCBI GI NO: 22977510 NR Description: hypothetical protein [Ralstonia metallidurans]
MSFFKWVSFVLILHLLNPTLISCSSNGLSQIPSKFLTLAKRNDFFDWMVGIRRRIHENPELGYEEVETSKLVRAELEKMGVSYKYPVAVTGVVGYVGTGHAPFVALRADMDALAMQEMVEWEHKSKVPGKMHACGHDAHTTMLLGAAKLLKEHEEELQGTVVLVFQPAEEGGGGAKKIVEAGVLENVSAIFGLHVTNQLALGQVSSREGPMLAGSGFFKAKISGKGGHAALPQHTIDPILAASNVIVSLQHLVSREADPLDSQVVTVAKFEGGGAFNVIPDSVTIGGTFRAFSTKSFMQLKKRIEQVITRQASVNMCNATVDFIEEEKPFFPPTVNDKALHQFFKNVSGDMLGIENYVEMQPLMGSEDFSFYQQAIPGHFSFVGMQNKARSPMASPHSPYFEVNEELLPYGASLHASMATRYLLELKASTLNKSNKKDEL

SEQ ID NO: 1154 - protein, 406 aa, Arabidopsis thaliana
  peptide (1)..(406): Ceres Seq. ID no. 13488063
  misc_feature (160)..(271): Pfam Name: Pfam Description:  Arabidopsis protein of unknown function, DUF266
  misc_feature (8)..(406): NCBI GI NO: 15218028 NR Description: hypothetical protein [Arabidopsis thaliana]
  misc_feature (6)..(390): NCBI GI NO: 18402952 NR Description: expressed protein [Arabidopsis thaliana]
  misc_feature (8)..(390): NCBI GI NO: 21554566 NR Description: unknown [Arabidopsis thaliana]
  misc_feature (6)..(354): NCBI GI NO: 9280235 NR Description: gb|AAD40142
  misc_feature (84)..(390): NCBI GI NO: 15218485 NR Description: expressed protein [Arabidopsis thaliana]
  misc_feature (85)..(390): NCBI GI NO: 15221386 NR Description: hypothetical protein [Arabidopsis thaliana]
  misc_feature (92)..(405): NCBI GI NO: 34907318 NR Description: contains ESTs AU096118
  misc_feature (85)..(393): NCBI GI NO: 34895606 NR Description: OSJNBa0083M16.15
  misc_feature (92)..(393): NCBI GI NO: 34895612 NR Description: OSJNBa0083M16.18
  misc_feature (69)..(390): NCBI GI NO: 15219555 NR Description: expressed protein [Arabidopsis thaliana]
MKVMVMEMEECVKENGSSTPKSRVTNQSRALLPLRLLQILLLFLVLTLGISVVSIHMIKFLKIQRLDPVAPITLLSTYNHESVTLDSFIRPPSNVWHTMNDSELLWRASIEPQRNGYPFKRVPKLAFMFLAKGPLPFAPLWEKFCKGHEGLYSIYVHSLPSYKSDFSRSSVFYRRYIPSQAVAWGEMSMGEAERRLLANALLDISNEWFVLLSESCIPLRGFSFIYSYVSESRYSFMGAADEEGPDGRGRYRTEMEPEITLSQWRKGSQWFEINRKLAVEIVQDTTYYPKFKEFCRPPCYVDEHYFPTMLSMKHRVLLANRTLTWTDWSRGGAHPATFGKADVTESFLKKLTGAKSCLYNDHQSQICYLFARKFAPSALEPLLQLAPKILELGSNISSTRHSWYLF

SEQ ID NO: 1155 - protein, 403 aa, Arabidopsis thaliana
  peptide (1)..(403): Ceres Seq. ID no. 13488064
  misc_feature (157)..(268): Pfam Name: Pfam Description:  Arabidopsis protein of unknown function, DUF266
  misc_feature (5)..(403): NCBI GI NO: 15218028 NR Description: hypothetical protein [Arabidopsis thaliana]
  misc_feature (3)..(387): NCBI GI NO: 18402952 NR Description: expressed protein [Arabidopsis thaliana]
  misc_feature (5)..(387): NCBI GI NO: 21554566 NR Description: unknown [Arabidopsis thaliana]
  misc_feature (3)..(351): NCBI GI NO: 9280235 NR Description: gb|AAD40142
  misc_feature (81)..(387): NCBI GI NO: 15218485 NR Description: expressed protein [Arabidopsis thaliana]
  misc_feature (82)..(387): NCBI GI NO: 15221386 NR Description: hypothetical protein [Arabidopsis thaliana]
  misc_feature (89)..(402): NCBI GI NO: 34907318 NR Description: contains ESTs AU096118
  misc_feature (82)..(390): NCBI GI NO: 34895606 NR Description: OSJNBa0083M16.15
  misc_feature (89)..(390): NCBI GI NO: 34895612 NR Description: OSJNBa0083M16.18
  misc_feature (66)..(387): NCBI GI NO: 15219555 NR Description: expressed protein [Arabidopsis thaliana]
MVMEMEECVKENGSSTPKSRVTNQSRALLPLRLLQILLLFLVLTLGISVVSIHMIKFLKIQRLDPVAPITLLSTYNHESVTLDSFIRPPSNVWHTMNDSELLWRASIEPQRNGYPFKRVPKLAFMFLAKGPLPFAPLWEKFCKGHEGLYSIYVHSLPSYKSDFSRSSVFYRRYIPSQAVAWGEMSMGEAERRLLANALLDISNEWFVLLSESCIPLRGFSFIYSYVSESRYSFMGAADEEGPDGRGRYRTEMEPEITLSQWRKGSQWFEINRKLAVEIVQDTTYYPKFKEFCRPPCYVDEHYFPTMLSMKHRVLLANRTLTWTDWSRGGAHPATFGKADVTESFLKKLTGAKSCLYNDHQSQICYLFARKFAPSALEPLLQLAPKILELGSNISSTRHSWYLF

SEQ ID NO: 1156 - DNA, 786 bp, Arabidopsis thaliana
  misc_feature (1)..(786): Ceres Seq. ID no. 13490015
tttcttcgtttctttgcaaaagaccagcgataattatgaacaaaggcggtggatccggtggcggatccggtggaggaagcggtccaacggccgccgccgccgccgcggctttacagaagcaaaaggcgttgttacagagagtggagactgacatcacatctgtcgtcgataacttcacgcagatcgtcaatgtttcaagggtgagtgatccgccggtgaagaactcgcaggagacatacatgatggagatgcgagcttctagaatggttcaagcagctgattctcttttgaaactcgtatcagaacttaagcaaacagcgatattttcaggatttgcatcactaaacgatcatgtagaacaaagaatagaagagtttgatcaagaggccgagaagacaaatcgattgttggctagaattgctgatgatgcatctgccaatcttaaagagctcgagtctcactattactcttctgctcagagattgactctagacatctgatattagaatgcctggagacaccagaggaaacagataaaacaattggttcataaaccagaggaaacggccatcgaaggatatgcagtttgaagtcatggacaacgttttggactatcctttcccacattgatcatatttcctctctcaattcgcatattacttagcaatcttaaatgttccagtctgatgaacaagcgtttgatgttttcatcaatcattagtgatttttttgctgttatcctcttgtatgttttgataattacgtgaaattacattctcttaacct

SEQ ID NO: 1157 - protein, 165 aa, Arabidopsis thaliana
  peptide (1)..(165): Ceres Seq. ID no. 13490016
  misc_feature (31)..(157): Pfam Name: Pfam Description:  Surfeit locus protein 5
  misc_feature (1)..(165): NCBI GI NO: 25407014 NR Description: protein T6D22.4 [imported] - Arabidopsis thaliana
  misc_feature (12)..(165): NCBI GI NO: 18390833 NR Description: expressed protein [Arabidopsis thaliana]
  misc_feature (11)..(164): NCBI GI NO: 18394361 NR Description: expressed protein [Arabidopsis thaliana]
  misc_feature (11)..(164): NCBI GI NO: 21553439 NR Description: unknown [Arabidopsis thaliana]
  misc_feature (22)..(164): NCBI GI NO: 34895594 NR Description: unnamed protein product
  misc_feature (31)..(161): NCBI GI NO: 19557695 NR Description: surfeit 5 isoform b; surfeit locus protein 5
  misc_feature (31)..(157): NCBI GI NO: 6755700 NR Description: surfeit gene 5 [Mus musculus]
  misc_feature (31)..(157): NCBI GI NO: 5803183 NR Description: surfeit 5 isoform a; surfeit locus protein 5
  misc_feature (38)..(161): NCBI GI NO: 28866782 NR Description: Surf5b [Gallus gallus]
  misc_feature (38)..(158): NCBI GI NO: 6175073 NR Description: Surfeit locus protein 5
SSFLCKRPAIIMNKGGGSGGGSGGGSGPTAAAAAAALQKQKALLQRVETDITSVVDNFTQIVNVSRVSDPPVKNSQETYMMEMRASRMVQAADSLLKLVSELKQTAIFSGFASLNDHVEQRIEEFDQEAEKTNRLLARIADDASANLKELESHYYSSAQRLTLDI

SEQ ID NO: 1158 - protein, 154 aa, Arabidopsis thaliana
  peptide (1)..(154): Ceres Seq. ID no. 13490017
  misc_feature (20)..(146): Pfam Name: Pfam Description:  Surfeit locus protein 5
  misc_feature (1)..(154): NCBI GI NO: 25407014 NR Description: protein T6D22.4 [imported] - Arabidopsis thaliana
  misc_feature (1)..(154): NCBI GI NO: 18390833 NR Description: expressed protein [Arabidopsis thaliana]
  misc_feature (1)..(153): NCBI GI NO: 18394361 NR Description: expressed protein [Arabidopsis thaliana]
  misc_feature (1)..(153): NCBI GI NO: 21553439 NR Description: unknown [Arabidopsis thaliana]
  misc_feature (11)..(153): NCBI GI NO: 34895594 NR Description: unnamed protein product
  misc_feature (20)..(150): NCBI GI NO: 19557695 NR Description: surfeit 5 isoform b; surfeit locus protein 5
  misc_feature (20)..(146): NCBI GI NO: 6755700 NR Description: surfeit gene 5 [Mus musculus]
  misc_feature (20)..(146): NCBI GI NO: 5803183 NR Description: surfeit 5 isoform a; surfeit locus protein 5
  misc_feature (27)..(150): NCBI GI NO: 28866782 NR Description: Surf5b [Gallus gallus]
  misc_feature (27)..(147): NCBI GI NO: 6175073 NR Description: Surfeit locus protein 5
MNKGGGSGGGSGGGSGPTAAAAAAALQKQKALLQRVETDITSVVDNFTQIVNVSRVSDPPVKNSQETYMMEMRASRMVQAADSLLKLVSELKQTAIFSGFASLNDHVEQRIEEFDQEAEKTNRLLARIADDASANLKELESHYYSSAQRLTLDI

SEQ ID NO: 1159 - protein, 86 aa, Arabidopsis thaliana
  peptide (1)..(86): Ceres Seq. ID no. 13490018
  misc_feature (1)..(78): Pfam Name: Pfam Description:  Surfeit locus protein 5
  misc_feature (1)..(86): NCBI GI NO: 25407014 NR Description: protein T6D22.4 [imported] - Arabidopsis thaliana
  misc_feature (1)..(86): NCBI GI NO: 18390833 NR Description: expressed protein [Arabidopsis thaliana]
  misc_feature (1)..(85): NCBI GI NO: 18394361 NR Description: expressed protein [Arabidopsis thaliana]
  misc_feature (1)..(85): NCBI GI NO: 21553439 NR Description: unknown [Arabidopsis thaliana]
  misc_feature (1)..(85): NCBI GI NO: 34895594 NR Description: unnamed protein product
  misc_feature (1)..(82): NCBI GI NO: 19557695 NR Description: surfeit 5 isoform b; surfeit locus protein 5
  misc_feature (1)..(78): NCBI GI NO: 6755700 NR Description: surfeit gene 5 [Mus musculus]
  misc_feature (1)..(78): NCBI GI NO: 5803183 NR Description: surfeit 5 isoform a; surfeit locus protein 5
  misc_feature (1)..(82): NCBI GI NO: 28866782 NR Description: Surf5b [Gallus gallus]
  misc_feature (1)..(79): NCBI GI NO: 6175073 NR Description: Surfeit locus protein 5
MMEMRASRMVQAADSLLKLVSELKQTAIFSGFASLNDHVEQRIEEFDQEAEKTNRLLARIADDASANLKELESHYYSSAQRLTLDI

SEQ ID NO: 1160 - DNA, 691 bp, Arabidopsis thaliana
  misc_feature (1)..(691): Ceres Seq. ID no. 12369923
aaacccccccaatcctcctcactcttccctatcctcttcatttttcccaatcatcaaacacaagattagagttcgattctccaaagaaaatatggctaattcagcgtctgggatgcatgtgaatgatgaatgcaagattaagttcttagagttgaaagcaaagaggacttacaggttcattgtgttcaaaattgatgagaaggcacagcaagtgcaaatagaaaagcttgggaatccagaagaaacttacgacgattttaccagctctatccccgatgacgaatgccgatacgctgtctacgattttgatttcaccacagaggacaattgtcagaagagcaagatctttttcatcgcgtggtcacctgatacatcgagagttcggagtaagatgttgtatgcaagctcaaaagacaggttcaagagagaaatggaaggaattcaagttgaattgcaagcaactgatcctagtgagatgagccttgacatcatcaaaggacgactcaatctctgagcaacaacaacattctaatgcatcctttattcgtttcaaattgttaagctttaacatgccattttcttggaccatttctgcttttgcttgtccgctatattacattttgtgtggattcaatgtctttaaattgttttgtttttcacaagaaagaaaaaaaagaatgataattatttt

SEQ ID NO: 1161 - protein, 170 aa, Arabidopsis thaliana
  peptide (1)..(170): Ceres Seq. ID no. 12369924
  misc_feature (42)..(169): Pfam Name: Pfam Description:  Cofilin/tropomyosin-type actin-binding protein
  misc_feature (31)..(170): NCBI GI NO: 18411410 NR Description: putative actin-depolymerizing factor
  misc_feature (38)..(170): NCBI GI NO: 7441448 NR Description: actin-depolymerizing factor F6N23
  misc_feature (31)..(170): NCBI GI NO: 15223471 NR Description: actin depolymerizing factor, putative
  misc_feature (31)..(167): NCBI GI NO: 231509 NR Description: Actin-depolymerizing factor (ADF)
  misc_feature (31)..(167): NCBI GI NO: 22857914 NR Description: pollen specific actin-depolymerizing factor 2
  misc_feature (31)..(167): NCBI GI NO: 38345587 NR Description: OSJNBb0012E24.5
  misc_feature (31)..(167): NCBI GI NO: 18423381 NR Description: actin depolymerizing factor-like
  misc_feature (31)..(167): NCBI GI NO: 21537061 NR Description: actin depolymerizing factor-like
  misc_feature (31)..(169): NCBI GI NO: 17366768 NR Description: Actin-depolymerizing factor 1 (ADF 1)
  misc_feature (31)..(167): NCBI GI NO: 17366765 NR Description: Actin-depolymerizing factor 2 (ADF 2)
NPPNPPHSSLSSSFFPIIKHKIRVRFSKENMANSASGMHVNDECKIKFLELKAKRTYRFIVFKIDEKAQQVQIEKLGNPEETYDDFTSSIPDDECRYAVYDFDFTTEDNCQKSKIFFIAWSPDTSRVRSKMLYASSKDRFKREMEGIQVELQATDPSEMSLDIIKGRLNL

SEQ ID NO: 1162 - protein, 140 aa, Arabidopsis thaliana
  peptide (1)..(140): Ceres Seq. ID no. 12369925
  misc_feature (12)..(139): Pfam Name: Pfam Description:  Cofilin/tropomyosin-type actin-binding protein
  misc_feature (1)..(140): NCBI GI NO: 18411410 NR Description: putative actin-depolymerizing factor
  misc_feature (8)..(140): NCBI GI NO: 7441448 NR Description: actin-depolymerizing factor F6N23
  misc_feature (1)..(140): NCBI GI NO: 15223471 NR Description: actin depolymerizing factor, putative
  misc_feature (1)..(137): NCBI GI NO: 231509 NR Description: Actin-depolymerizing factor (ADF)
  misc_feature (1)..(137): NCBI GI NO: 22857914 NR Description: pollen specific actin-depolymerizing factor 2
  misc_feature (1)..(137): NCBI GI NO: 38345587 NR Description: OSJNBb0012E24.5
  misc_feature (1)..(137): NCBI GI NO: 18423381 NR Description: actin depolymerizing factor-like
  misc_feature (1)..(137): NCBI GI NO: 21537061 NR Description: actin depolymerizing factor-like
  misc_feature (1)..(139): NCBI GI NO: 17366768 NR Description: Actin-depolymerizing factor 1 (ADF 1)
  misc_feature (1)..(137): NCBI GI NO: 17366765 NR Description: Actin-depolymerizing factor 2 (ADF 2)
MANSASGMHVNDECKIKFLELKAKRTYRFIVFKIDEKAQQVQIEKLGNPEETYDDFTSSIPDDECRYAVYDFDFTTEDNCQKSKIFFIAWSPDTSRVRSKMLYASSKDRFKREMEGIQVELQATDPSEMSLDIIKGRLNL

SEQ ID NO: 1163 - protein, 133 aa, Arabidopsis thaliana
  peptide (1)..(133): Ceres Seq. ID no. 12369926
  misc_feature (5)..(132): Pfam Name: Pfam Description:  Cofilin/tropomyosin-type actin-binding protein
  misc_feature (1)..(133): NCBI GI NO: 18411410 NR Description: putative actin-depolymerizing factor
  misc_feature (1)..(133): NCBI GI NO: 7441448 NR Description: actin-depolymerizing factor F6N23
  misc_feature (1)..(133): NCBI GI NO: 15223471 NR Description: actin depolymerizing factor, putative
  misc_feature (1)..(130): NCBI GI NO: 231509 NR Description: Actin-depolymerizing factor (ADF)
  misc_feature (1)..(130): NCBI GI NO: 22857914 NR Description: pollen specific actin-depolymerizing factor 2
  misc_feature (1)..(130): NCBI GI NO: 38345587 NR Description: OSJNBb0012E24.5
  misc_feature (1)..(130): NCBI GI NO: 18423381 NR Description: actin depolymerizing factor-like
  misc_feature (1)..(130): NCBI GI NO: 21537061 NR Description: actin depolymerizing factor-like
  misc_feature (1)..(132): NCBI GI NO: 17366768 NR Description: Actin-depolymerizing factor 1 (ADF 1)
  misc_feature (1)..(130): NCBI GI NO: 17366765 NR Description: Actin-depolymerizing factor 2 (ADF 2)
MHVNDECKIKFLELKAKRTYRFIVFKIDEKAQQVQIEKLGNPEETYDDFTSSIPDDECRYAVYDFDFTTEDNCQKSKIFFIAWSPDTSRVRSKMLYASSKDRFKREMEGIQVELQATDPSEMSLDIIKGRLNL

SEQ ID NO: 1164 - DNA, 1620 bp, Arabidopsis thaliana
  misc_feature (1)..(1620): Ceres Seq. ID no. 12322395
attgtttagattccaggtcgatctgtgatccattatctttgctactaaactaagttcttttctctgatcgaatcaaaaagttttcaactttctaaatttttttagttctaaggaaaaaacctctccgagaatggttttatcggtgaagcaaacactctctccgaaaatcggacttttccgacgaaacccttcatcctcactaggaagatctcctgtttctctctcgtttccatcgacggagcttccaaaacgcaccgttttagccgtgtcaaagccgcttcatctctcttcttctctgagagctaagtctccggtagtgagatgtgaagcttatgaagctgaccgatcagagcctcatccgatcggtgatgatgctgcggcggcggaaacgaaatcagaggcggctaagaaattgaagatcgggatttactttgctacttggtgggctttgaacgttgtgttcaatatctacaacaagaaggtcttgaacgcttatccttacccatggcttacctcgacgctttctcttgccgctggttcgttgatgatgcttatctcttgggctgttgggatcgttgagactcccaagacggattttgatttctggaaaactctttttccggttgctgtggcacacacaattggtcatgtggctgcaacggtgagtatgtcaaaggttgctgtttctttcactcacatcatcaagagtggtgaacctgcgtttagtgtgcttgtctcgaggtttattttgggtgaaaccttccctacttcggtttacttgtctctcattccaatcattggtggttgcgctctgtctgcccttaccgagcttaacttcaacatgattggtttcatgggagctatgatttcgaacttggctttcgtgttccgtaacatcttctcgaagaagggaatgaagggaaagtctgtgagcgggatgaactactacgcctgtctctcaatgctgtccctattgatcctcactccctttgccattgctgttgaaggacctcagatgtgggtcgatggctggcagacagcgctcgctactgtcggaccacagtttgtctggtgggtggttgcgcagagtgtgttctatcacctctacaaccaagtgtcttacatgtctttagaccaaatctctcccttgacgtttagtgttggtaacaccatgaaacgtatctccgtcattgtctcctccatcattatcttccgcactccagtccagcccgtcaatgctcttggagcagccattgctatccttggaaccttcttgtattcccaggcaaagctctgatgcgaaagacataagagtgtaataagggtctggtgttgagctcctgacttcggttaaaaccgggaaaagagcttaatgtagatatttgtcctcaataatgaaagaaatgatgagattggacactaccatgtttagagtgtgttaggcagtttttttttttttacttttgagtttttttgaatttgggggaatgagaagattgcctctttgtaactaaagtgggaaatagatatttgtccccttgagaataagacaccctgcaactctctttttaacttggagagacatattataaaaagtagagaatatttatctcgagattg

SEQ ID NO: 1165 - protein, 388 aa, Arabidopsis thaliana
  peptide (1)..(388): Ceres Seq. ID no. 12322396
  misc_feature (1)..(388): NCBI GI NO: 18423670 NR Description: glucose-6-phosphate/phosphate translocator
  misc_feature (1)..(388): NCBI GI NO: 21554690 NR Description: glucose-6-phosphate/phosphate translocator
  misc_feature (1)..(388): NCBI GI NO: 9758260 NR Description: glucose-6-phosphate/phosphate translocator
  misc_feature (1)..(387): NCBI GI NO: 7488807 NR Description: glucose-6-phosphate/ phosphate-translocator precursor
  misc_feature (8)..(387): NCBI GI NO: 18407336 NR Description: glucose-6-phosphate/ phosphate-translocator precursor
  misc_feature (8)..(387): NCBI GI NO: 14596173 NR Description: Similar to glucose-6-phosphate/phosphate-translocator
  misc_feature (8)..(385): NCBI GI NO: 7484980 NR Description: glucose-6-phosphate/ phosphate translocator precursor -Arabidopsis thaliana
  misc_feature (53)..(387): NCBI GI NO: 7489258 NR Description: probable glucose-6-phosphate/phosphate-translocatorprecursor - potato
  misc_feature (53)..(387): NCBI GI NO: 27752361 NR Description: glucose-6-phosphate/phosphate translocator 2
  misc_feature (40)..(387): NCBI GI NO: 9295277 NR Description: glucose-6P/phosphate translocator precursor
MVLSVKQTLSPKIGLFRRNPSSSLGRSPVSLSFPSTELPKRTVLAVSKPLHLSSSLRAKSPVVRCEAYEADRSEPHPIGDDAAAAETKSEAAKKLKIGIYFATWWALNVVFNIYNKKVLNAYPYPWLTSTLSLAAGSLMMLISWAVGIVETPKTDFDFWKTLFPVAVAHTIGHVAATVSMSKVAVSFTHIIKSGEPAFSVLVSRFILGETFPTSVYLSLIPIIGGCALSALTELNFNMIGFMGAMISNLAFVFRNIFSKKGMKGKSVSGMNYYACLSMLSLLILTPFAIAVEGPQMWVDGWQTALATVGPQFVWWVVAQSVFYHLYNQVSYMSLDQISPLTFSVGNTMKRISVIVSSIIIFRTPVQPVNALGAAIAILGTFLYSQAKL

SEQ ID NO: 1166 - protein, 250 aa, Arabidopsis thaliana
  peptide (1)..(250): Ceres Seq. ID no. 12322397
  misc_feature (1)..(250): NCBI GI NO: 18423670 NR Description: glucose-6-phosphate/phosphate translocator
  misc_feature (1)..(250): NCBI GI NO: 21554690 NR Description: glucose-6-phosphate/phosphate translocator
  misc_feature (1)..(250): NCBI GI NO: 9758260 NR Description: glucose-6-phosphate/phosphate translocator
  misc_feature (1)..(249): NCBI GI NO: 7488807 NR Description: glucose-6-phosphate/ phosphate-translocator precursor
  misc_feature (1)..(249): NCBI GI NO: 18407336 NR Description: glucose-6-phosphate/ phosphate-translocator precursor
  misc_feature (1)..(249): NCBI GI NO: 14596173 NR Description: Similar to glucose-6-phosphate/phosphate-translocator
  misc_feature (1)..(247): NCBI GI NO: 7484980 NR Description: glucose-6-phosphate/ phosphate translocator precursor -Arabidopsis thaliana
  misc_feature (1)..(249): NCBI GI NO: 7489258 NR Description: probable glucose-6-phosphate/phosphate-translocatorprecursor - potato
  misc_feature (1)..(249): NCBI GI NO: 27752361 NR Description: glucose-6-phosphate/phosphate translocator 2
  misc_feature (1)..(249): NCBI GI NO: 9295277 NR Description: glucose-6P/phosphate translocator precursor
MMLISWAVGIVETPKTDFDFWKTLFPVAVAHTIGHVAATVSMSKVAVSFTHIIKSGEPAFSVLVSRFILGETFPTSVYLSLIPIIGGCALSALTELNFNMIGFMGAMISNLAFVFRNIFSKKGMKGKSVSGMNYYACLSMLSLLILTPFAIAVEGPQMWVDGWQTALATVGPQFVWWVVAQSVFYHLYNQVSYMSLDQISPLTFSVGNTMKRISVIVSSIIIFRTPVQPVNALGAAIAILGTFLYSQAKL

SEQ ID NO: 1167 - protein, 249 aa, Arabidopsis thaliana
  peptide (1)..(249): Ceres Seq. ID no. 12322398
  misc_feature (1)..(249): NCBI GI NO: 18423670 NR Description: glucose-6-phosphate/phosphate translocator
  misc_feature (1)..(249): NCBI GI NO: 21554690 NR Description: glucose-6-phosphate/phosphate translocator
  misc_feature (1)..(249): NCBI GI NO: 9758260 NR Description: glucose-6-phosphate/phosphate translocator
  misc_feature (1)..(248): NCBI GI NO: 7488807 NR Description: glucose-6-phosphate/ phosphate-translocator precursor
  misc_feature (1)..(248): NCBI GI NO: 18407336 NR Description: glucose-6-phosphate/ phosphate-translocator precursor
  misc_feature (1)..(248): NCBI GI NO: 14596173 NR Description: Similar to glucose-6-phosphate/phosphate-translocator
  misc_feature (1)..(246): NCBI GI NO: 7484980 NR Description: glucose-6-phosphate/ phosphate translocator precursor -Arabidopsis thaliana
  misc_feature (1)..(248): NCBI GI NO: 7489258 NR Description: probable glucose-6-phosphate/phosphate-translocatorprecursor - potato
  misc_feature (1)..(248): NCBI GI NO: 27752361 NR Description: glucose-6-phosphate/phosphate translocator 2
  misc_feature (1)..(248): NCBI GI NO: 9295277 NR Description: glucose-6P/phosphate translocator precursor
MLISWAVGIVETPKTDFDFWKTLFPVAVAHTIGHVAATVSMSKVAVSFTHIIKSGEPAFSVLVSRFILGETFPTSVYLSLIPIIGGCALSALTELNFNMIGFMGAMISNLAFVFRNIFSKKGMKGKSVSGMNYYACLSMLSLLILTPFAIAVEGPQMWVDGWQTALATVGPQFVWWVVAQSVFYHLYNQVSYMSLDQISPLTFSVGNTMKRISVIVSSIIIFRTPVQPVNALGAAIAILGTFLYSQAKL

SEQ ID NO: 1168 - DNA, 621 bp, Arabidopsis thaliana
  misc_feature (1)..(621): Ceres Seq. ID no. 12334211
actttcgagtatcgagtcgtcgttcttcttcttcctctgagagagagatctgcggaaaacgaaagcgagatttatcaggttcggtgattctttgtggagaagaagctcgcgataagtcaacatgagcaagccaatggaagaggataccaatcagggcaagactgaggaagaggaattcaacaccgggccactctctgttcttatgatgagcgtcaagaataacactcaggttttaatcaattgccggaacaacaggaaacttcttgggcgagtgagggcgtttgacagacactgcaacatggttcttgaaaatgtcagagagatgtggactgaggttccgaaaactgggaaaggcaagaagaaagcacttccggtgaacagagatcggttcataagcaagatgtttctacgtggagactcggtcattatcgtcctcaggaatccaaaatgagaggaagagagacttaagagacatgttccttgtttgttgtgctaaaactgataaattcttgtaggtagtagcatcttttaaagttattcgtcacattttcgtttatgtccgaattgacaagatcttttaaagatcttttaaagacatgttccttgtttgttgtttgttcg

SEQ ID NO: 1169 - protein, 109 aa, Arabidopsis thaliana
  peptide (1)..(109): Ceres Seq. ID no. 12334212
  misc_feature (27)..(106): Pfam Name: Pfam Description:  LSM domain
  misc_feature (1)..(109): NCBI GI NO: 18407411 NR Description: putative small nuclear ribonucleoprotein D2
  misc_feature (1)..(109): NCBI GI NO: 30690747 NR Description: small nuclear ribonucleo protein D2 -related
  misc_feature (5)..(109): NCBI GI NO: 21554692 NR Description: small nuclear ribonucleoprotein-like protein
  misc_feature (1)..(108): NCBI GI NO: 4759158 NR Description: small nuclear ribonucleoprotein polypeptide D2
  misc_feature (1)..(108): NCBI GI NO: 26337731 NR Description: unnamed protein product [Mus musculus]
  misc_feature (3)..(108): NCBI GI NO: 21357623 NR Description: CG1249-PA [Drosophila melanogaster]
  misc_feature (1)..(108): NCBI GI NO: 22203734 NR Description: small nuclear ribonucleoprotein D2-like protein
  misc_feature (1)..(108): NCBI GI NO: 27677236 NR Description: similar to Small nuclear ribonucleoprotein Sm D2
  misc_feature (2)..(108): NCBI GI NO: 39592141 NR Description: Hypothetical protein CBG23345
  misc_feature (1)..(81): NCBI GI NO: 14596019 NR Description: small nuclear ribonucleoprotein-like protein
MSKPMEEDTNQGKTEEEEFNTGPLSVLMMSVKNNTQVLINCRNNRKLLGRVRAFDRHCNMVLENVREMWTEVPKTGKGKKKALPVNRDRFISKMFLRGDSVIIVLRNPK

SEQ ID NO: 1170 - protein, 105 aa, Arabidopsis thaliana
  peptide (1)..(105): Ceres Seq. ID no. 12334213
  misc_feature (23)..(102): Pfam Name: Pfam Description:  LSM domain
  misc_feature (1)..(105): NCBI GI NO: 18407411 NR Description: putative small nuclear ribonucleoprotein D2
  misc_feature (1)..(105): NCBI GI NO: 30690747 NR Description: small nuclear ribonucleo protein D2 -related
  misc_feature (1)..(105): NCBI GI NO: 21554692 NR Description: small nuclear ribonucleoprotein-like protein
  misc_feature (1)..(104): NCBI GI NO: 4759158 NR Description: small nuclear ribonucleoprotein polypeptide D2
  misc_feature (1)..(104): NCBI GI NO: 26337731 NR Description: unnamed protein product [Mus musculus]
  misc_feature (1)..(104): NCBI GI NO: 21357623 NR Description: CG1249-PA [Drosophila melanogaster]
  misc_feature (1)..(104): NCBI GI NO: 22203734 NR Description: small nuclear ribonucleoprotein D2-like protein
  misc_feature (1)..(104): NCBI GI NO: 27677236 NR Description: similar to Small nuclear ribonucleoprotein Sm D2
  misc_feature (1)..(104): NCBI GI NO: 39592141 NR Description: Hypothetical protein CBG23345
  misc_feature (1)..(77): NCBI GI NO: 14596019 NR Description: small nuclear ribonucleoprotein-like protein
MEEDTNQGKTEEEEFNTGPLSVLMMSVKNNTQVLINCRNNRKLLGRVRAFDRHCNMVLENVREMWTEVPKTGKGKKKALPVNRDRFISKMFLRGDSVIIVLRNPK

SEQ ID NO: 1171 - protein, 82 aa, Arabidopsis thaliana
  peptide (1)..(82): Ceres Seq. ID no. 12334214
  misc_feature (1)..(79): Pfam Name: Pfam Description:  LSM domain
  misc_feature (1)..(82): NCBI GI NO: 18407411 NR Description: putative small nuclear ribonucleoprotein D2
  misc_feature (1)..(82): NCBI GI NO: 30690747 NR Description: small nuclear ribonucleo protein D2 -related
  misc_feature (1)..(82): NCBI GI NO: 21554692 NR Description: small nuclear ribonucleoprotein-like protein
  misc_feature (1)..(81): NCBI GI NO: 4759158 NR Description: small nuclear ribonucleoprotein polypeptide D2
  misc_feature (1)..(81): NCBI GI NO: 26337731 NR Description: unnamed protein product [Mus musculus]
  misc_feature (1)..(81): NCBI GI NO: 21357623 NR Description: CG1249-PA [Drosophila melanogaster]
  misc_feature (1)..(81): NCBI GI NO: 22203734 NR Description: small nuclear ribonucleoprotein D2-like protein
  misc_feature (1)..(81): NCBI GI NO: 27677236 NR Description: similar to Small nuclear ribonucleoprotein Sm D2
  misc_feature (1)..(81): NCBI GI NO: 39592141 NR Description: Hypothetical protein CBG23345
  misc_feature (1)..(54): NCBI GI NO: 14596019 NR Description: small nuclear ribonucleoprotein-like protein
MMSVKNNTQVLINCRNNRKLLGRVRAFDRHCNMVLENVREMWTEVPKTGKGKKKALPVNRDRFISKMFLRGDSVIIVLRNPK

SEQ ID NO: 1172 - DNA, 1282 bp, Arabidopsis thaliana
  misc_feature (1)..(1282): Ceres Seq. ID no. 13490127
agatcaaccaaaggaagcgaagaagaagaagactttatacactctcgacgctattgatttcgtctgtgcagttttgtttctctatcagttagttttaaagatgagttcttcagagagtgtggaaaacgagtgcatgtgttgggctgcaagagatccatctggtcttctttctcctcatactatcactcgcaggtctgttacaactgacgatgtttcactcacaatcactcattgtggagtgtgttacgctgatgttatctggagtagaaaccaacatggagactccaagtaccctttggttcctgggcatgagattgctggaatagtgactaaggttgggcctaatgttcaacgattcaaagttggagaccatgttggtgttggaacgtatgttaactcctgcagggagtgtgaatattgtaatgaaggacaagaagttaattgtgcgaaaggagtttttactttcaatggcattgatcatgatggctctgttactaaaggaggctactctagtcacattgttgttcatgaaaggtactgctacaagatacctgtggactatcccttggaatcagctgcaccattactctgtgctggaatcacggtttatgctcctatgatgcgtcacaatatgaatcaacctggtaaatctcttggggtgatcgggctaggtggtcttggacacatggcggttaagtttggcaaggcttttggacttagtgttacggtttttagcaccagcatttccaagaaagaagaagctttgaatctgctaggagctgagaatttcgttatctcatctgaccatgaccagatgaaggcactagagaaatctctagactttctagttgacacagcatctggtgatcacgcgtttgatccttacatgtctctcttgaagattgctggaacttatgtattggttggtttcccaagtgaaattaaaatcagtcctgccaatctcaatcttggtatgagaatgctcgctggaagtgtaaccggggggaccaaaataacacagcaaatgttagatttctgtgcagctcataagatttatccaaacatagaggtgattcccattcaaaagataaacgaagctctcgaaagagtggtgaagaaggacatcaagtaccgtttcgtgattgacatcaagaactccctcaaatagatgttgctcaaaggaaggaataatggagtctgtaataagagaataatactcactgctacaatctttattacgtattttctcgtttttcattagtaaagcaaataaattaagact

SEQ ID NO: 1173 - protein, 388 aa, Arabidopsis thaliana
  peptide (1)..(388): Ceres Seq. ID no. 13490128
  misc_feature (34)..(388): NCBI GI NO: 15218564 NR Description: cinnamyl-alcohol dehydrogenase (CAD), putative
  misc_feature (36)..(388): NCBI GI NO: 37532016 NR Description: putative cinnamyl alcohol dehydrogenase
  misc_feature (32)..(387): NCBI GI NO: 22475166 NR Description: putative sinapyl alcohol dehydrogenase
  misc_feature (47)..(387): NCBI GI NO: 3913193 NR Description: Probable mannitol dehydrogenase 1
  misc_feature (47)..(386): NCBI GI NO: 10720088 NR Description: Probable mannitol dehydrogenase
  misc_feature (48)..(387): NCBI GI NO: 19849248 NR Description: cinnamyl alcohol dehydrogenase [Lolium perenne]
  misc_feature (34)..(386): NCBI GI NO: 10719915 NR Description: Cinnamyl-alcohol dehydrogenase 2 (CAD 2)
  misc_feature (34)..(386): NCBI GI NO: 584872 NR Description: Cinnamyl-alcohol dehydrogenase 7/8 (CAD 7/8)
  misc_feature (47)..(388): NCBI GI NO: 38344562 NR Description: OSJNBa0065B15.8
  misc_feature (34)..(388): NCBI GI NO: 33519154 NR Description: 10-hydroxygeraniol oxidoreductase
DQPKEAKKKKTLYTLDAIDFVCAVLFLYQLVLKMSSSESVENECMCWAARDPSGLLSPHTITRRSVTTDDVSLTITHCGVCYADVIWSRNQHGDSKYPLVPGHEIAGIVTKVGPNVQRFKVGDHVGVGTYVNSCRECEYCNEGQEVNCAKGVFTFNGIDHDGSVTKGGYSSHIVVHERYCYKIPVDYPLESAAPLLCAGITVYAPMMRHNMNQPGKSLGVIGLGGLGHMAVKFGKAFGLSVTVFSTSISKKEEALNLLGAENFVISSDHDQMKALEKSLDFLVDTASGDHAFDPYMSLLKIAGTYVLVGFPSEIKISPANLNLGMRMLAGSVTGGTKITQQMLDFCAAHKIYPNIEVIPIQKINEALERVVKKDIKYRFVIDIKNSLK

SEQ ID NO: 1174 - protein, 355 aa, Arabidopsis thaliana
  peptide (1)..(355): Ceres Seq. ID no. 13490129
  misc_feature (1)..(355): NCBI GI NO: 15218564 NR Description: cinnamyl-alcohol dehydrogenase (CAD), putative
  misc_feature (3)..(355): NCBI GI NO: 37532016 NR Description: putative cinnamyl alcohol dehydrogenase
  misc_feature (1)..(354): NCBI GI NO: 22475166 NR Description: putative sinapyl alcohol dehydrogenase
  misc_feature (14)..(354): NCBI GI NO: 3913193 NR Description: Probable mannitol dehydrogenase 1
  misc_feature (14)..(353): NCBI GI NO: 10720088 NR Description: Probable mannitol dehydrogenase
  misc_feature (15)..(354): NCBI GI NO: 19849248 NR Description: cinnamyl alcohol dehydrogenase [Lolium perenne]
  misc_feature (1)..(353): NCBI GI NO: 10719915 NR Description: Cinnamyl-alcohol dehydrogenase 2 (CAD 2)
  misc_feature (1)..(353): NCBI GI NO: 584872 NR Description: Cinnamyl-alcohol dehydrogenase 7/8 (CAD 7/8)
  misc_feature (14)..(355): NCBI GI NO: 38344562 NR Description: OSJNBa0065B15.8
  misc_feature (1)..(355): NCBI GI NO: 33519154 NR Description: 10-hydroxygeraniol oxidoreductase
MSSSESVENECMCWAARDPSGLLSPHTITRRSVTTDDVSLTITHCGVCYADVIWSRNQHGDSKYPLVPGHEIAGIVTKVGPNVQRFKVGDHVGVGTYVNSCRECEYCNEGQEVNCAKGVFTFNGIDHDGSVTKGGYSSHIVVHERYCYKIPVDYPLESAAPLLCAGITVYAPMMRHNMNQPGKSLGVIGLGGLGHMAVKFGKAFGLSVTVFSTSISKKEEALNLLGAENFVISSDHDQMKALEKSLDFLVDTASGDHAFDPYMSLLKIAGTYVLVGFPSEIKISPANLNLGMRMLAGSVTGGTKITQQMLDFCAAHKIYPNIEVIPIQKINEALERVVKKDIKYRFVIDIKNSLK

SEQ ID NO: 1175 - protein, 344 aa, Arabidopsis thaliana
  peptide (1)..(344): Ceres Seq. ID no. 13490130
  misc_feature (1)..(344): NCBI GI NO: 15218564 NR Description: cinnamyl-alcohol dehydrogenase (CAD), putative
  misc_feature (1)..(344): NCBI GI NO: 37532016 NR Description: putative cinnamyl alcohol dehydrogenase
  misc_feature (1)..(343): NCBI GI NO: 22475166 NR Description: putative sinapyl alcohol dehydrogenase
  misc_feature (3)..(343): NCBI GI NO: 3913193 NR Description: Probable mannitol dehydrogenase 1
  misc_feature (3)..(342): NCBI GI NO: 10720088 NR Description: Probable mannitol dehydrogenase
  misc_feature (4)..(343): NCBI GI NO: 19849248 NR Description: cinnamyl alcohol dehydrogenase [Lolium perenne]
  misc_feature (1)..(342): NCBI GI NO: 10719915 NR Description: Cinnamyl-alcohol dehydrogenase 2 (CAD 2)
  misc_feature (1)..(342): NCBI GI NO: 584872 NR Description: Cinnamyl-alcohol dehydrogenase 7/8 (CAD 7/8)
  misc_feature (3)..(344): NCBI GI NO: 38344562 NR Description: OSJNBa0065B15.8
  misc_feature (1)..(344): NCBI GI NO: 33519154 NR Description: 10-hydroxygeraniol oxidoreductase
MCWAARDPSGLLSPHTITRRSVTTDDVSLTITHCGVCYADVIWSRNQHGDSKYPLVPGHEIAGIVTKVGPNVQRFKVGDHVGVGTYVNSCRECEYCNEGQEVNCAKGVFTFNGIDHDGSVTKGGYSSHIVVHERYCYKIPVDYPLESAAPLLCAGITVYAPMMRHNMNQPGKSLGVIGLGGLGHMAVKFGKAFGLSVTVFSTSISKKEEALNLLGAENFVISSDHDQMKALEKSLDFLVDTASGDHAFDPYMSLLKIAGTYVLVGFPSEIKISPANLNLGMRMLAGSVTGGTKITQQMLDFCAAHKIYPNIEVIPIQKINEALERVVKKDIKYRFVIDIKNSLK

SEQ ID NO: 1176 - DNA, 952 bp, Arabidopsis thaliana
  misc_feature (1)..(952): Ceres Seq. ID no. 12334005
ctgaagaacgaagaaccgtctctaaaactccgacgaacgaaaaatgaagtcattagcttcgccgccgtgtctccgcctgataccgacggcacaccgtcagctcaattcgcgtcaatcttcctccgcctgttatatacacggtggctcttctgtgaacaaatccaataatctctcattctcctcatccacatccggatttgcgtcaccactagctgtagagaaggaattacgctcttcattcgtacagacggctgctgttcgccatgttacggggtctcttatcagaggcgaaggtcttagattcgccatcgtggtagctcgtttcaatgaggttgtgactaagttgcttttggaaggagcgattgagactttcaagaagtattcagtcagagaagaagacattgaagttatttgggttcctggcagctttgaaattggtgttgttgcacaaaatcttgggaaatcgggaaaatttcatgctgttttatgtatcggcgctgtgataagaggagataccacacattatgatgctgttgccaactctgctgcgtctggagtactttctgctagcataaattcaggcgttccatgcatatttggtgtactgacttgcgaggacatggatcaggctctgaatcgatctggtggcaaagccggcaataagggagctgaaactgctttgacggcgctcgaaatggcgtcgttgtttgagcaccacctgaaatagctcggctcgttcgatggatgaacatgatcacgtatgagaacctcttgatgttgtcccatttggttacaatccagtctctgaaattgtttgtacctcaaagattgtcaaaatgttttacccttggttacaaaatcatttaaacgcttttgtaagcttctggccttgttttttttttttgaatcgtatgataataataattcctccgaattttgggggtctttctgt

SEQ ID NO: 1177 - protein, 227 aa, Arabidopsis thaliana
  peptide (1)..(227): Ceres Seq. ID no. 12334006
  misc_feature (82)..(225): Pfam Name: Pfam Description:  6,7-dimethyl-8-ribityllumazine synthase
  misc_feature (1)..(227): NCBI GI NO: 15224809 NR Description: 6,7-dimethyl-8-ribityllumazine synthase precursor
  misc_feature (19)..(227): NCBI GI NO: 5532608 NR Description: 6,7-dimethyl-8-ribityllumazine synthase precursor
  misc_feature (5)..(227): NCBI GI NO: 20139859 NR Description: 6
  misc_feature (25)..(226): NCBI GI NO: 38345388 NR Description: OSJNBa0067K08.17
  misc_feature (72)..(227): NCBI GI NO: 9954974 NR Description: Chain A
  misc_feature (75)..(223): NCBI GI NO: 33152277 NR Description: 6,7-dimethyl-8-ribityllumazine synthase
  misc_feature (75)..(223): NCBI GI NO: 1710405 NR Description: 6,7-dimethyl-8-ribityllumazine synthase
  misc_feature (77)..(224): NCBI GI NO: 21402167 NR Description: DMRL_synthase
  misc_feature (72)..(224): NCBI GI NO: 18309551 NR Description: riboflavin synthase beta subunit
  misc_feature (71)..(223): NCBI GI NO: 23020138 NR Description: hypothetical protein
MKSLASPPCLRLIPTAHRQLNSRQSSSACYIHGGSSVNKSNNLSFSSSTSGFASPLAVEKELRSSFVQTAAVRHVTGSLIRGEGLRFAIVVARFNEVVTKLLLEGAIETFKKYSVREEDIEVIWVPGSFEIGVVAQNLGKSGKFHAVLCIGAVIRGDTTHYDAVANSAASGVLSASINSGVPCIFGVLTCEDMDQALNRSGGKAGNKGAETALTALEMASLFEHHLK

SEQ ID NO: 1178 - DNA, 611 bp, Arabidopsis thaliana
  misc_feature (1)..(611): Ceres Seq. ID no. 12393243
aacaacacaacttcagctttaagacagctaaaactaaatacaaagaaacagagatgggtttggttacagaggaggtgagagctaaggcagagatgtacaccggagatgagatatgtagagagaagacaaagtgtttcctcaaggaaatatctatgcccaatggtttattaccattgaaggatatagaagaggttgggtatgacagagagtcaggtgttgtatggctgaagcagaagaagagcatcactcacaagttcacagagatagataagcttgtctcctatggaaccgaagtcacagcttttatagtcccagaagaacctccaaggaggaacctgccaaagaggaacctgccaaggagaagagcagcgaagccaccgaggccaaggaggctgttgcaatcaaggaggctgtcgcagtcaaagaggcggcctaatcagctcagcttcagcagataaaagagacccgaatttttaagtgtacttcaagaatttgaacaaatcatggagagttagtgtttctcactgctctaactatcatgtattatctacctaccacttgttgctgcttgttttacctgtaataagatatcaatatcatcctgttccacc

SEQ ID NO: 1179 - protein, 151 aa, Arabidopsis thaliana
  peptide (1)..(151): Ceres Seq. ID no. 12393244
  misc_feature (20)..(102): Pfam Name: Pfam Description:  Protein of unknown function, DUF538
  misc_feature (18)..(102): NCBI GI NO: 18391006 NR Description: expressed protein; protein id: At1g09310
  misc_feature (18)..(100): NCBI GI NO: 18405887 NR Description: expressed protein; protein id: At1g56580
  misc_feature (23)..(102): NCBI GI NO: 34915410 NR Description: hypothetical protein~similar to Arabidopsis thalianachromosome1
  misc_feature (23)..(102): NCBI GI NO: 34903866 NR Description: unnamed protein product
  misc_feature (23)..(102): NCBI GI NO: 34915426 NR Description: hypothetical protein~similar to Arabidopsis thalianachromosome1
  misc_feature (23)..(102): NCBI GI NO: 34915378 NR Description: hypothetical protein~similar to Oryza sativa chromosome 7
  misc_feature (23)..(102): NCBI GI NO: 34915416 NR Description: hypothetical protein~similar to Arabidopsis thalianachromosome1
  misc_feature (23)..(102): NCBI GI NO: 34915422 NR Description: hypothetical protein~similar to Arabidopsis thalianachromosome1
  misc_feature (23)..(101): NCBI GI NO: 33146557 NR Description: unknown protein
  misc_feature (23)..(102): NCBI GI NO: 34915376 NR Description: hypothetical protein~similar to Oryza sativa chromosome 7
QHNFSFKTAKTKYKETEMGLVTEEVRAKAEMYTGDEICREKTKCFLKEISMPNGLLPLKDIEEVGYDRESGVVWLKQKKSITHKFTEIDKLVSYGTEVTAFIVPEEPPRRNLPKRNLPRRRAAKPPRPRRLLQSRRLSQSKRRPNQLSFSR

SEQ ID NO: 1180 - protein, 134 aa, Arabidopsis thaliana
  peptide (1)..(134): Ceres Seq. ID no. 12393245
  misc_feature (3)..(85): Pfam Name: Pfam Description:  Protein of unknown function, DUF538
  misc_feature (1)..(85): NCBI GI NO: 18391006 NR Description: expressed protein; protein id: At1g09310
  misc_feature (1)..(83): NCBI GI NO: 18405887 NR Description: expressed protein; protein id: At1g56580
  misc_feature (6)..(85): NCBI GI NO: 34915410 NR Description: hypothetical protein~similar to Arabidopsis thalianachromosome1
  misc_feature (6)..(85): NCBI GI NO: 34903866 NR Description: unnamed protein product
  misc_feature (6)..(85): NCBI GI NO: 34915426 NR Description: hypothetical protein~similar to Arabidopsis thalianachromosome1
  misc_feature (6)..(85): NCBI GI NO: 34915378 NR Description: hypothetical protein~similar to Oryza sativa chromosome 7
  misc_feature (6)..(85): NCBI GI NO: 34915416 NR Description: hypothetical protein~similar to Arabidopsis thalianachromosome1
  misc_feature (6)..(85): NCBI GI NO: 34915422 NR Description: hypothetical protein~similar to Arabidopsis thalianachromosome1
  misc_feature (6)..(84): NCBI GI NO: 33146557 NR Description: unknown protein
  misc_feature (6)..(85): NCBI GI NO: 34915376 NR Description: hypothetical protein~similar to Oryza sativa chromosome 7
MGLVTEEVRAKAEMYTGDEICREKTKCFLKEISMPNGLLPLKDIEEVGYDRESGVVWLKQKKSITHKFTEIDKLVSYGTEVTAFIVPEEPPRRNLPKRNLPRRRAAKPPRPRRLLQSRRLSQSKRRPNQLSFSR

SEQ ID NO: 1181 - protein, 121 aa, Arabidopsis thaliana
  peptide (1)..(121): Ceres Seq. ID no. 12393246
  misc_feature (1)..(72): Pfam Name: Pfam Description:  Protein of unknown function, DUF538
  misc_feature (1)..(72): NCBI GI NO: 18391006 NR Description: expressed protein; protein id: At1g09310
  misc_feature (1)..(70): NCBI GI NO: 18405887 NR Description: expressed protein; protein id: At1g56580
  misc_feature (1)..(72): NCBI GI NO: 34915410 NR Description: hypothetical protein~similar to Arabidopsis thalianachromosome1
  misc_feature (1)..(72): NCBI GI NO: 34903866 NR Description: unnamed protein product
  misc_feature (1)..(72): NCBI GI NO: 34915426 NR Description: hypothetical protein~similar to Arabidopsis thalianachromosome1
  misc_feature (1)..(72): NCBI GI NO: 34915378 NR Description: hypothetical protein~similar to Oryza sativa chromosome 7
  misc_feature (1)..(72): NCBI GI NO: 34915416 NR Description: hypothetical protein~similar to Arabidopsis thalianachromosome1
  misc_feature (1)..(72): NCBI GI NO: 34915422 NR Description: hypothetical protein~similar to Arabidopsis thalianachromosome1
  misc_feature (1)..(71): NCBI GI NO: 33146557 NR Description: unknown protein
  misc_feature (1)..(72): NCBI GI NO: 34915376 NR Description: hypothetical protein~similar to Oryza sativa chromosome 7
MYTGDEICREKTKCFLKEISMPNGLLPLKDIEEVGYDRESGVVWLKQKKSITHKFTEIDKLVSYGTEVTAFIVPEEPPRRNLPKRNLPRRRAAKPPRPRRLLQSRRLSQSKRRPNQLSFSR

SEQ ID NO: 1182 - DNA, 768 bp, Arabidopsis thaliana
  misc_feature (1)..(768): Ceres Seq. ID no. 12738418
aatcttagggtttcgcgagatctcactctcactgagatagcttagcaatggagcagtcagaagagggtcaacagcaacagcaacagggagtgatggattatgtacctcctcatgcttatcagagtgggccagtaaatgcagcttcccatatggcattccaacaagctcaccacttccaccaccaccatcagcagcaacaacagaagcagcttcagatgttctgggctaaccaaatgcaagagatcgagcataccactgatttcaagaaccacacccttcccctagcccgcatcaagaagatcatgaaagctgatgaagatgtgaggatgatctctgcggaggctcctgtgatttttgccaaggcctgtgagatgttcattttggagctcactctacgtgcttggatccacaccgaggagaacaagaggaggaccttgcagaagaacgacatcgccgctgccatttccaggaccgacgttgatttccttgtggacataatcccgagggacgagctgaaagaagaaggtttaggcgtgaccaaagggaccataccatcggtggtgggttccccgccatactattacttgcaacaacaggggatgatgcaacactggccccaggagcaacaccctgatgagtcttaaaacttttcccctttcgtttgtttggttgtatcgtagtaaggtagctctgctctgctgggaaccatttctattgtgttctgtaatgacatagtagtatatccccagtctatatctatggcaatgc

SEQ ID NO: 1183 - protein, 198 aa, Arabidopsis thaliana
  peptide (1)..(198): Ceres Seq. ID no. 12738419
  misc_feature (1)..(198): NCBI GI NO: 21554704 NR Description: transcription factor, putative
  misc_feature (1)..(198): NCBI GI NO: 15223482 NR Description: transcription factor, putative
  misc_feature (63)..(198): NCBI GI NO: 25404100 NR Description: transcription factor
  misc_feature (63)..(192): NCBI GI NO: 2398533 NR Description: Transcription factor [Arabidopsis thaliana]
  misc_feature (1)..(180): NCBI GI NO: 15223986 NR Description: putative transcription factor
  misc_feature (1)..(180): NCBI GI NO: 6289057 NR Description: heme activated protein [Arabidopsis thaliana]
  misc_feature (38)..(180): NCBI GI NO: 25372763 NR Description: hypothetical protein
  misc_feature (9)..(180): NCBI GI NO: 15221912 NR Description: heme activated protein, putative
  misc_feature (20)..(179): NCBI GI NO: 15228405 NR Description: transcription factor Hap5a; protein id: At3g48590
  misc_feature (1)..(179): NCBI GI NO: 15242784 NR Description: transcription factor Hap5a-like protein
MEQSEEGQQQQQQGVMDYVPPHAYQSGPVNAASHMAFQQAHHFHHHHQQQQQKQLQMFWANQMQEIEHTTDFKNHTLPLARIKKIMKADEDVRMISAEAPVIFAKACEMFILELTLRAWIHTEENKRRTLQKNDIAAAISRTDVDFLVDIIPRDELKEEGLGVTKGTIPSVVGSPPYYYLQQQGMMQHWPQEQHPDES

SEQ ID NO: 1184 - protein, 183 aa, Arabidopsis thaliana
  peptide (1)..(183): Ceres Seq. ID no. 12738420
  misc_feature (1)..(183): NCBI GI NO: 21554704 NR Description: transcription factor, putative
  misc_feature (1)..(183): NCBI GI NO: 15223482 NR Description: transcription factor, putative
  misc_feature (48)..(183): NCBI GI NO: 25404100 NR Description: transcription factor
  misc_feature (48)..(177): NCBI GI NO: 2398533 NR Description: Transcription factor [Arabidopsis thaliana]
  misc_feature (1)..(165): NCBI GI NO: 15223986 NR Description: putative transcription factor
  misc_feature (1)..(165): NCBI GI NO: 6289057 NR Description: heme activated protein [Arabidopsis thaliana]
  misc_feature (23)..(165): NCBI GI NO: 25372763 NR Description: hypothetical protein
  misc_feature (1)..(165): NCBI GI NO: 15221912 NR Description: heme activated protein, putative
  misc_feature (5)..(164): NCBI GI NO: 15228405 NR Description: transcription factor Hap5a; protein id: At3g48590
  misc_feature (1)..(164): NCBI GI NO: 15242784 NR Description: transcription factor Hap5a-like protein
MDYVPPHAYQSGPVNAASHMAFQQAHHFHHHHQQQQQKQLQMFWANQMQEIEHTTDFKNHTLPLARIKKIMKADEDVRMISAEAPVIFAKACEMFILELTLRAWIHTEENKRRTLQKNDIAAAISRTDVDFLVDIIPRDELKEEGLGVTKGTIPSVVGSPPYYYLQQQGMMQHWPQEQHPDES

SEQ ID NO: 1185 - protein, 164 aa, Arabidopsis thaliana
  peptide (1)..(164): Ceres Seq. ID no. 12738421
  misc_feature (1)..(164): NCBI GI NO: 21554704 NR Description: transcription factor, putative
  misc_feature (1)..(164): NCBI GI NO: 15223482 NR Description: transcription factor, putative
  misc_feature (29)..(164): NCBI GI NO: 25404100 NR Description: transcription factor
  misc_feature (29)..(158): NCBI GI NO: 2398533 NR Description: Transcription factor [Arabidopsis thaliana]
  misc_feature (1)..(146): NCBI GI NO: 15223986 NR Description: putative transcription factor
  misc_feature (1)..(146): NCBI GI NO: 6289057 NR Description: heme activated protein [Arabidopsis thaliana]
  misc_feature (4)..(146): NCBI GI NO: 25372763 NR Description: hypothetical protein
  misc_feature (1)..(146): NCBI GI NO: 15221912 NR Description: heme activated protein, putative
  misc_feature (1)..(145): NCBI GI NO: 15228405 NR Description: transcription factor Hap5a; protein id: At3g48590
  misc_feature (1)..(145): NCBI GI NO: 15242784 NR Description: transcription factor Hap5a-like protein
MAFQQAHHFHHHHQQQQQKQLQMFWANQMQEIEHTTDFKNHTLPLARIKKIMKADEDVRMISAEAPVIFAKACEMFILELTLRAWIHTEENKRRTLQKNDIAAAISRTDVDFLVDIIPRDELKEEGLGVTKGTIPSVVGSPPYYYLQQQGMMQHWPQEQHPDES

SEQ ID NO: 1186 - DNA, 600 bp, Arabidopsis thaliana
  misc_feature (1)..(600): Ceres Seq. ID no. 12323078
aaaaacattagaagaagaaatagaaatgagagctctcttgtgctcacaccgtttactaccattatcatctctctcaagaacaaccgtcaaaaccaaatctcacaatccaaaaaccctatatcctaacaacaaaccaagatgggaatccaagctccacgctggacctaaagggtttcaatcttctagaacctctgaaaaacccggccggccagacccggacccggaagacgatcccccgatacctcaagaagtgttcgagaggatgatggggaggattgtggtgtctgtgggaacaccactgggcttgggagtggcgatcttgaaagtactcgaagttttgaaggatagaaacgtctgggacgtgcctttgtgggttccatacttgaccacactcgtgacctttggttcgtcggctcttgggattgcgtacggaagcttgtccacaaacctggacccggccaagactaactctctttttggactcaaagaggcaaaggagaattgggtagagatgtggaaagaggaccaataatggtaatgtattaatgataataatcttgatttttctttgggaaagtctcataaaaacttttaagctgg

SEQ ID NO: 1187 - protein, 176 aa, Arabidopsis thaliana
  peptide (1)..(176): Ceres Seq. ID no. 12323079
  misc_feature (9)..(176): NCBI GI NO: 15237263 NR Description: putative protein; protein id: At5g52780
  misc_feature (25)..(175): NCBI GI NO: 37536396 NR Description: hypothetical protein
  misc_feature (10)..(173): NCBI GI NO: 7487141 NR Description: hypothetical protein T18B16
  misc_feature (41)..(174): NCBI GI NO: 23127194 NR Description: hypothetical protein [Nostoc punctiforme]
  misc_feature (41)..(174): NCBI GI NO: 17228243 NR Description: hypothetical protein [Nostoc sp. PCC 7120]
  misc_feature (33)..(174): NCBI GI NO: 23041124 NR Description: hypothetical protein
  misc_feature (67)..(167): NCBI GI NO: 37521309 NR Description: hypothetical protein glr1740
  misc_feature (59)..(176): NCBI GI NO: 16329473 NR Description: unknown protein [Synechocystis sp. PCC 6803]
  misc_feature (59)..(167): NCBI GI NO: 33862919 NR Description: conserved hypothetical protein
KTLEEEIEMRALLCSHRLLPLSSLSRTTVKTKSHNPKTLYPNNKPRWESKLHAGPKGFQSSRTSEKPGRPDPDPEDDPPIPQEVFERMMGRIVVSVGTPLGLGVAILKVLEVLKDRNVWDVPLWVPYLTTLVTFGSSALGIAYGSLSTNLDPAKTNSLFGLKEAKENWVEMWKEDQ

SEQ ID NO: 1188 - protein, 168 aa, Arabidopsis thaliana
  peptide (1)..(168): Ceres Seq. ID no. 12323080
  misc_feature (1)..(168): NCBI GI NO: 15237263 NR Description: putative protein; protein id: At5g52780
  misc_feature (17)..(167): NCBI GI NO: 37536396 NR Description: hypothetical protein
  misc_feature (2)..(165): NCBI GI NO: 7487141 NR Description: hypothetical protein T18B16
  misc_feature (33)..(166): NCBI GI NO: 23127194 NR Description: hypothetical protein [Nostoc punctiforme]
  misc_feature (33)..(166): NCBI GI NO: 17228243 NR Description: hypothetical protein [Nostoc sp. PCC 7120]
  misc_feature (25)..(166): NCBI GI NO: 23041124 NR Description: hypothetical protein
  misc_feature (59)..(159): NCBI GI NO: 37521309 NR Description: hypothetical protein glr1740
  misc_feature (51)..(168): NCBI GI NO: 16329473 NR Description: unknown protein [Synechocystis sp. PCC 6803]
  misc_feature (51)..(159): NCBI GI NO: 33862919 NR Description: conserved hypothetical protein
MRALLCSHRLLPLSSLSRTTVKTKSHNPKTLYPNNKPRWESKLHAGPKGFQSSRTSEKPGRPDPDPEDDPPIPQEVFERMMGRIVVSVGTPLGLGVAILKVLEVLKDRNVWDVPLWVPYLTTLVTFGSSALGIAYGSLSTNLDPAKTNSLFGLKEAKENWVEMWKEDQ

SEQ ID NO: 1189 - protein, 89 aa, Arabidopsis thaliana
  peptide (1)..(89): Ceres Seq. ID no. 12323081
  misc_feature (1)..(89): NCBI GI NO: 15237263 NR Description: putative protein; protein id: At5g52780
  misc_feature (1)..(88): NCBI GI NO: 37536396 NR Description: hypothetical protein
  misc_feature (1)..(86): NCBI GI NO: 7487141 NR Description: hypothetical protein T18B16
  misc_feature (1)..(87): NCBI GI NO: 23127194 NR Description: hypothetical protein [Nostoc punctiforme]
  misc_feature (1)..(87): NCBI GI NO: 17228243 NR Description: hypothetical protein [Nostoc sp. PCC 7120]
  misc_feature (1)..(87): NCBI GI NO: 23041124 NR Description: hypothetical protein
  misc_feature (1)..(80): NCBI GI NO: 37521309 NR Description: hypothetical protein glr1740
  misc_feature (1)..(89): NCBI GI NO: 16329473 NR Description: unknown protein [Synechocystis sp. PCC 6803]
  misc_feature (1)..(80): NCBI GI NO: 33862919 NR Description: conserved hypothetical protein
MMGRIVVSVGTPLGLGVAILKVLEVLKDRNVWDVPLWVPYLTTLVTFGSSALGIAYGSLSTNLDPAKTNSLFGLKEAKENWVEMWKEDQ

SEQ ID NO: 1190 - DNA, 989 bp, Arabidopsis thaliana
  misc_feature (1)..(989): Ceres Seq. ID no. 12327130
aaaataatattcaaattcaaaatctgtccaaattcatctagggtttctgataaaacagacgaagaagatccaaattcgctaacaatgggaggtgaaggagaagatctagagccactttttgattatcgtcgtgttcagccagcgaatttcgtttgtatcgatgatgatgatgatgatgcctcggtgacgccaattccgaagaaagcgaaaacttcacaaacagttgagaagttagatgatgatgtgaaagtgattgaagttacgggtgatgacgattggttgcttcctccaccaaaggttatcttcgacaaaagtaaagactctgttgaagattcaactattaaagcattgaggtcgaagaagatggagctcatgtcatttacaaaaactgtaggagatgtgatgcaggaagttgaggagtctgctaaaagggaagttgaagaatctcgcaatccatcttcagagactgctgctcagttaccatcagagcctacgaatgacagggccaagattgttattacaatacaggacaaagatggacagaagacactccgggtgtttgcggacgagaaatttgagagggttatcaaactgtatacagataaagctaagcttgacccgcaaaatcttgtatttatttttgacggtgataagattgatccatcaaccactccttctgaacttggcatggaggatcatgatatgattgaagtgcacaccaaaaaaacttgacaaataggcgctaatcggaatctggaatgtcaaatctgttccatcttttgcgaaaaaccagagttttgtacatcaacatgggcatgggaagggatctctctgctaacatctggtgtttgtatctgtgacctttctcattttatcggaattttgtttctttctttctttcactctttctgtcactctttattaggcgtgtataatatataaggtaaaccaaaccattttgattttaactaatcctattgaatccaatc

SEQ ID NO: 1191 - protein, 243 aa, Arabidopsis thaliana
  peptide (1)..(243): Ceres Seq. ID no. 12327131
  misc_feature (171)..(243): Pfam Name: Pfam Description:  Ubiquitin family
  misc_feature (29)..(243): NCBI GI NO: 18408968 NR Description: Expressed protein; protein id: At1g68185
  misc_feature (53)..(238): NCBI GI NO: 34912494 NR Description: putative amino acid or GABA permease
KIIFKFKICPNSSRVSDKTDEEDPNSLTMGGEGEDLEPLFDYRRVQPANFVCIDDDDDDASVTPIPKKAKTSQTVEKLDDDVKVIEVTGDDDWLLPPPKVIFDKSKDSVEDSTIKALRSKKMELMSFTKTVGDVMQEVEESAKREVEESRNPSSETAAQLPSEPTNDRAKIVITIQDKDGQKTLRVFADEKFERVIKLYTDKAKLDPQNLVFIFDGDKIDPSTTPSELGMEDHDMIEVHTKKT

SEQ ID NO: 1192 - protein, 215 aa, Arabidopsis thaliana
  peptide (1)..(215): Ceres Seq. ID no. 12327132
  misc_feature (143)..(215): Pfam Name: Pfam Description:  Ubiquitin family
  misc_feature (1)..(215): NCBI GI NO: 18408968 NR Description: Expressed protein; protein id: At1g68185
  misc_feature (25)..(210): NCBI GI NO: 34912494 NR Description: putative amino acid or GABA permease
MGGEGEDLEPLFDYRRVQPANFVCIDDDDDDASVTPIPKKAKTSQTVEKLDDDVKVIEVTGDDDWLLPPPKVIFDKSKDSVEDSTIKALRSKKMELMSFTKTVGDVMQEVEESAKREVEESRNPSSETAAQLPSEPTNDRAKIVITIQDKDGQKTLRVFADEKFERVIKLYTDKAKLDPQNLVFIFDGDKIDPSTTPSELGMEDHDMIEVHTKKT

SEQ ID NO: 1193 - protein, 122 aa, Arabidopsis thaliana
  peptide (1)..(122): Ceres Seq. ID no. 12327133
  misc_feature (50)..(122): Pfam Name: Pfam Description:  Ubiquitin family
  misc_feature (1)..(122): NCBI GI NO: 18408968 NR Description: Expressed protein; protein id: At1g68185
  misc_feature (1)..(117): NCBI GI NO: 34912494 NR Description: putative amino acid or GABA permease
MELMSFTKTVGDVMQEVEESAKREVEESRNPSSETAAQLPSEPTNDRAKIVITIQDKDGQKTLRVFADEKFERVIKLYTDKAKLDPQNLVFIFDGDKIDPSTTPSELGMEDHDMIEVHTKKT

SEQ ID NO: 1194 - DNA, 1020 bp, Arabidopsis thaliana
  misc_feature (1)..(1020): Ceres Seq. ID no. 12562601
agagctaataagatccgattcggaagtttctttgacatcaaaacacaaacccggaaagcttcgtctgccatttttcattcttctaagccctagctcaaagctttctctctcaaatccgccatgactaaacagcacgcgaactggtctccttacgataacaatggaggaacatgtgtggccatcgctggatcggattactgtgttatcgccgccgatactcggatgtctactggttacagtattcttagtcgcgattactccaaaatccataaactagcggacagagctgttttgtcttcctctggcttccaggctgatgtgaaagctttgcagaaggttctcaaatccagacacttgatctatcaacatcagcataacaagcagatgagctgtcctgcaatggcccagcttctctccaacacgctttatttcaagcggtttttcccctactatgcctttaatgttctaggagggcttgacgaggaaggaaaagggtgtgtctttacttacgacgctgttggctcatacgagagagttggatacggtgctcaaggttctggttccacactcatcatgcctttccttgacaatcagctcaagtctccaagtcctcttttgctacctaaacaggattcaaacacgcccctttccgaagctgaagcagttgacttggttaaaactgttttcgcatctgccacagagagggatatctacactggagacaagcttgagattatgatacttaaggccgacggtatcaagaccgaactcatggacctgaggaaagactaagctcctttagtgcatttagccaaccttatcggtttgttatttcacttcaacatcgagcttcctgagttgtagaactcgtatgaaatgctactgggtttgatattttacagttaaaatcatgactcgtgtttgaagtttctccaaaactgtttccttatgtatgagaatcactcgaatccttgtcttaaatcaatgtttctctcactatttatggcaatgtttttacat

SEQ ID NO: 1195 - protein, 223 aa, Arabidopsis thaliana
  peptide (1)..(223): Ceres Seq. ID no. 12562602
  misc_feature (12)..(208): Pfam Name: Pfam Description:  Proteasome A-type and B-type
  misc_feature (1)..(223): NCBI GI NO: 600387 NR Description: proteosome subunit [Arabidopsis thaliana]
  misc_feature (1)..(223): NCBI GI NO: 15232965 NR Description: 20S proteasome beta subunit F1
  misc_feature (1)..(223): NCBI GI NO: 17380185 NR Description: Proteasome subunit beta type 1
  misc_feature (4)..(223): NCBI GI NO: 17380182 NR Description: Proteasome subunit beta type 1
  misc_feature (9)..(200): NCBI GI NO: 14594933 NR Description: putative beta6 proteasome subunit
  misc_feature (5)..(223): NCBI GI NO: 28829610 NR Description: similar to Petunia hybrida (Petunia)
  misc_feature (4)..(223): NCBI GI NO: 17380206 NR Description: Proteasome subunit beta type 1-B
  misc_feature (4)..(223): NCBI GI NO: 17380207 NR Description: Proteasome subunit beta type 1-A
  misc_feature (8)..(223): NCBI GI NO: 27694605 NR Description: Unknown (protein for MGC:52861) [Xenopus laevis]
  misc_feature (8)..(223): NCBI GI NO: 38174388 NR Description: Unknown (protein for MGC:75736)
MTKQHANWSPYDNNGGTCVAIAGSDYCVIAADTRMSTGYSILSRDYSKIHKLADRAVLSSSGFQADVKALQKVLKSRHLIYQHQHNKQMSCPAMAQLLSNTLYFKRFFPYYAFNVLGGLDEEGKGCVFTYDAVGSYERVGYGAQGSGSTLIMPFLDNQLKSPSPLLLPKQDSNTPLSEAEAVDLVKTVFASATERDIYTGDKLEIMILKADGIKTELMDLRKD

SEQ ID NO: 1196 - protein, 189 aa, Arabidopsis thaliana
  peptide (1)..(189): Ceres Seq. ID no. 12562603
  misc_feature (1)..(174): Pfam Name: Pfam Description:  Proteasome A-type and B-type
  misc_feature (1)..(189): NCBI GI NO: 600387 NR Description: proteosome subunit [Arabidopsis thaliana]
  misc_feature (1)..(189): NCBI GI NO: 15232965 NR Description: 20S proteasome beta subunit F1
  misc_feature (1)..(189): NCBI GI NO: 17380185 NR Description: Proteasome subunit beta type 1
  misc_feature (1)..(189): NCBI GI NO: 17380182 NR Description: Proteasome subunit beta type 1
  misc_feature (1)..(166): NCBI GI NO: 14594933 NR Description: putative beta6 proteasome subunit
  misc_feature (1)..(189): NCBI GI NO: 28829610 NR Description: similar to Petunia hybrida (Petunia)
  misc_feature (1)..(189): NCBI GI NO: 17380206 NR Description: Proteasome subunit beta type 1-B
  misc_feature (1)..(189): NCBI GI NO: 17380207 NR Description: Proteasome subunit beta type 1-A
  misc_feature (1)..(189): NCBI GI NO: 27694605 NR Description: Unknown (protein for MGC:52861) [Xenopus laevis]
  misc_feature (1)..(189): NCBI GI NO: 38174388 NR Description: Unknown (protein for MGC:75736)
MSTGYSILSRDYSKIHKLADRAVLSSSGFQADVKALQKVLKSRHLIYQHQHNKQMSCPAMAQLLSNTLYFKRFFPYYAFNVLGGLDEEGKGCVFTYDAVGSYERVGYGAQGSGSTLIMPFLDNQLKSPSPLLLPKQDSNTPLSEAEAVDLVKTVFASATERDIYTGDKLEIMILKADGIKTELMDLRKD

SEQ ID NO: 1197 - protein, 135 aa, Arabidopsis thaliana
  peptide (1)..(135): Ceres Seq. ID no. 12562604
  misc_feature (1)..(120): Pfam Name: Pfam Description:  Proteasome A-type and B-type
  misc_feature (1)..(135): NCBI GI NO: 600387 NR Description: proteosome subunit [Arabidopsis thaliana]
  misc_feature (1)..(135): NCBI GI NO: 15232965 NR Description: 20S proteasome beta subunit F1
  misc_feature (1)..(135): NCBI GI NO: 17380185 NR Description: Proteasome subunit beta type 1
  misc_feature (1)..(135): NCBI GI NO: 17380182 NR Description: Proteasome subunit beta type 1
  misc_feature (1)..(112): NCBI GI NO: 14594933 NR Description: putative beta6 proteasome subunit
  misc_feature (1)..(135): NCBI GI NO: 28829610 NR Description: similar to Petunia hybrida (Petunia)
  misc_feature (1)..(135): NCBI GI NO: 17380206 NR Description: Proteasome subunit beta type 1-B
  misc_feature (1)..(135): NCBI GI NO: 17380207 NR Description: Proteasome subunit beta type 1-A
  misc_feature (1)..(135): NCBI GI NO: 27694605 NR Description: Unknown (protein for MGC:52861) [Xenopus laevis]
  misc_feature (1)..(135): NCBI GI NO: 38174388 NR Description: Unknown (protein for MGC:75736)
MSCPAMAQLLSNTLYFKRFFPYYAFNVLGGLDEEGKGCVFTYDAVGSYERVGYGAQGSGSTLIMPFLDNQLKSPSPLLLPKQDSNTPLSEAEAVDLVKTVFASATERDIYTGDKLEIMILKADGIKTELMDLRKD

SEQ ID NO: 1198 - DNA, 749 bp, Arabidopsis thaliana
  misc_feature (1)..(749): Ceres Seq. ID no. 12340498
accaaccccctctcgcactctccgccaccttcttccctaattctctctctctcgctacctctctacgtgataaacaagaatggcgactgtacgaatctcctccactagcatgaccaaggccgttcttagaagccagacaaccaacaagctcattactaacaagagctacaacttatctgttggatcaacgaaaagggtttcgagatcttttggtttgaaatgctcagcgaattctggtggtgctacgatgtcggcggtatacaaggtcaagctcttaggacctgatggtcaagaagatgagtttgaggttcaagatgatcagtacatcttggatgcagctgaagaggcaggagttgacttgccttactcttgcagagccggtgcgtgttctacttgcgcgggtcagattgtgtccggcaacgttgaccagtcggatggttcgtttctcgaggatagccacttggagaagggttatgttttgacttgtgtggcttacccacagtctgactgtgtgatccatacccacaaggaaactgaactcttctaagtcaaagtctctctatttggtaatgatgaaaaaattgttatttgagtgatctttttagatattatggttatcagtttcgttctacggatttgtgtggttttaaaggtatgcatttgtatgaaaatgactcaagatatgccttttagtgttcatgaatcgtcaccgggtcgcaattggttaataaaatggttaagtttcaacc

SEQ ID NO: 1199 - protein, 155 aa, Arabidopsis thaliana
  peptide (1)..(155): Ceres Seq. ID no. 12340499
  misc_feature (66)..(142): Pfam Name: Pfam Description:  2Fe-2S iron-sulfur cluster binding domain
  misc_feature (1)..(155): NCBI GI NO: 15225888 NR Description: putative ferredoxin; protein id: At2g27510
  misc_feature (1)..(154): NCBI GI NO: 2129915 NR Description: ferredoxin
  misc_feature (58)..(155): NCBI GI NO: 119952 NR Description: Ferredoxin, root R-B2
  misc_feature (1)..(155): NCBI GI NO: 13182955 NR Description: ferredoxin [Impatiens balsamina]
  misc_feature (58)..(155): NCBI GI NO: 119934 NR Description: Ferredoxin, root R-B1
  misc_feature (1)..(155): NCBI GI NO: 40714664 NR Description: putative ferredoxin
  misc_feature (7)..(155): NCBI GI NO: 119958 NR Description: Ferredoxin III, chloroplast precursor (Fd III)
  misc_feature (1)..(155): NCBI GI NO: 6970498 NR Description: non-photosynthetic ferredoxin [Ipomoea nil]
  misc_feature (34)..(155): NCBI GI NO: 7430754 NR Description: ferredoxin [2Fe-2S], root - rice
  misc_feature (60)..(155): NCBI GI NO: 6688560 NR Description: putative ferredoxin [Lycopersicon esculentum]
MATVRISSTSMTKAVLRSQTTNKLITNKSYNLSVGSTKRVSRSFGLKCSANSGGATMSAVYKVKLLGPDGQEDEFEVQDDQYILDAAEEAGVDLPYSCRAGACSTCAGQIVSGNVDQSDGSFLEDSHLEKGYVLTCVAYPQSDCVIHTHKETELF

SEQ ID NO: 1200 - protein, 145 aa, Arabidopsis thaliana
  peptide (1)..(145): Ceres Seq. ID no. 12340500
  misc_feature (56)..(132): Pfam Name: Pfam Description:  2Fe-2S iron-sulfur cluster binding domain
  misc_feature (1)..(145): NCBI GI NO: 15225888 NR Description: putative ferredoxin; protein id: At2g27510
  misc_feature (1)..(144): NCBI GI NO: 2129915 NR Description: ferredoxin
  misc_feature (48)..(145): NCBI GI NO: 119952 NR Description: Ferredoxin, root R-B2
  misc_feature (1)..(145): NCBI GI NO: 13182955 NR Description: ferredoxin [Impatiens balsamina]
  misc_feature (48)..(145): NCBI GI NO: 119934 NR Description: Ferredoxin, root R-B1
  misc_feature (1)..(145): NCBI GI NO: 40714664 NR Description: putative ferredoxin
  misc_feature (1)..(145): NCBI GI NO: 119958 NR Description: Ferredoxin III, chloroplast precursor (Fd III)
  misc_feature (1)..(145): NCBI GI NO: 6970498 NR Description: non-photosynthetic ferredoxin [Ipomoea nil]
  misc_feature (24)..(145): NCBI GI NO: 7430754 NR Description: ferredoxin [2Fe-2S], root - rice
  misc_feature (50)..(145): NCBI GI NO: 6688560 NR Description: putative ferredoxin [Lycopersicon esculentum]
MTKAVLRSQTTNKLITNKSYNLSVGSTKRVSRSFGLKCSANSGGATMSAVYKVKLLGPDGQEDEFEVQDDQYILDAAEEAGVDLPYSCRAGACSTCAGQIVSGNVDQSDGSFLEDSHLEKGYVLTCVAYPQSDCVIHTHKETELF

SEQ ID NO: 1201 - protein, 99 aa, Arabidopsis thaliana
  peptide (1)..(99): Ceres Seq. ID no. 12340501
  misc_feature (10)..(86): Pfam Name: Pfam Description:  2Fe-2S iron-sulfur cluster binding domain
  misc_feature (1)..(99): NCBI GI NO: 15225888 NR Description: putative ferredoxin; protein id: At2g27510
  misc_feature (1)..(98): NCBI GI NO: 2129915 NR Description: ferredoxin
  misc_feature (2)..(99): NCBI GI NO: 119952 NR Description: Ferredoxin, root R-B2
  misc_feature (1)..(99): NCBI GI NO: 13182955 NR Description: ferredoxin [Impatiens balsamina]
  misc_feature (2)..(99): NCBI GI NO: 119934 NR Description: Ferredoxin, root R-B1
  misc_feature (1)..(99): NCBI GI NO: 40714664 NR Description: putative ferredoxin
  misc_feature (1)..(99): NCBI GI NO: 119958 NR Description: Ferredoxin III, chloroplast precursor (Fd III)
  misc_feature (1)..(99): NCBI GI NO: 6970498 NR Description: non-photosynthetic ferredoxin [Ipomoea nil]
  misc_feature (1)..(99): NCBI GI NO: 7430754 NR Description: ferredoxin [2Fe-2S], root - rice
  misc_feature (4)..(99): NCBI GI NO: 6688560 NR Description: putative ferredoxin [Lycopersicon esculentum]
MSAVYKVKLLGPDGQEDEFEVQDDQYILDAAEEAGVDLPYSCRAGACSTCAGQIVSGNVDQSDGSFLEDSHLEKGYVLTCVAYPQSDCVIHTHKETELF

SEQ ID NO: 1202 - DNA, 1613 bp, Arabidopsis thaliana
  misc_feature (1)..(1613): Ceres Seq. ID no. 12325334
aattctgggaggagagaggccgccggaggagagagaaaaagagttgggggattgctttttgatttctccttctccatcttcgacctcgagagaagctaaaaatggcagaagaagcggatacgaacatcgagatctggaagattaagaaactaatcaagggacttgaatcagctagaggtaatggaacgagtatgatctctcttattatgcctcctcgtgatcaagtatctcgtgtcacaaagatgcttggtgatgaatatggaactgcttcaaacattaagagtcgagtcaatcgtcaatctgttttgtctgccattacttctgctcaacaaaggttgaagctttacaacaaggttcctactaatggtcttgttctctataccggcaccattgttaatgatgacggtaaagagaagaaggtgacgtttgatttcgagccctttaggccgattaatgcttccttgtacctttgtgacaacaagttccatactgaggcattgaacgagcttcttgagtctgatgacaagtttggtttcattgttatggatggtaatgggacactgtttggaactttgagtgggaatactagagaggttcttcataagtttactgttgatctcccgaagaagcacggaagaggaggacagtctgcacttcgttttgcccgtcttaggatggagaagagacacaattatgttaggaaaaccgctgagcttgctacacagttttacatcaatccagctacgagtcagcctaatgtctctggtctgatccttgctggttcagctgatttcaaaactgagctcagtcaatcagagttgtttgatcctcgtcttcaagctaagatattgaatgttgttgatgtttcttacggaggtgaaaacggtttcaaccaagcgattgagctgtctgctgagattctatccaatgtgaagttcatacaggagaagaaactgattgggaagtactttgaggagataagtcaagataccgggaaatacgttttcggtgtggaggatactctaaaggctctagaaatgggtgctatcgaaacccttatcgtgtgggagaatctggacataaacaggtatgagctaaagaacagtacgacaggagaaatggtggtgaaacactttgggaaagatcaagagtctgatacaagcaacttccatgattcagagactaacgcggagctagaagtacaggagaagatgcctctactcgaatggtttgcaaatgagtacaaacgtttcggctgcactcttgagtttgtgactaacaaatcccaagaagggtcacagttttgcagaggttttggtgggattggtggtatgttacgttaccagcttgacatgaggacatttgatgagttatcagatactgaagtttacgaagattctgattaaagtgggaaaacttttggtgatggtttcagatcgatacagtgagggaaaatgtggcataaagatggtcttttatcaacaaagaagagagatttaagtttcttgttttctatagaacattaaaaagcttgactctttctttctgttagacaatttgtgttgtaatttttgaggattttaaacatctttttgttgttcttctggttttat

SEQ ID NO: 1203 - protein, 434 aa, Arabidopsis thaliana
  peptide (1)..(434): Ceres Seq. ID no. 12325335
  misc_feature (279)..(417): Pfam Name: Pfam Description:  eRF1 domain 3
  misc_feature (1)..(434): NCBI GI NO: 15222115 NR Description: eukaryotic peptide chain release factor subunit 1
  misc_feature (3)..(434): NCBI GI NO: 549010 NR Description: Eukaryotic peptide chain release factor subunit 1-3
  misc_feature (6)..(432): NCBI GI NO: 15238829 NR Description: eukaryotic release factor 1 homolog (gb|AAA91169
  misc_feature (6)..(432): NCBI GI NO: 1155261 NR Description: eukaryotic release factor 1 homolog
  misc_feature (6)..(432): NCBI GI NO: 15215863 NR Description: AT5g47880/MCA23_22 [Arabidopsis thaliana]
  misc_feature (48)..(434): NCBI GI NO: 22331351 NR Description: Eukaryotic peptide chain release factor subunit 1
  misc_feature (2)..(432): NCBI GI NO: 34907268 NR Description: putative peptide chain release factor subunit 1
  misc_feature (4)..(422): NCBI GI NO: 18250310 NR Description: eukaryotic release factor 1
  misc_feature (5)..(432): NCBI GI NO: 15213995 NR Description: Eukaryotic peptide chain release factor subunit 1
  misc_feature (1)..(432): NCBI GI NO: 21311419 NR Description: eukaryotic polypeptide releasing factor
MAEEADTNIEIWKIKKLIKGLESARGNGTSMISLIMPPRDQVSRVTKMLGDEYGTASNIKSRVNRQSVLSAITSAQQRLKLYNKVPTNGLVLYTGTIVNDDGKEKKVTFDFEPFRPINASLYLCDNKFHTEALNELLESDDKFGFIVMDGNGTLFGTLSGNTREVLHKFTVDLPKKHGRGGQSALRFARLRMEKRHNYVRKTAELATQFYINPATSQPNVSGLILAGSADFKTELSQSELFDPRLQAKILNVVDVSYGGENGFNQAIELSAEILSNVKFIQEKKLIGKYFEEISQDTGKYVFGVEDTLKALEMGAIETLIVWENLDINRYELKNSTTGEMVVKHFGKDQESDTSNFHDSETNAELEVQEKMPLLEWFANEYKRFGCTLEFVTNKSQEGSQFCRGFGGIGGMLRYQLDMRTFDELSDTEVYEDSD

SEQ ID NO: 1204 - protein, 404 aa, Arabidopsis thaliana
  peptide (1)..(404): Ceres Seq. ID no. 12325336
  misc_feature (249)..(387): Pfam Name: Pfam Description:  eRF1 domain 3
  misc_feature (1)..(404): NCBI GI NO: 15222115 NR Description: eukaryotic peptide chain release factor subunit 1
  misc_feature (1)..(404): NCBI GI NO: 549010 NR Description: Eukaryotic peptide chain release factor subunit 1-3
  misc_feature (1)..(402): NCBI GI NO: 15238829 NR Description: eukaryotic release factor 1 homolog (gb|AAA91169
  misc_feature (1)..(402): NCBI GI NO: 1155261 NR Description: eukaryotic release factor 1 homolog
  misc_feature (1)..(402): NCBI GI NO: 15215863 NR Description: AT5g47880/MCA23_22 [Arabidopsis thaliana]
  misc_feature (18)..(404): NCBI GI NO: 22331351 NR Description: Eukaryotic peptide chain release factor subunit 1
  misc_feature (1)..(402): NCBI GI NO: 34907268 NR Description: putative peptide chain release factor subunit 1
  misc_feature (1)..(392): NCBI GI NO: 18250310 NR Description: eukaryotic release factor 1
  misc_feature (1)..(402): NCBI GI NO: 15213995 NR Description: Eukaryotic peptide chain release factor subunit 1
  misc_feature (1)..(402): NCBI GI NO: 21311419 NR Description: eukaryotic polypeptide releasing factor
MISLIMPPRDQVSRVTKMLGDEYGTASNIKSRVNRQSVLSAITSAQQRLKLYNKVPTNGLVLYTGTIVNDDGKEKKVTFDFEPFRPINASLYLCDNKFHTEALNELLESDDKFGFIVMDGNGTLFGTLSGNTREVLHKFTVDLPKKHGRGGQSALRFARLRMEKRHNYVRKTAELATQFYINPATSQPNVSGLILAGSADFKTELSQSELFDPRLQAKILNVVDVSYGGENGFNQAIELSAEILSNVKFIQEKKLIGKYFEEISQDTGKYVFGVEDTLKALEMGAIETLIVWENLDINRYELKNSTTGEMVVKHFGKDQESDTSNFHDSETNAELEVQEKMPLLEWFANEYKRFGCTLEFVTNKSQEGSQFCRGFGGIGGMLRYQLDMRTFDELSDTEVYEDSD

SEQ ID NO: 1205 - protein, 399 aa, Arabidopsis thaliana
  peptide (1)..(399): Ceres Seq. ID no. 12325337
  misc_feature (244)..(382): Pfam Name: Pfam Description:  eRF1 domain 3
  misc_feature (1)..(399): NCBI GI NO: 15222115 NR Description: eukaryotic peptide chain release factor subunit 1
  misc_feature (1)..(399): NCBI GI NO: 549010 NR Description: Eukaryotic peptide chain release factor subunit 1-3
  misc_feature (1)..(397): NCBI GI NO: 15238829 NR Description: eukaryotic release factor 1 homolog (gb|AAA91169
  misc_feature (1)..(397): NCBI GI NO: 1155261 NR Description: eukaryotic release factor 1 homolog
  misc_feature (1)..(397): NCBI GI NO: 15215863 NR Description: AT5g47880/MCA23_22 [Arabidopsis thaliana]
  misc_feature (13)..(399): NCBI GI NO: 22331351 NR Description: Eukaryotic peptide chain release factor subunit 1
  misc_feature (1)..(397): NCBI GI NO: 34907268 NR Description: putative peptide chain release factor subunit 1
  misc_feature (1)..(387): NCBI GI NO: 18250310 NR Description: eukaryotic release factor 1
  misc_feature (1)..(397): NCBI GI NO: 15213995 NR Description: Eukaryotic peptide chain release factor subunit 1
  misc_feature (1)..(397): NCBI GI NO: 21311419 NR Description: eukaryotic polypeptide releasing factor
MPPRDQVSRVTKMLGDEYGTASNIKSRVNRQSVLSAITSAQQRLKLYNKVPTNGLVLYTGTIVNDDGKEKKVTFDFEPFRPINASLYLCDNKFHTEALNELLESDDKFGFIVMDGNGTLFGTLSGNTREVLHKFTVDLPKKHGRGGQSALRFARLRMEKRHNYVRKTAELATQFYINPATSQPNVSGLILAGSADFKTELSQSELFDPRLQAKILNVVDVSYGGENGFNQAIELSAEILSNVKFIQEKKLIGKYFEEISQDTGKYVFGVEDTLKALEMGAIETLIVWENLDINRYELKNSTTGEMVVKHFGKDQESDTSNFHDSETNAELEVQEKMPLLEWFANEYKRFGCTLEFVTNKSQEGSQFCRGFGGIGGMLRYQLDMRTFDELSDTEVYEDSD

SEQ ID NO: 1206 - DNA, 1012 bp, Arabidopsis thaliana
  misc_feature (1)..(1012): Ceres Seq. ID no. 13499975
actattattctaaaatccaaaaaaactatatgttataacattggaatcatcagtctctaagcagtatcacaccaactcaatatggctaccaccactgcagcagcagcctcaggtatttttgggatccggattcaagatcctagacctggaaccggtagggtccaagcccggttcgggttcagtttcggaaaaaagaaaccggctccaccgccaaagaaatcaaggcaggtccaagacgatggagacagactagtttggttccccggcgcaaacccgccggaatggttggacggatcgatgatcggagaccgtggatttgatccgtttggtttaggtaaaccggctgagtatcttcagtacgatttcgatggacttgaccaaaaccttgccaagaacgtggcgggtgacatcatcgggatcatccaagaatcttcggagatcaaaccgacgccgtttcagccgtacactgaagtctttgggatccaacggttcagagaatgtgagctgatccatggaaggtgggccatgcttggcactctaggcgccatcgccgtagaggctcttacaggaattgcatggcaagacgccggaaaggtggaattggtggaaggatcatcgtatttgggacaaccattgccgttctcgttgacgacgttgatatggatagaagtgttagtggtcggatacattgagttccaacgtaactctgaactggatccagagaaacggatttacccgggtgggtattttgacccgttgggactcgcggctgatccagagaagttggatactttgaagctggctgagataaagcactctcgtctcgctatggtcgcatttctcatctttgctcttcaggcggcctttaccggcaaaggccctgtcagcttccttgccacctttaacaattagttaatgaacctttctatctttattttatcaaaataaaattatacttcaaaaactgtataatgcatgttacgctatacttataaagaagtcttttattgtt

SEQ ID NO: 1207 - protein, 276 aa, Arabidopsis thaliana
  peptide (1)..(276): Ceres Seq. ID no. 13499976
  misc_feature (64)..(261): Pfam Name: Pfam Description:  Chlorophyll A-B binding protein
  misc_feature (1)..(276): NCBI GI NO: 15225630 NR Description: light-harvesting chlorophyll a/b binding protein
  misc_feature (1)..(276): NCBI GI NO: 21594018 NR Description: putative chlorophyll a/b binding protein
  misc_feature (1)..(276): NCBI GI NO: 445116 NR Description: light-harvesting complex IIa protein;
  misc_feature (1)..(276): NCBI GI NO: 7443231 NR Description: chlorophyll a/b-binding protein CP29 precursor
  misc_feature (2)..(273): NCBI GI NO: 4689382 NR Description: chlorophyll a/b binding protein CP29
  misc_feature (1)..(276): NCBI GI NO: 7443230 NR Description: probable chlorophyll a/b-binding protein - rice
  misc_feature (1)..(273): NCBI GI NO: 20260162 NR Description: chlorophyll a/b-binding protein CP29
  misc_feature (1)..(273): NCBI GI NO: 15241005 NR Description: light-harvesting chlorophyll a/b binding protein
  misc_feature (1)..(273): NCBI GI NO: 13877547 NR Description: chlorophyll a/b-binding protein CP29
  misc_feature (1)..(273): NCBI GI NO: 15081739 NR Description: AT5g01530/F7A7_50 [Arabidopsis thaliana]
MATTTAAAASGIFGIRIQDPRPGTGRVQARFGFSFGKKKPAPPPKKSRQVQDDGDRLVWFPGANPPEWLDGSMIGDRGFDPFGLGKPAEYLQYDFDGLDQNLAKNVAGDIIGIIQESSEIKPTPFQPYTEVFGIQRFRECELIHGRWAMLGTLGAIAVEALTGIAWQDAGKVELVEGSSYLGQPLPFSLTTLIWIEVLVVGYIEFQRNSELDPEKRIYPGGYFDPLGLAADPEKLDTLKLAEIKHSRLAMVAFLIFALQAAFTGKGPVSFLATFNN

SEQ ID NO: 1208 - protein, 204 aa, Arabidopsis thaliana
  peptide (1)..(204): Ceres Seq. ID no. 13499977
  misc_feature (1)..(189): Pfam Name: Pfam Description:  Chlorophyll A-B binding protein
  misc_feature (1)..(204): NCBI GI NO: 15225630 NR Description: light-harvesting chlorophyll a/b binding protein
  misc_feature (1)..(204): NCBI GI NO: 21594018 NR Description: putative chlorophyll a/b binding protein
  misc_feature (1)..(204): NCBI GI NO: 445116 NR Description: light-harvesting complex IIa protein;
  misc_feature (1)..(204): NCBI GI NO: 7443231 NR Description: chlorophyll a/b-binding protein CP29 precursor
  misc_feature (1)..(201): NCBI GI NO: 4689382 NR Description: chlorophyll a/b binding protein CP29
  misc_feature (1)..(204): NCBI GI NO: 7443230 NR Description: probable chlorophyll a/b-binding protein - rice
  misc_feature (1)..(201): NCBI GI NO: 20260162 NR Description: chlorophyll a/b-binding protein CP29
  misc_feature (1)..(201): NCBI GI NO: 15241005 NR Description: light-harvesting chlorophyll a/b binding protein
  misc_feature (1)..(201): NCBI GI NO: 13877547 NR Description: chlorophyll a/b-binding protein CP29
  misc_feature (1)..(201): NCBI GI NO: 15081739 NR Description: AT5g01530/F7A7_50 [Arabidopsis thaliana]
MIGDRGFDPFGLGKPAEYLQYDFDGLDQNLAKNVAGDIIGIIQESSEIKPTPFQPYTEVFGIQRFRECELIHGRWAMLGTLGAIAVEALTGIAWQDAGKVELVEGSSYLGQPLPFSLTTLIWIEVLVVGYIEFQRNSELDPEKRIYPGGYFDPLGLAADPEKLDTLKLAEIKHSRLAMVAFLIFALQAAFTGKGPVSFLATFNN

SEQ ID NO: 1209 - DNA, 1187 bp, Arabidopsis thaliana
  misc_feature (1)..(1187): Ceres Seq. ID no. 12674479
atcttaaaactcccaagtaacaaaaatggctatctcaaagcttattcctactcttgtgctctttgttttgttctcttttgatgttagtgttgctcatccaggtctaggatttggatggggaagtaatagtcccattggaggatctttttactcaaatctttacccacaattttaccagttctcttgtccacaagctgatgagattgttatgacggtgctcgaaaaagccatagctaaagaaccaagaatggcagcatctttactcagacttcacttccacgactgcttcgttcagggctgtgatgcatcaatcttgttggatgatagtgcaaccataagaagtgaaaagaatgctggaccaaacaagaactccgttagagggtttcaagtaatcgacgagatcaaagccaaacttgagcaagcttgtcctcaaactgtctcctgcgccgacattctagctctagctgctcgtggctcaactatactgagtggtggaccatcatgggagcttccactagggaggagagactcgaggaccgctagccttaatggcgcaaacacgaacattcctgcacctaactcaactattcaaaatctcttaaccatgttccaacgtaaaggtttgaacgaagaagaccttgtttccctatcaggaggacatacgattggagtagcgaggtgcacaacgtttaaacaaagactatacaatcaaaacggtaataaccaaccagacgagacgctagagaggtcttactactatggtctcaggtcaatttgtccaccaacaggcggtgacaacaatatttcacctctagacttagcctctcctgcaagattcgacaacacatacttcaagctccttctatggggcaaaggcttattgacatcagatgaagtgcttctcactggcaatgtaggcaagactggtgcattagtgaaagcttatgccgaagacgagagacttttcttccaacaattcgcaaagtcgatggttaacatgggaaacattcagcctcttactggttttaatggtgagatcaggaagagttgtcatgtgattaactaaagaaactgtgtgtttttgcattattattgtattaaggggtgattaagaataagtcgtgttatgtttttcgatatgttagtgatctaattaacgtctttgaatgaaaatggacggttgtttt

SEQ ID NO: 1210 - protein, 346 aa, Arabidopsis thaliana
  peptide (1)..(346): Ceres Seq. ID no. 12674480
  misc_feature (61)..(310): Pfam Name: Pfam Description:  Peroxidase
  misc_feature (1)..(346): NCBI GI NO: 15219493 NR Description: peroxidase, putative; protein id: At1g44970
  misc_feature (1)..(346): NCBI GI NO: 21554765 NR Description: peroxidase, putative [Arabidopsis thaliana]
  misc_feature (17)..(344): NCBI GI NO: 993004 NR Description: peroxidase [Mercurialis annua]
  misc_feature (40)..(346): NCBI GI NO: 14031051 NR Description: peroxidase [Nicotiana tabacum]
  misc_feature (1)..(346): NCBI GI NO: 34903038 NR Description: unnamed protein product
  misc_feature (35)..(346): NCBI GI NO: 34903044 NR Description: unnamed protein product
  misc_feature (45)..(346): NCBI GI NO: 7453855 NR Description: peroxidase prx15 precursor [Spinacia oleracea]
  misc_feature (35)..(346): NCBI GI NO: 15224116 NR Description: peroxidase, putative; protein id: At2g18150
  misc_feature (35)..(346): NCBI GI NO: 21537275 NR Description: putative peroxidase [Arabidopsis thaliana]
  misc_feature (40)..(346): NCBI GI NO: 15234394 NR Description: peroxidase, putative; protein id: At4g36430
MAISKLIPTLVLFVLFSFDVSVAHPGLGFGWGSNSPIGGSFYSNLYPQFYQFSCPQADEIVMTVLEKAIAKEPRMAASLLRLHFHDCFVQGCDASILLDDSATIRSEKNAGPNKNSVRGFQVIDEIKAKLEQACPQTVSCADILALAARGSTILSGGPSWELPLGRRDSRTASLNGANTNIPAPNSTIQNLLTMFQRKGLNEEDLVSLSGGHTIGVARCTTFKQRLYNQNGNNQPDETLERSYYYGLRSICPPTGGDNNISPLDLASPARFDNTYFKLLLWGKGLLTSDEVLLTGNVGKTGALVKAYAEDERLFFQQFAKSMVNMGNIQPLTGFNGEIRKSCHVIN

SEQ ID NO: 1211 - protein, 285 aa, Arabidopsis thaliana
  peptide (1)..(285): Ceres Seq. ID no. 12674481
  misc_feature (1)..(249): Pfam Name: Pfam Description:  Peroxidase
  misc_feature (1)..(285): NCBI GI NO: 15219493 NR Description: peroxidase, putative; protein id: At1g44970
  misc_feature (1)..(285): NCBI GI NO: 21554765 NR Description: peroxidase, putative [Arabidopsis thaliana]
  misc_feature (1)..(283): NCBI GI NO: 993004 NR Description: peroxidase [Mercurialis annua]
  misc_feature (1)..(285): NCBI GI NO: 14031051 NR Description: peroxidase [Nicotiana tabacum]
  misc_feature (1)..(285): NCBI GI NO: 34903038 NR Description: unnamed protein product
  misc_feature (1)..(285): NCBI GI NO: 34903044 NR Description: unnamed protein product
  misc_feature (1)..(285): NCBI GI NO: 7453855 NR Description: peroxidase prx15 precursor [Spinacia oleracea]
  misc_feature (1)..(285): NCBI GI NO: 15224116 NR Description: peroxidase, putative; protein id: At2g18150
  misc_feature (1)..(285): NCBI GI NO: 21537275 NR Description: putative peroxidase [Arabidopsis thaliana]
  misc_feature (1)..(285): NCBI GI NO: 15234394 NR Description: peroxidase, putative; protein id: At4g36430
MTVLEKAIAKEPRMAASLLRLHFHDCFVQGCDASILLDDSATIRSEKNAGPNKNSVRGFQVIDEIKAKLEQACPQTVSCADILALAARGSTILSGGPSWELPLGRRDSRTASLNGANTNIPAPNSTIQNLLTMFQRKGLNEEDLVSLSGGHTIGVARCTTFKQRLYNQNGNNQPDETLERSYYYGLRSICPPTGGDNNISPLDLASPARFDNTYFKLLLWGKGLLTSDEVLLTGNVGKTGALVKAYAEDERLFFQQFAKSMVNMGNIQPLTGFNGEIRKSCHVIN

SEQ ID NO: 1212 - protein, 272 aa, Arabidopsis thaliana
  peptide (1)..(272): Ceres Seq. ID no. 12674482
  misc_feature (1)..(236): Pfam Name: Pfam Description:  Peroxidase
  misc_feature (1)..(272): NCBI GI NO: 15219493 NR Description: peroxidase, putative; protein id: At1g44970
  misc_feature (1)..(272): NCBI GI NO: 21554765 NR Description: peroxidase, putative [Arabidopsis thaliana]
  misc_feature (1)..(270): NCBI GI NO: 993004 NR Description: peroxidase [Mercurialis annua]
  misc_feature (1)..(272): NCBI GI NO: 14031051 NR Description: peroxidase [Nicotiana tabacum]
  misc_feature (1)..(272): NCBI GI NO: 34903038 NR Description: unnamed protein product
  misc_feature (1)..(272): NCBI GI NO: 34903044 NR Description: unnamed protein product
  misc_feature (1)..(272): NCBI GI NO: 7453855 NR Description: peroxidase prx15 precursor [Spinacia oleracea]
  misc_feature (1)..(272): NCBI GI NO: 15224116 NR Description: peroxidase, putative; protein id: At2g18150
  misc_feature (1)..(272): NCBI GI NO: 21537275 NR Description: putative peroxidase [Arabidopsis thaliana]
  misc_feature (1)..(272): NCBI GI NO: 15234394 NR Description: peroxidase, putative; protein id: At4g36430
MAASLLRLHFHDCFVQGCDASILLDDSATIRSEKNAGPNKNSVRGFQVIDEIKAKLEQACPQTVSCADILALAARGSTILSGGPSWELPLGRRDSRTASLNGANTNIPAPNSTIQNLLTMFQRKGLNEEDLVSLSGGHTIGVARCTTFKQRLYNQNGNNQPDETLERSYYYGLRSICPPTGGDNNISPLDLASPARFDNTYFKLLLWGKGLLTSDEVLLTGNVGKTGALVKAYAEDERLFFQQFAKSMVNMGNIQPLTGFNGEIRKSCHVIN

SEQ ID NO: 1213 - DNA, 673 bp, Arabidopsis thaliana
  misc_feature (1)..(673): Ceres Seq. ID no. 12396942
attcgaagagagttctagcaaaacaaaacaaaacagagcaaacagagtaagcgaaacgatgtctctagttccgaccttttttggaggccgaagaacaaacgtgttcgacccattttcactagacgtatgggatccgttcgaaggattcttgacgcccgggttgacaaacgcacctgccaaggacgtggcagcgttcacaaacgctaaagtggactggagggagacacctgaagcgcatgtgttcaaggcggacgtgcctgggcttaagaaggaagaggtgaaggtggaggttgaagatggtaacatacttcagataagcggtgagaggagcagtgagaatgaagagaagagtgacacatggcaccgtgtggagcggtcaagtgggaagttcatgaggaggtttcggttgccagagaatgcaaaggtggaggaagtaaaggcgagtatggagaatggggtgttgtcggttacggtgccgaaagttcaggagagtaagccggaggtcaagtccgttgatatctctggttaagaggaactctgaagttggaaagcttaagacagtaatatgtgatagtgtgaaataaatggtgcgactttcctttcttctttttcttgtaatcaccaatctcgttgtatcaatataagtaatcgtaataaaagagtgttttgatac

SEQ ID NO: 1214 - protein, 175 aa, Arabidopsis thaliana
  peptide (1)..(175): Ceres Seq. ID no. 12396943
  misc_feature (20)..(175): NCBI GI NO: 15294150 NR Description: AT3g46230/F12M12_200 [Arabidopsis thaliana]
  misc_feature (20)..(175): NCBI GI NO: 15231372 NR Description: heat shock protein 17; protein id: At3g46230
  misc_feature (20)..(175): NCBI GI NO: 81639 NR Description: heat shock protein 17 - Arabidopsis thaliana
  misc_feature (3)..(175): NCBI GI NO: 8671873 NR Description: Contains similarity to 17
  misc_feature (20)..(175): NCBI GI NO: 7441319 NR Description: heat-shock protein 17
  misc_feature (20)..(175): NCBI GI NO: 15220832 NR Description: 17
  misc_feature (20)..(175): NCBI GI NO: 8250119 NR Description: HSP17.7-a protein [Brassica oleracea]
  misc_feature (20)..(175): NCBI GI NO: 21618106 NR Description: heat shock protein 18 [Arabidopsis thaliana]
  misc_feature (20)..(175): NCBI GI NO: 15238509 NR Description: heat shock protein 18; protein id: At5g59720
  misc_feature (20)..(175): NCBI GI NO: 7441323 NR Description: heat shock protein 18p - common tobacco
FEESSSKTKQNRANRVSETMSLVPTFFGGRRTNVFDPFSLDVWDPFEGFLTPGLTNAPAKDVAAFTNAKVDWRETPEAHVFKADVPGLKKEEVKVEVEDGNILQISGERSSENEEKSDTWHRVERSSGKFMRRFRLPENAKVEEVKASMENGVLSVTVPKVQESKPEVKSVDISG

SEQ ID NO: 1215 - protein, 156 aa, Arabidopsis thaliana
  peptide (1)..(156): Ceres Seq. ID no. 12396944
  misc_feature (1)..(156): NCBI GI NO: 15294150 NR Description: AT3g46230/F12M12_200 [Arabidopsis thaliana]
  misc_feature (1)..(156): NCBI GI NO: 15231372 NR Description: heat shock protein 17; protein id: At3g46230
  misc_feature (1)..(156): NCBI GI NO: 81639 NR Description: heat shock protein 17 - Arabidopsis thaliana
  misc_feature (1)..(156): NCBI GI NO: 8671873 NR Description: Contains similarity to 17
  misc_feature (1)..(156): NCBI GI NO: 7441319 NR Description: heat-shock protein 17
  misc_feature (1)..(156): NCBI GI NO: 15220832 NR Description: 17
  misc_feature (1)..(156): NCBI GI NO: 8250119 NR Description: HSP17.7-a protein [Brassica oleracea]
  misc_feature (1)..(156): NCBI GI NO: 21618106 NR Description: heat shock protein 18 [Arabidopsis thaliana]
  misc_feature (1)..(156): NCBI GI NO: 15238509 NR Description: heat shock protein 18; protein id: At5g59720
  misc_feature (1)..(156): NCBI GI NO: 7441323 NR Description: heat shock protein 18p - common tobacco
MSLVPTFFGGRRTNVFDPFSLDVWDPFEGFLTPGLTNAPAKDVAAFTNAKVDWRETPEAHVFKADVPGLKKEEVKVEVEDGNILQISGERSSENEEKSDTWHRVERSSGKFMRRFRLPENAKVEEVKASMENGVLSVTVPKVQESKPEVKSVDISG

SEQ ID NO: 1216 - DNA, 1040 bp, Arabidopsis thaliana
  misc_feature (1)..(1040): Ceres Seq. ID no. 13501435
attccgcaatttattgattcttctttatcgtgcttctgattgttttggttaacggatcaaattatcgaacgatgatggcttctctcgcgacttccataagtggaagcttcagaattctggttaaatcatcttcgacgaggaatgggtttcctgtaatctctgatcaaaacccgagtttcgtcttgtttgcgaataaacgcagacatatctctagaacggcgatttttcaccgatctgcgataagtggttcgagtcaaggagaaaagatatcacctttagcatctggtgtatcttcaggtttatattcagctcagacttttgatttgacgcctcaaaacgttgatttggtgcttgaggatgttagaccgttcttgatctctgatggtggaaacgtcgacgttgtctccgttgaagatggggtagtctctcttaagctccaaggagcatgtaccagctgtccaagttcttcaacaactatgacaatgggaatagagagggtactcaaggaaaagtttggagatgcattgaaagatattcgacaagtttttgatgaagaagtaaaacagataaccgtggaggcagtgaatgctcatctagatatactgaggccagctatcaagaactatggcggaagtgttgaagttttatcggttgaaggcgaggactgcgttgtaaaatatgttggaccggagtcgattggaatgggaatacaggcagcgattaaagaaaagtttaaggacatatctaatgtaacctttacaagctagaaagcatgaagaaagccactatattatgtaaaaacattattgctctttgtttgagctaatgtccacttcaatagtcgtcctctccataactgtccttagccatcttgccaggttgatcaagaacggtgtgtagacaaagtagcaagttgttgtccacgtaaccagtcccttcaccagcaaacaaaacaagaaagaaacagagtcatgtgtatgtttttgtttgatgatgtctgtataaacacttattacctggccaaagatttctatgtttgc

SEQ ID NO: 1217 - protein, 231 aa, Arabidopsis thaliana
  peptide (1)..(231): Ceres Seq. ID no. 13501436
  misc_feature (90)..(158): Pfam Name: Pfam Description:  NifU-like domain
  misc_feature (1)..(231): NCBI GI NO: 18411785 NR Description: NifU-related metallocluster assembly factor
  misc_feature (2)..(173): NCBI GI NO: 25407141 NR Description: hypothetical protein AT4g01940
  misc_feature (84)..(158): NCBI GI NO: 2688826 NR Description: putative NifU protein [Prunus armeniaca]
  misc_feature (85)..(223): NCBI GI NO: 18423084 NR Description: expressed protein [Arabidopsis thaliana]
  misc_feature (8)..(223): NCBI GI NO: 21554503 NR Description: nitrogen fixation like protein
  misc_feature (8)..(223): NCBI GI NO: 18416645 NR Description: nitrogen fixation protein, putative  (NifU)
  misc_feature (68)..(223): NCBI GI NO: 30698492 NR Description: NifU1 [Oryza sativa (japonica cultivar-group)]
  misc_feature (85)..(223): NCBI GI NO: 7485833 NR Description: hypothetical protein F20B18
  misc_feature (79)..(159): NCBI GI NO: 24414813 NR Description: putative NifU-like protein
  misc_feature (79)..(158): NCBI GI NO: 33860975 NR Description: NifU-like protein
MMASLATSISGSFRILVKSSSTRNGFPVISDQNPSFVLFANKRRHISRTAIFHRSAISGSSQGEKISPLASGVSSGLYSAQTFDLTPQNVDLVLEDVRPFLISDGGNVDVVSVEDGVVSLKLQGACTSCPSSSTTMTMGIERVLKEKFGDALKDIRQVFDEEVKQITVEAVNAHLDILRPAIKNYGGSVEVLSVEGEDCVVKYVGPESIGMGIQAAIKEKFKDISNVTFTS

SEQ ID NO: 1218 - protein, 230 aa, Arabidopsis thaliana
  peptide (1)..(230): Ceres Seq. ID no. 13501437
  misc_feature (89)..(157): Pfam Name: Pfam Description:  NifU-like domain
  misc_feature (1)..(230): NCBI GI NO: 18411785 NR Description: NifU-related metallocluster assembly factor
  misc_feature (1)..(172): NCBI GI NO: 25407141 NR Description: hypothetical protein AT4g01940
  misc_feature (83)..(157): NCBI GI NO: 2688826 NR Description: putative NifU protein [Prunus armeniaca]
  misc_feature (84)..(222): NCBI GI NO: 18423084 NR Description: expressed protein [Arabidopsis thaliana]
  misc_feature (7)..(222): NCBI GI NO: 21554503 NR Description: nitrogen fixation like protein
  misc_feature (7)..(222): NCBI GI NO: 18416645 NR Description: nitrogen fixation protein, putative  (NifU)
  misc_feature (67)..(222): NCBI GI NO: 30698492 NR Description: NifU1 [Oryza sativa (japonica cultivar-group)]
  misc_feature (84)..(222): NCBI GI NO: 7485833 NR Description: hypothetical protein F20B18
  misc_feature (78)..(158): NCBI GI NO: 24414813 NR Description: putative NifU-like protein
  misc_feature (78)..(157): NCBI GI NO: 33860975 NR Description: NifU-like protein
MASLATSISGSFRILVKSSSTRNGFPVISDQNPSFVLFANKRRHISRTAIFHRSAISGSSQGEKISPLASGVSSGLYSAQTFDLTPQNVDLVLEDVRPFLISDGGNVDVVSVEDGVVSLKLQGACTSCPSSSTTMTMGIERVLKEKFGDALKDIRQVFDEEVKQITVEAVNAHLDILRPAIKNYGGSVEVLSVEGEDCVVKYVGPESIGMGIQAAIKEKFKDISNVTFTS

SEQ ID NO: 1219 - DNA, 747 bp, Arabidopsis thaliana
  misc_feature (1)..(747): Ceres Seq. ID no. 12678432
atggcttcgtctctcaccactagattatcggcggtaatcggatctcgacggagttttccgatcgtcggagcgttttgcgttctgtcaactctctcaatctcttctctttcttcttcatctcccttcaaatcgggttgtgcacagtctttctctgttgttcctctcttaaggtctaagtttagcagtaaggctttttcttcgtcgatcagaatggaggagagcagcaaaactgtgcccagcattgttgtctatgtcactgttcctaacagagaagcagggaagaagttggctaacagcattgtccaggaaaagcttgcagcgtgtgtgaacattgtgcctggcattgaatcggtgtacgagtgggaggggaaggttcagagtgattcagaggagctcctgataatcaaaacaaggcaatcccttctagaacctctaaccgagcatgtcaatgcaaatcacgaatacgatgtgccagaagtaattgcgttgcccatcactggtgggagcgacaagtatttagaatggttgaaaaacagtacaaggaactgagatctcgacatctcgtagctgcccatcgtcaatggctttctagtattagtttcttttacatttcagtaacctctgtattaaagataaaacgtgtgaagtgtaatactggaccagttcgtcaaatgaaataaacaatgacattgttccatataatggatggacatttgcttaaaagatttcagatcaagtctttgattc

SEQ ID NO: 1220 - protein, 182 aa, Arabidopsis thaliana
  peptide (1)..(182): Ceres Seq. ID no. 12678433
  misc_feature (80)..(181): Pfam Name: Pfam Description:  CutA1 divalent ion tolerance protein
  misc_feature (1)..(182): NCBI GI NO: 15226156 NR Description: putative related to microbial divalent cation toleranceproteins
  misc_feature (1)..(156): NCBI GI NO: 30685818 NR Description: putative related to microbial divalent cation toleranceproteins
  misc_feature (58)..(181): NCBI GI NO: 23509167 NR Description: cutA, putative [Plasmodium falciparum 3D7]
  misc_feature (26)..(176): NCBI GI NO: 21430094 NR Description: GM24986p [Drosophila melanogaster]
  misc_feature (2)..(176): NCBI GI NO: 24641937 NR Description: CG11590-PA [Drosophila melanogaster]
  misc_feature (55)..(182): NCBI GI NO: 7706244 NR Description: divalent cation tolerant protein CUTA
  misc_feature (72)..(182): NCBI GI NO: 7341255 NR Description: brain acetylcholinesterase putative membrane anchor
  misc_feature (78)..(182): NCBI GI NO: 21702737 NR Description: divalent cation tolerant protein CUTA
  misc_feature (78)..(182): NCBI GI NO: 34852227 NR Description: similar to divalent cation tolerant protein CUTA
  misc_feature (78)..(182): NCBI GI NO: 39654385 NR Description: Chain A, Crystal Structure Of Rat Cuta1 At 2
MASSLTTRLSAVIGSRRSFPIVGAFCVLSTLSISSLSSSSPFKSGCAQSFSVVPLLRSKFSSKAFSSSIRMEESSKTVPSIVVYVTVPNREAGKKLANSIVQEKLAACVNIVPGIESVYEWEGKVQSDSEELLIIKTRQSLLEPLTEHVNANHEYDVPEVIALPITGGSDKYLEWLKNSTRN

SEQ ID NO: 1221 - protein, 112 aa, Arabidopsis thaliana
  peptide (1)..(112): Ceres Seq. ID no. 12678434
  misc_feature (10)..(111): Pfam Name: Pfam Description:  CutA1 divalent ion tolerance protein
  misc_feature (1)..(112): NCBI GI NO: 15226156 NR Description: putative related to microbial divalent cation toleranceproteins
  misc_feature (1)..(86): NCBI GI NO: 30685818 NR Description: putative related to microbial divalent cation toleranceproteins
  misc_feature (1)..(111): NCBI GI NO: 23509167 NR Description: cutA, putative [Plasmodium falciparum 3D7]
  misc_feature (1)..(106): NCBI GI NO: 21430094 NR Description: GM24986p [Drosophila melanogaster]
  misc_feature (1)..(106): NCBI GI NO: 24641937 NR Description: CG11590-PA [Drosophila melanogaster]
  misc_feature (1)..(112): NCBI GI NO: 7706244 NR Description: divalent cation tolerant protein CUTA
  misc_feature (2)..(112): NCBI GI NO: 7341255 NR Description: brain acetylcholinesterase putative membrane anchor
  misc_feature (8)..(112): NCBI GI NO: 21702737 NR Description: divalent cation tolerant protein CUTA
  misc_feature (8)..(112): NCBI GI NO: 34852227 NR Description: similar to divalent cation tolerant protein CUTA
  misc_feature (8)..(112): NCBI GI NO: 39654385 NR Description: Chain A, Crystal Structure Of Rat Cuta1 At 2
MEESSKTVPSIVVYVTVPNREAGKKLANSIVQEKLAACVNIVPGIESVYEWEGKVQSDSEELLIIKTRQSLLEPLTEHVNANHEYDVPEVIALPITGGSDKYLEWLKNSTRN

SEQ ID NO: 1222 - DNA, 1059 bp, Arabidopsis thaliana
  misc_feature (1)..(1059): Ceres Seq. ID no. 12395617
aaagccattgtttcagttgatgatggtgatgatatctcttcacttctctactccgccgctagcttttctcaaatctgattccaattccagatttctcaagaaccctaatcctaatgttatccaattcaccccaaaatcccaacttcttttcccccaacgtctcaatttcaacaccggaacaaatttaaaccggcgaactctgagttgctatgggattaaggattcaagtgagacaacaaagtctgcgccgtcattagactccggcgacggtggcggcggaggaggtgacggcggagatgctggtggtgatgatgataaaggtgaagtggaggaaaaaaacagactttttccggaatggttggattttacctcggatgatgcacagactgtgtttgtggctatagctgtatcgttggcgtttcgttattttatcgcagaaccaagatatattccttctttgtctatgtatcctacctttgatgttggagacagattagttgcagagaaggtgagttattatttcaggaagccttgtgcaaatgatattgtcatctttaaaagtccaccagttcttcaggaagttgggtatactgatgccgatgtatttattaaacggattattgccaaagaaggtgaccttgtggaggtacataatgggaaactgatggttaatggtgttgctaggaatgaaaaattcatcttagagcctcctggttatgaaatgacaccaattagggtaccggaaaattcagtctttgtgatgggtgataaccggaataacagttatgattcgcatgtgtggggtcctctgcctttgaagaatatcattggacggtcagtttttcggtattggccaccaaacagagtaagcgggacagtgctagaaggtggctgtgctgtggataagcaatagaacatattgtaacgttttgattcggcatgtcttcatttgaaacacttgtgcagataaaaacgaaaacaatgtacctttttatgaaggagagagttgcacatttgaattggattgcagattaatgaggaaacaagaaattcttattt

SEQ ID NO: 1223 - protein, 303 aa, Arabidopsis thaliana
  peptide (1)..(303): Ceres Seq. ID no. 12395618
  misc_feature (122)..(277): Pfam Name: Pfam Description:  Signal peptidase I
  misc_feature (1)..(303): NCBI GI NO: 9294054 NR Description: contains similarity to signal peptidase
  misc_feature (7)..(303): NCBI GI NO: 30687572 NR Description: chloroplast thylakoidal processing peptidase -related
  misc_feature (7)..(303): NCBI GI NO: 25082936 NR Description: chloroplast thylakoidal processing peptidase
  misc_feature (76)..(293): NCBI GI NO: 25408074 NR Description: probable signal peptidase I
  misc_feature (76)..(293): NCBI GI NO: 30684587 NR Description: signal peptidase I -related [Arabidopsis thaliana]
  misc_feature (120)..(293): NCBI GI NO: 15222236 NR Description: chloroplast thylakoidal processing peptidase
  misc_feature (120)..(293): NCBI GI NO: 21553622 NR Description: chloroplast thylakoidal processing peptidase
  misc_feature (113)..(293): NCBI GI NO: 23042815 NR Description: hypothetical protein
  misc_feature (112)..(288): NCBI GI NO: 16329254 NR Description: leader peptidase I [Synechocystis sp. PCC 6803]
  misc_feature (130)..(289): NCBI GI NO: 17230467 NR Description: signal peptidase I [Nostoc sp. PCC 7120]
KPLFQLMMVMISLHFSTPPLAFLKSDSNSRFLKNPNPNVIQFTPKSQLLFPQRLNFNTGTNLNRRTLSCYGIKDSSETTKSAPSLDSGDGGGGGGDGGDAGGDDDKGEVEEKNRLFPEWLDFTSDDAQTVFVAIAVSLAFRYFIAEPRYIPSLSMYPTFDVGDRLVAEKVSYYFRKPCANDIVIFKSPPVLQEVGYTDADVFIKRIIAKEGDLVEVHNGKLMVNGVARNEKFILEPPGYEMTPIRVPENSVFVMGDNRNNSYDSHVWGPLPLKNIIGRSVFRYWPPNRVSGTVLEGGCAVDKQ

SEQ ID NO: 1224 - protein, 297 aa, Arabidopsis thaliana
  peptide (1)..(297): Ceres Seq. ID no. 12395619
  misc_feature (116)..(271): Pfam Name: Pfam Description:  Signal peptidase I
  misc_feature (1)..(297): NCBI GI NO: 9294054 NR Description: contains similarity to signal peptidase
  misc_feature (1)..(297): NCBI GI NO: 30687572 NR Description: chloroplast thylakoidal processing peptidase -related
  misc_feature (1)..(297): NCBI GI NO: 25082936 NR Description: chloroplast thylakoidal processing peptidase
  misc_feature (70)..(287): NCBI GI NO: 25408074 NR Description: probable signal peptidase I
  misc_feature (70)..(287): NCBI GI NO: 30684587 NR Description: signal peptidase I -related [Arabidopsis thaliana]
  misc_feature (114)..(287): NCBI GI NO: 15222236 NR Description: chloroplast thylakoidal processing peptidase
  misc_feature (114)..(287): NCBI GI NO: 21553622 NR Description: chloroplast thylakoidal processing peptidase
  misc_feature (107)..(287): NCBI GI NO: 23042815 NR Description: hypothetical protein
  misc_feature (106)..(282): NCBI GI NO: 16329254 NR Description: leader peptidase I [Synechocystis sp. PCC 6803]
  misc_feature (124)..(283): NCBI GI NO: 17230467 NR Description: signal peptidase I [Nostoc sp. PCC 7120]
MMVMISLHFSTPPLAFLKSDSNSRFLKNPNPNVIQFTPKSQLLFPQRLNFNTGTNLNRRTLSCYGIKDSSETTKSAPSLDSGDGGGGGGDGGDAGGDDDKGEVEEKNRLFPEWLDFTSDDAQTVFVAIAVSLAFRYFIAEPRYIPSLSMYPTFDVGDRLVAEKVSYYFRKPCANDIVIFKSPPVLQEVGYTDADVFIKRIIAKEGDLVEVHNGKLMVNGVARNEKFILEPPGYEMTPIRVPENSVFVMGDNRNNSYDSHVWGPLPLKNIIGRSVFRYWPPNRVSGTVLEGGCAVDKQ

SEQ ID NO: 1225 - protein, 296 aa, Arabidopsis thaliana
  peptide (1)..(296): Ceres Seq. ID no. 12395620
  misc_feature (115)..(270): Pfam Name: Pfam Description:  Signal peptidase I
  misc_feature (1)..(296): NCBI GI NO: 9294054 NR Description: contains similarity to signal peptidase
  misc_feature (1)..(296): NCBI GI NO: 30687572 NR Description: chloroplast thylakoidal processing peptidase -related
  misc_feature (1)..(296): NCBI GI NO: 25082936 NR Description: chloroplast thylakoidal processing peptidase
  misc_feature (69)..(286): NCBI GI NO: 25408074 NR Description: probable signal peptidase I
  misc_feature (69)..(286): NCBI GI NO: 30684587 NR Description: signal peptidase I -related [Arabidopsis thaliana]
  misc_feature (113)..(286): NCBI GI NO: 15222236 NR Description: chloroplast thylakoidal processing peptidase
  misc_feature (113)..(286): NCBI GI NO: 21553622 NR Description: chloroplast thylakoidal processing peptidase
  misc_feature (106)..(286): NCBI GI NO: 23042815 NR Description: hypothetical protein
  misc_feature (105)..(281): NCBI GI NO: 16329254 NR Description: leader peptidase I [Synechocystis sp. PCC 6803]
  misc_feature (123)..(282): NCBI GI NO: 17230467 NR Description: signal peptidase I [Nostoc sp. PCC 7120]
MVMISLHFSTPPLAFLKSDSNSRFLKNPNPNVIQFTPKSQLLFPQRLNFNTGTNLNRRTLSCYGIKDSSETTKSAPSLDSGDGGGGGGDGGDAGGDDDKGEVEEKNRLFPEWLDFTSDDAQTVFVAIAVSLAFRYFIAEPRYIPSLSMYPTFDVGDRLVAEKVSYYFRKPCANDIVIFKSPPVLQEVGYTDADVFIKRIIAKEGDLVEVHNGKLMVNGVARNEKFILEPPGYEMTPIRVPENSVFVMGDNRNNSYDSHVWGPLPLKNIIGRSVFRYWPPNRVSGTVLEGGCAVDKQ

SEQ ID NO: 1226 - DNA, 1194 bp, Arabidopsis thaliana
  misc_feature (1)..(1194): Ceres Seq. ID no. 12337726
aaatcttcttcttcctctcttgtctctctcgctctctctcttctacattgtttcttgaggtcaatccattaaaaatgggattatattcactaatcacaggaagaaaaggaccaagtggatttggttcagcttcaacagctgaagaggttactcaagggattgatgcaactaatctcactgcaattatcacaagagggacaggaggaatagggatggagacagcgagagtgctgtcgaagagaggtgctcatgtggtgatcggtgcccgaaacatgggagctgcagaaaacgccaaaacagagattctcagacaaaacgcaaacgcacgtgtcactcttcttcaattagatctctcttccatcaaatccatcaaagcctttgttcgtgaatttcatgccctccatcttcctctcaatctcctcataaacaatgcaggagtaatgttctgtccataccaactctctgaagatggaatcgaattgcagtttgctacaaatcacattggtcactttctgttgacaaacttgctcttggacacaatgaagaacacagctaaaaccagtggtgttgaaggaagaattttgaatgtatcatctgtagctcatatctatacttaccaagaaggaatccaattcgacagcatcaatgacatttgcagttactcggataagcgagcttacggacaatcgaaactagccaatatattgcatgctaatgagctctcccgtcagcttcaggaagaaggagtaaacataacagcaaattcagttcaccctggtcttattctcaccaatctcttccaacacactgctcttttaatgaggttcttgaagttcttcagcttctacttgtggaaaaatatacctcagggagcagcaacaacatgttatgttgctctgcatccaagtgtgaagggagtaacaggaaagtactttgctgattgcaacgaagtcactccaagcaaacttgctagagatgagactttggcacagaaactctgggatttcagtgttaagctcattaactcggtttctaaaaagaactacctcggtttcgatgacaccacttgaatctctacggtgttcttgttgaatgttacctaaagagtgaaaaaaaagtaagaacaagtagagattgtgatgtttctttccacattatcgtatggtaactcatgagatgcattgttgtatgctc

SEQ ID NO: 1227 - protein, 355 aa, Arabidopsis thaliana
  peptide (1)..(355): Ceres Seq. ID no. 12337727
  misc_feature (25)..(355): NCBI GI NO: 21554820 NR Description: putativepod-specific dehydrogenase SAC25
  misc_feature (25)..(355): NCBI GI NO: 18413950 NR Description: putative protein; protein id: At5g02540
  misc_feature (25)..(355): NCBI GI NO: 20260302 NR Description: putative protein [Arabidopsis thaliana]
  misc_feature (25)..(343): NCBI GI NO: 629592 NR Description: hypothetical protein - rape
  misc_feature (25)..(345): NCBI GI NO: 15224306 NR Description: putative oxidoreductase; protein id: At2g37540
  misc_feature (27)..(355): NCBI GI NO: 11250521 NR Description: hypothetical protein T22P11
  misc_feature (25)..(345): NCBI GI NO: 34895876 NR Description: P0009G03.18
  misc_feature (33)..(342): NCBI GI NO: 23297050 NR Description: unknown protein [Arabidopsis thaliana]
  misc_feature (33)..(344): NCBI GI NO: 30686197 NR Description: short-chain dehydrogenase/reductase family protein
  misc_feature (33)..(344): NCBI GI NO: 18416145 NR Description: putative protein; protein id: At4g23430
IFFFLSCLSRSLSSTLFLEVNPLKMGLYSLITGRKGPSGFGSASTAEEVTQGIDATNLTAIITRGTGGIGMETARVLSKRGAHVVIGARNMGAAENAKTEILRQNANARVTLLQLDLSSIKSIKAFVREFHALHLPLNLLINNAGVMFCPYQLSEDGIELQFATNHIGHFLLTNLLLDTMKNTAKTSGVEGRILNVSSVAHIYTYQEGIQFDSINDICSYSDKRAYGQSKLANILHANELSRQLQEEGVNITANSVHPGLILTNLFQHTALLMRFLKFFSFYLWKNIPQGAATTCYVALHPSVKGVTGKYFADCNEVTPSKLARDETLAQKLWDFSVKLINSVSKKNYLGFDDTT

SEQ ID NO: 1228 - protein, 331 aa, Arabidopsis thaliana
  peptide (1)..(331): Ceres Seq. ID no. 12337728
  misc_feature (1)..(331): NCBI GI NO: 21554820 NR Description: putativepod-specific dehydrogenase SAC25
  misc_feature (1)..(331): NCBI GI NO: 18413950 NR Description: putative protein; protein id: At5g02540
  misc_feature (1)..(331): NCBI GI NO: 20260302 NR Description: putative protein [Arabidopsis thaliana]
  misc_feature (1)..(319): NCBI GI NO: 629592 NR Description: hypothetical protein - rape
  misc_feature (1)..(321): NCBI GI NO: 15224306 NR Description: putative oxidoreductase; protein id: At2g37540
  misc_feature (3)..(331): NCBI GI NO: 11250521 NR Description: hypothetical protein T22P11
  misc_feature (1)..(321): NCBI GI NO: 34895876 NR Description: P0009G03.18
  misc_feature (9)..(318): NCBI GI NO: 23297050 NR Description: unknown protein [Arabidopsis thaliana]
  misc_feature (9)..(320): NCBI GI NO: 30686197 NR Description: short-chain dehydrogenase/reductase family protein
  misc_feature (9)..(320): NCBI GI NO: 18416145 NR Description: putative protein; protein id: At4g23430
MGLYSLITGRKGPSGFGSASTAEEVTQGIDATNLTAIITRGTGGIGMETARVLSKRGAHVVIGARNMGAAENAKTEILRQNANARVTLLQLDLSSIKSIKAFVREFHALHLPLNLLINNAGVMFCPYQLSEDGIELQFATNHIGHFLLTNLLLDTMKNTAKTSGVEGRILNVSSVAHIYTYQEGIQFDSINDICSYSDKRAYGQSKLANILHANELSRQLQEEGVNITANSVHPGLILTNLFQHTALLMRFLKFFSFYLWKNIPQGAATTCYVALHPSVKGVTGKYFADCNEVTPSKLARDETLAQKLWDFSVKLINSVSKKNYLGFDDTT

SEQ ID NO: 1229 - protein, 285 aa, Arabidopsis thaliana
  peptide (1)..(285): Ceres Seq. ID no. 12337729
  misc_feature (1)..(285): NCBI GI NO: 21554820 NR Description: putativepod-specific dehydrogenase SAC25
  misc_feature (1)..(285): NCBI GI NO: 18413950 NR Description: putative protein; protein id: At5g02540
  misc_feature (1)..(285): NCBI GI NO: 20260302 NR Description: putative protein [Arabidopsis thaliana]
  misc_feature (1)..(273): NCBI GI NO: 629592 NR Description: hypothetical protein - rape
  misc_feature (1)..(275): NCBI GI NO: 15224306 NR Description: putative oxidoreductase; protein id: At2g37540
  misc_feature (1)..(285): NCBI GI NO: 11250521 NR Description: hypothetical protein T22P11
  misc_feature (1)..(275): NCBI GI NO: 34895876 NR Description: P0009G03.18
  misc_feature (1)..(272): NCBI GI NO: 23297050 NR Description: unknown protein [Arabidopsis thaliana]
  misc_feature (1)..(274): NCBI GI NO: 30686197 NR Description: short-chain dehydrogenase/reductase family protein
  misc_feature (1)..(274): NCBI GI NO: 18416145 NR Description: putative protein; protein id: At4g23430
METARVLSKRGAHVVIGARNMGAAENAKTEILRQNANARVTLLQLDLSSIKSIKAFVREFHALHLPLNLLINNAGVMFCPYQLSEDGIELQFATNHIGHFLLTNLLLDTMKNTAKTSGVEGRILNVSSVAHIYTYQEGIQFDSINDICSYSDKRAYGQSKLANILHANELSRQLQEEGVNITANSVHPGLILTNLFQHTALLMRFLKFFSFYLWKNIPQGAATTCYVALHPSVKGVTGKYFADCNEVTPSKLARDETLAQKLWDFSVKLINSVSKKNYLGFDDTT

SEQ ID NO: 1230 - DNA, 720 bp, Arabidopsis thaliana
  misc_feature (1)..(720): Ceres Seq. ID no. 12334547
agtttagattctttatccgactactttgttcatcggttttgtttttctttttgtcttccggaaggcgaattacatgtcggaagcagcacagctcagaagaggtctaaagcctaaagggaagacttatgggttgaccaatcagaagagacgagagatcagagagatctttgatcttttcgacatagacggttcaggtagcatcgatgctagcgagctcaacgttgctatgaggtctcttggatttgagatgaataatcagcaaataaacgaattgatggcagaagtagataaaaaccaaagtggagccatagatttcgacgaatttgtgcatatgatgacaaccaaattcggagaacgagactccatagacgaattgtctaaggcgtttaagatcattgaccacgacaatagtgggaagatttcacctcgtgatataaagatgattgctaaagaattgggagaaaatttcacagataatgatatagaagaaatgatcgaagaagcagaccgtgacaaagatggagaagttaacttggaggagttcatgaagatgatgaagagaacctctttcggctaagtataaatcaattagtaatggttgtgaataatatttgttaatcaccttgatttataataataaagaagtttgatttgtggcttggtcgaataaaaatgtattgttgtataaaaataataatgtaattcacatccattattttg

SEQ ID NO: 1231 - protein, 167 aa, Arabidopsis thaliana
  peptide (1)..(167): Ceres Seq. ID no. 12334548
  misc_feature (63)..(91): Pfam Name: Pfam Description:  EF hand
  misc_feature (1)..(167): NCBI GI NO: 21554823 NR Description: caltractin-like protein [Arabidopsis thaliana]
  misc_feature (1)..(167): NCBI GI NO: 15234588 NR Description: caltractin-like protein; protein id: At4g37010.1
  misc_feature (1)..(166): NCBI GI NO: 729051 NR Description: CALTRACTIN (CENTRIN)
  misc_feature (12)..(167): NCBI GI NO: 15229732 NR Description: centrin; protein id: At3g50360.1
  misc_feature (1)..(167): NCBI GI NO: 6358509 NR Description: centrin [Nicotiana tabacum]
  misc_feature (1)..(167): NCBI GI NO: 6358511 NR Description: centrin [Nicotiana tabacum]
  misc_feature (1)..(167): NCBI GI NO: 34906754 NR Description: putative caltractin
  misc_feature (6)..(167): NCBI GI NO: 33146874 NR Description: putative caltractin
  misc_feature (3)..(165): NCBI GI NO: 543936 NR Description: CALTRACTIN (CENTRIN)
  misc_feature (1)..(165): NCBI GI NO: 2920835 NR Description: centrin [Marsilea vestita]
MSEAAQLRRGLKPKGKTYGLTNQKRREIREIFDLFDIDGSGSIDASELNVAMRSLGFEMNNQQINELMAEVDKNQSGAIDFDEFVHMMTTKFGERDSIDELSKAFKIIDHDNSGKISPRDIKMIAKELGENFTDNDIEEMIEEADRDKDGEVNLEEFMKMMKRTSFG

SEQ ID NO: 1232 - protein, 116 aa, Arabidopsis thaliana
  peptide (1)..(116): Ceres Seq. ID no. 12334549
  misc_feature (12)..(40): Pfam Name: Pfam Description:  EF hand
  misc_feature (1)..(116): NCBI GI NO: 21554823 NR Description: caltractin-like protein [Arabidopsis thaliana]
  misc_feature (1)..(116): NCBI GI NO: 15234588 NR Description: caltractin-like protein; protein id: At4g37010.1
  misc_feature (1)..(115): NCBI GI NO: 729051 NR Description: CALTRACTIN (CENTRIN)
  misc_feature (1)..(116): NCBI GI NO: 15229732 NR Description: centrin; protein id: At3g50360.1
  misc_feature (1)..(116): NCBI GI NO: 6358509 NR Description: centrin [Nicotiana tabacum]
  misc_feature (1)..(116): NCBI GI NO: 6358511 NR Description: centrin [Nicotiana tabacum]
  misc_feature (1)..(116): NCBI GI NO: 34906754 NR Description: putative caltractin
  misc_feature (1)..(116): NCBI GI NO: 33146874 NR Description: putative caltractin
  misc_feature (1)..(114): NCBI GI NO: 543936 NR Description: CALTRACTIN (CENTRIN)
  misc_feature (1)..(114): NCBI GI NO: 2920835 NR Description: centrin [Marsilea vestita]
MRSLGFEMNNQQINELMAEVDKNQSGAIDFDEFVHMMTTKFGERDSIDELSKAFKIIDHDNSGKISPRDIKMIAKELGENFTDNDIEEMIEEADRDKDGEVNLEEFMKMMKRTSFG

SEQ ID NO: 1233 - protein, 109 aa, Arabidopsis thaliana
  peptide (1)..(109): Ceres Seq. ID no. 12334550
  misc_feature (5)..(33): Pfam Name: Pfam Description:  EF hand
  misc_feature (1)..(109): NCBI GI NO: 21554823 NR Description: caltractin-like protein [Arabidopsis thaliana]
  misc_feature (1)..(109): NCBI GI NO: 15234588 NR Description: caltractin-like protein; protein id: At4g37010.1
  misc_feature (1)..(108): NCBI GI NO: 729051 NR Description: CALTRACTIN (CENTRIN)
  misc_feature (1)..(109): NCBI GI NO: 15229732 NR Description: centrin; protein id: At3g50360.1
  misc_feature (1)..(109): NCBI GI NO: 6358509 NR Description: centrin [Nicotiana tabacum]
  misc_feature (1)..(109): NCBI GI NO: 6358511 NR Description: centrin [Nicotiana tabacum]
  misc_feature (1)..(109): NCBI GI NO: 34906754 NR Description: putative caltractin
  misc_feature (1)..(109): NCBI GI NO: 33146874 NR Description: putative caltractin
  misc_feature (1)..(107): NCBI GI NO: 543936 NR Description: CALTRACTIN (CENTRIN)
  misc_feature (1)..(107): NCBI GI NO: 2920835 NR Description: centrin [Marsilea vestita]
MNNQQINELMAEVDKNQSGAIDFDEFVHMMTTKFGERDSIDELSKAFKIIDHDNSGKISPRDIKMIAKELGENFTDNDIEEMIEEADRDKDGEVNLEEFMKMMKRTSFG

SEQ ID NO: 1234 - DNA, 2758 bp, Arabidopsis thaliana
  misc_feature (1)..(2758): Ceres Seq. ID no. 13497291
acagcctcacttccaaacccttcgtttacagcaaaaaatcgaaaatggttgcctcagccgccgcacgacctcttgtcaccgtccaaggacttgacggtgacatgagcaccgatcaatccaccaccgtcactttaccagacgtcatgactgctccagttcgacctgacattgtcaacttcgtccacgcccaaatctccaacaacagccgtcagccttacgcagtctccaaaaaggccggtcaccaaacctccgccgagtcctggggaaccggaagagccgtgtcacgtatccctcgtgttcctggtggtggaactcaccgtgccggtcaagcagcgttcggaaacatgtgtcgtggtggtcgtatgtttgctccgactaagatctggagacgctggcaccgtcgtgtcaatgtcaacatgaagaggcacgcgattgtttctgcaatcgctgctactgctgttccagctcttgtgatggctcgtggtcacaagatcgagaatgttcctgagatgcctcttgttgttagcgactcagctgaagctgtggagaagacatcagctgcgatcaaggtattgaagcagatcggtgcttacgacgatgcggagaaagctaagaacagtattggaattcgtcctggtaaaggtaaaatgaggaatcgtcgttacatttctaggaaaggtcctcttgttgtgtttggaactgaaggagccaagattgtgaaagcttttaggaatcttcctggtgttgagctttgtcacgttgagaggcttaacttgttgaaattagcccctggtggtcaccttggtaggtttgtgatttggactaagtctgcttttgagaagcttgaatctatctatggctcgtttgagaaaccatcagagaagaagaagggttacgtcttgcctcgtgcgaagatggtgaatgctgatcttgctaggattattaactccgatgaggtacagagtgtggtgaacccgattaaggatggttccaagagagcggttctgaagaagaatccattgaagaaccttaatgtgatgttcaagttgaatccttatgctaagaccgcaaagagaatgtctctgttggctgaagcttcaagggttaaggctaagaaggagaagctcgagaagaagaggaaagtcgtcactaaggaggaggcccaagcgatcaaagcagcaggcaaggcttggtatcagactatgatttcagacagtgactacaccgagttcgataacttcaccaagtggcttggcgctagtcagtaatgatgctctcgtcatcgcaaagtctcttatatctaggcaaagattttggttttctgatttatgttcttcgtttgtattggatttatctgggattttatgttgttgagttggtaagacgatttttaagaactatgatggtgtttttcaaactcttttcaatctgtttccaaaaaaaaaaaaaaaactgacttccattgccaccacaacaaccaaaaccatatctcgccgccgccgtcgacgacgacgacacttgcttcaccaccgtatcgctatcaacagaggaaagagataagaagcgtgttaactctttcttctaattccatggatatttgtggcgttgattccgaaggaaaagagtttaatagcgtacaagagatgtggagagaagaaattggagaaggagacgaaactaaaaaaacccaatggtatagagatggtgtttcttattgggaaggtgttgaagcttctgttgatggagtattaggaggatatgggcatgtgaatgatgctgatattataggaagtgaggtttttcttaagactcttttgcaagaaagattagttaacaatgttggagctaatcagcatttagtagctcttgattgtggatctggtattggaagaatcactaaaaatcttctgattcgatactttaacgaggttgatcttcttgagcctgtagcacaatttttggatgcagctcgtgaaaatttggcatctgcaggctctgaaacgcacaaagctactaactttttctgtgtacctcttcaggagtttactccagctgctgggaggtatgatgtaatatgggttcaatggtgcattgggcatctcacggacaatgactttgtttctttctttaaccgcgcaaagggataccttaaacctggtgggtttttcgtcgtgaaagagaatctcgctaaaaatggatttgttttggataaagaggatcatagcatcaccagatcggatccatacttcaaacagctctttcgccaatgtgggttacatctctatagaacaaaggatcagaaaggtcttccacaagagttatttgctgtaaaaatgtatgcgttaacggttgacacaccacccaaaatccaccgaaccaggtcaaaaactcgaagcaacagaccgcagattatcaaatgacaaagcttccgattggtttactacggagtcttaatcgtttggtgtaaagagagaagctaccaaaggtgttgtaagatctggatcaaggcttggctgcttcattgtcacatggtttggttttgtgcatgctcgattctcctctcctccatcaccttaccaagtcataaactctcgtgtactcatgactaaacctgtttctgctccattctgttttttatctgataatttgtccggacttgaagaaattagaattgtgatccttttactgtagccacatattcctatatcatttttgtttaaaatatttaattgtactatatttcgatgttctacaagtc

SEQ ID NO: 1235 - protein, 421 aa, Arabidopsis thaliana
  peptide (1)..(421): Ceres Seq. ID no. 13497292
  misc_feature (40)..(284): Pfam Name: Pfam Description:  Ribosomal protein L4/L1 family
  misc_feature (15)..(421): NCBI GI NO: 15242558 NR Description: 60S ribosomal protein L4/L1 (RPL4D)
  misc_feature (15)..(421): NCBI GI NO: 26450328 NR Description: putative 60S ribosomal protein
  misc_feature (16)..(421): NCBI GI NO: 15232723 NR Description: 60S ribosomal protein L4/L1 (RPL4A)
  misc_feature (16)..(421): NCBI GI NO: 21593543 NR Description: 60S ribosomal protein L4-B (L1)
  misc_feature (17)..(421): NCBI GI NO: 17367847 NR Description: 60S ribosomal protein L4 (L1)
  misc_feature (22)..(421): NCBI GI NO: 34393487 NR Description: putative 60S ribosomal protein L4/L1
  misc_feature (115)..(421): NCBI GI NO: 13605831 NR Description: AT5g02870/F9G14_180 [Arabidopsis thaliana]
  misc_feature (18)..(421): NCBI GI NO: 34897236 NR Description: putative 60S ribosomal protein L1
  misc_feature (64)..(421): NCBI GI NO: 6441068 NR Description: 60S ribosomal protein L4 [Chlamydomonas sp. HS-5]
  misc_feature (20)..(386): NCBI GI NO: 1350686 NR Description: 60S RIBOSOMAL PROTEIN L4 (L1)
SLTSKPFVYSKKSKMVASAAARPLVTVQGLDGDMSTDQSTTVTLPDVMTAPVRPDIVNFVHAQISNNSRQPYAVSKKAGHQTSAESWGTGRAVSRIPRVPGGGTHRAGQAAFGNMCRGGRMFAPTKIWRRWHRRVNVNMKRHAIVSAIAATAVPALVMARGHKIENVPEMPLVVSDSAEAVEKTSAAIKVLKQIGAYDDAEKAKNSIGIRPGKGKMRNRRYISRKGPLVVFGTEGAKIVKAFRNLPGVELCHVERLNLLKLAPGGHLGRFVIWTKSAFEKLESIYGSFEKPSEKKKGYVLPRAKMVNADLARIINSDEVQSVVNPIKDGSKRAVLKKNPLKNLNVMFKLNPYAKTAKRMSLLAEASRVKAKKEKLEKKRKVVTKEEAQAIKAAGKAWYQTMISDSDYTEFDNFTKWLGASQ

SEQ ID NO: 1236 - protein, 407 aa, Arabidopsis thaliana
  peptide (1)..(407): Ceres Seq. ID no. 13497293
  misc_feature (26)..(270): Pfam Name: Pfam Description:  Ribosomal protein L4/L1 family
  misc_feature (1)..(407): NCBI GI NO: 15242558 NR Description: 60S ribosomal protein L4/L1 (RPL4D)
  misc_feature (1)..(407): NCBI GI NO: 26450328 NR Description: putative 60S ribosomal protein
  misc_feature (2)..(407): NCBI GI NO: 15232723 NR Description: 60S ribosomal protein L4/L1 (RPL4A)
  misc_feature (2)..(407): NCBI GI NO: 21593543 NR Description: 60S ribosomal protein L4-B (L1)
  misc_feature (3)..(407): NCBI GI NO: 17367847 NR Description: 60S ribosomal protein L4 (L1)
  misc_feature (8)..(407): NCBI GI NO: 34393487 NR Description: putative 60S ribosomal protein L4/L1
  misc_feature (101)..(407): NCBI GI NO: 13605831 NR Description: AT5g02870/F9G14_180 [Arabidopsis thaliana]
  misc_feature (4)..(407): NCBI GI NO: 34897236 NR Description: putative 60S ribosomal protein L1
  misc_feature (50)..(407): NCBI GI NO: 6441068 NR Description: 60S ribosomal protein L4 [Chlamydomonas sp. HS-5]
  misc_feature (6)..(372): NCBI GI NO: 1350686 NR Description: 60S RIBOSOMAL PROTEIN L4 (L1)
MVASAAARPLVTVQGLDGDMSTDQSTTVTLPDVMTAPVRPDIVNFVHAQISNNSRQPYAVSKKAGHQTSAESWGTGRAVSRIPRVPGGGTHRAGQAAFGNMCRGGRMFAPTKIWRRWHRRVNVNMKRHAIVSAIAATAVPALVMARGHKIENVPEMPLVVSDSAEAVEKTSAAIKVLKQIGAYDDAEKAKNSIGIRPGKGKMRNRRYISRKGPLVVFGTEGAKIVKAFRNLPGVELCHVERLNLLKLAPGGHLGRFVIWTKSAFEKLESIYGSFEKPSEKKKGYVLPRAKMVNADLARIINSDEVQSVVNPIKDGSKRAVLKKNPLKNLNVMFKLNPYAKTAKRMSLLAEASRVKAKKEKLEKKRKVVTKEEAQAIKAAGKAWYQTMISDSDYTEFDNFTKWLGASQ

SEQ ID NO: 1237 - protein, 388 aa, Arabidopsis thaliana
  peptide (1)..(388): Ceres Seq. ID no. 13497294
  misc_feature (7)..(251): Pfam Name: Pfam Description:  Ribosomal protein L4/L1 family
  misc_feature (1)..(388): NCBI GI NO: 15242558 NR Description: 60S ribosomal protein L4/L1 (RPL4D)
  misc_feature (1)..(388): NCBI GI NO: 26450328 NR Description: putative 60S ribosomal protein
  misc_feature (1)..(388): NCBI GI NO: 15232723 NR Description: 60S ribosomal protein L4/L1 (RPL4A)
  misc_feature (1)..(388): NCBI GI NO: 21593543 NR Description: 60S ribosomal protein L4-B (L1)
  misc_feature (1)..(388): NCBI GI NO: 17367847 NR Description: 60S ribosomal protein L4 (L1)
  misc_feature (1)..(388): NCBI GI NO: 34393487 NR Description: putative 60S ribosomal protein L4/L1
  misc_feature (82)..(388): NCBI GI NO: 13605831 NR Description: AT5g02870/F9G14_180 [Arabidopsis thaliana]
  misc_feature (1)..(388): NCBI GI NO: 34897236 NR Description: putative 60S ribosomal protein L1
  misc_feature (31)..(388): NCBI GI NO: 6441068 NR Description: 60S ribosomal protein L4 [Chlamydomonas sp. HS-5]
  misc_feature (1)..(353): NCBI GI NO: 1350686 NR Description: 60S RIBOSOMAL PROTEIN L4 (L1)
MSTDQSTTVTLPDVMTAPVRPDIVNFVHAQISNNSRQPYAVSKKAGHQTSAESWGTGRAVSRIPRVPGGGTHRAGQAAFGNMCRGGRMFAPTKIWRRWHRRVNVNMKRHAIVSAIAATAVPALVMARGHKIENVPEMPLVVSDSAEAVEKTSAAIKVLKQIGAYDDAEKAKNSIGIRPGKGKMRNRRYISRKGPLVVFGTEGAKIVKAFRNLPGVELCHVERLNLLKLAPGGHLGRFVIWTKSAFEKLESIYGSFEKPSEKKKGYVLPRAKMVNADLARIINSDEVQSVVNPIKDGSKRAVLKKNPLKNLNVMFKLNPYAKTAKRMSLLAEASRVKAKKEKLEKKRKVVTKEEAQAIKAAGKAWYQTMISDSDYTEFDNFTKWLGASQ

SEQ ID NO: 1238 - DNA, 1509 bp, Arabidopsis thaliana
  misc_feature (1)..(1509): Ceres Seq. ID no. 12602368
aagttcatacatggtacaaagctttagcaagttgtcgaatttcatcctacaattgaattttctctttactatttcaaagtttgaatgctcctctgttttcttcgttggttcattgagaaaaaaggaacagactttttacttgtgccattgaccaagaaccacaaagaggaggaaatcaaatggtttttgggagtttgatggattgattgattattcagcaaatcccacagaagaaatcagaagctgcttcttattttttggtcacgaccagtcttaatcaaagtagttcgtctcctacttgttattaaaagtgtatatttctgttgggagtttctgttctcctaccacctcattgacctttaatgatggactcatagtttggtgccaagtgacccaaaaaaaaaaaaaaaaaaaaagtcgatcttgaagatttcatactttttctggcaattctgtttggtttcagaggaaggagtcaaaacaatggggatcgtttcagaagaagccattgatgaattccaagagctgatggatcaagttgaggagccactgaagaaaacttatgagagagtccatcagggatatctaagggagaatttgggtcgttttctgaaagcacgagactggaacgtatgcaaagctcacacaatgctggttgagtgtttgcgttggagggtggataatgaaattgacagtatcctatctaaaccaattgttcctactgagttgtatagggatgtacgagattctcaactcataggaatgtcaggttacaccaaagagggcttgccggtctttgctattggcgtcggcctcagcacatttgacaaagcttctgttcactactatgtccaatctcacatacaaatcaatgaatatagagaccgtgttttactgccttctatttctaagaagaatgggaggccaatcaccacctgcgtcaaggttctagacatgacggggttgaagctttcagctctaagccaaatcaagttagtgactatcatatcgaccattgatgatctcaactatccagagaagacaaacacgtactatgttgtgaacgctccatatatattttccgcatgttggaaggttgtaaaacctcttttacaagagaggacaaggaaaaaagttcatgtcttatccggttgcggaagggatgaattattgaagattatggacttcacatccctgccacatttctgtagaagtggaagctctgggtcatctcaccacactcagagcgcaaattgtttttctatcaatcatcccttccatcaacagctatacaactatgtgaagcaccattatgaaacccaaggacaagcagaacctgcaaagcaaggatcattccacgtgggttttcctgagcctgaagctgaacgttgtgtgatagccaaaaccatagaatcggagctgcacaagtttgagaaccgcaacggtctggccgtgtccattgatgacagaaaatccagtcatgaaacactggcaaatggtgacctctga

SEQ ID NO: 1239 - protein, 341 aa, Arabidopsis thaliana
  peptide (1)..(341): Ceres Seq. ID no. 12602369
  misc_feature (135)..(239): Pfam Name: Pfam Description:  CRAL/TRIO domain
  misc_feature (1)..(341): NCBI GI NO: 15238794 NR Description: putative protein; protein id: At5g47730.1
  misc_feature (1)..(322): NCBI GI NO: 7488694 NR Description: phosphatidylinositol-phosphatidylcholine transfer proteinSEC14 homolog Ssh1
  misc_feature (1)..(318): NCBI GI NO: 15222786 NR Description: polyphosphoinositide binding protein, putative
  misc_feature (1)..(207): NCBI GI NO: 14532536 NR Description: AT5g47730/MCA23_5 [Arabidopsis thaliana]
  misc_feature (1)..(318): NCBI GI NO: 25295905 NR Description: protein F14J16.8 [imported] - Arabidopsis thaliana
  misc_feature (38)..(239): NCBI GI NO: 1173368 NR Description: SEC14 cytosolic factor
  misc_feature (3)..(262): NCBI GI NO: 15230198 NR Description: phosphatidylinositol transfer protein, putative
  misc_feature (3)..(262): NCBI GI NO: 11994666 NR Description: phosphatidylinositol/phosphatidylcholine transfer protein-like
  misc_feature (38)..(239): NCBI GI NO: 2119652 NR Description: SEC14 protein - yeast (Candida albicans)
  misc_feature (1)..(241): NCBI GI NO: 14335006 NR Description: AT4g39170/T22F8_70 [Arabidopsis thaliana]
MGIVSEEAIDEFQELMDQVEEPLKKTYERVHQGYLRENLGRFLKARDWNVCKAHTMLVECLRWRVDNEIDSILSKPIVPTELYRDVRDSQLIGMSGYTKEGLPVFAIGVGLSTFDKASVHYYVQSHIQINEYRDRVLLPSISKKNGRPITTCVKVLDMTGLKLSALSQIKLVTIISTIDDLNYPEKTNTYYVVNAPYIFSACWKVVKPLLQERTRKKVHVLSGCGRDELLKIMDFTSLPHFCRSGSSGSSHHTQSANCFSINHPFHQQLYNYVKHHYETQGQAEPAKQGSFHVGFPEPEAERCVIAKTIESELHKFENRNGLAVSIDDRKSSHETLANGDL

SEQ ID NO: 1240 - protein, 326 aa, Arabidopsis thaliana
  peptide (1)..(326): Ceres Seq. ID no. 12602370
  misc_feature (120)..(224): Pfam Name: Pfam Description:  CRAL/TRIO domain
  misc_feature (1)..(326): NCBI GI NO: 15238794 NR Description: putative protein; protein id: At5g47730.1
  misc_feature (1)..(307): NCBI GI NO: 7488694 NR Description: phosphatidylinositol-phosphatidylcholine transfer proteinSEC14 homolog Ssh1
  misc_feature (1)..(303): NCBI GI NO: 15222786 NR Description: polyphosphoinositide binding protein, putative
  misc_feature (1)..(192): NCBI GI NO: 14532536 NR Description: AT5g47730/MCA23_5 [Arabidopsis thaliana]
  misc_feature (1)..(303): NCBI GI NO: 25295905 NR Description: protein F14J16.8 [imported] - Arabidopsis thaliana
  misc_feature (23)..(224): NCBI GI NO: 1173368 NR Description: SEC14 cytosolic factor
  misc_feature (1)..(247): NCBI GI NO: 15230198 NR Description: phosphatidylinositol transfer protein, putative
  misc_feature (1)..(247): NCBI GI NO: 11994666 NR Description: phosphatidylinositol/phosphatidylcholine transfer protein-like
  misc_feature (23)..(224): NCBI GI NO: 2119652 NR Description: SEC14 protein - yeast (Candida albicans)
  misc_feature (1)..(226): NCBI GI NO: 14335006 NR Description: AT4g39170/T22F8_70 [Arabidopsis thaliana]
MDQVEEPLKKTYERVHQGYLRENLGRFLKARDWNVCKAHTMLVECLRWRVDNEIDSILSKPIVPTELYRDVRDSQLIGMSGYTKEGLPVFAIGVGLSTFDKASVHYYVQSHIQINEYRDRVLLPSISKKNGRPITTCVKVLDMTGLKLSALSQIKLVTIISTIDDLNYPEKTNTYYVVNAPYIFSACWKVVKPLLQERTRKKVHVLSGCGRDELLKIMDFTSLPHFCRSGSSGSSHHTQSANCFSINHPFHQQLYNYVKHHYETQGQAEPAKQGSFHVGFPEPEAERCVIAKTIESELHKFENRNGLAVSIDDRKSSHETLANGDL

SEQ ID NO: 1241 - protein, 286 aa, Arabidopsis thaliana
  peptide (1)..(286): Ceres Seq. ID no. 12602371
  misc_feature (80)..(184): Pfam Name: Pfam Description:  CRAL/TRIO domain
  misc_feature (1)..(286): NCBI GI NO: 15238794 NR Description: putative protein; protein id: At5g47730.1
  misc_feature (1)..(267): NCBI GI NO: 7488694 NR Description: phosphatidylinositol-phosphatidylcholine transfer proteinSEC14 homolog Ssh1
  misc_feature (1)..(263): NCBI GI NO: 15222786 NR Description: polyphosphoinositide binding protein, putative
  misc_feature (1)..(152): NCBI GI NO: 14532536 NR Description: AT5g47730/MCA23_5 [Arabidopsis thaliana]
  misc_feature (1)..(263): NCBI GI NO: 25295905 NR Description: protein F14J16.8 [imported] - Arabidopsis thaliana
  misc_feature (1)..(184): NCBI GI NO: 1173368 NR Description: SEC14 cytosolic factor
  misc_feature (1)..(207): NCBI GI NO: 15230198 NR Description: phosphatidylinositol transfer protein, putative
  misc_feature (1)..(207): NCBI GI NO: 11994666 NR Description: phosphatidylinositol/phosphatidylcholine transfer protein-like
  misc_feature (1)..(184): NCBI GI NO: 2119652 NR Description: SEC14 protein - yeast (Candida albicans)
  misc_feature (1)..(186): NCBI GI NO: 14335006 NR Description: AT4g39170/T22F8_70 [Arabidopsis thaliana]
MLVECLRWRVDNEIDSILSKPIVPTELYRDVRDSQLIGMSGYTKEGLPVFAIGVGLSTFDKASVHYYVQSHIQINEYRDRVLLPSISKKNGRPITTCVKVLDMTGLKLSALSQIKLVTIISTIDDLNYPEKTNTYYVVNAPYIFSACWKVVKPLLQERTRKKVHVLSGCGRDELLKIMDFTSLPHFCRSGSSGSSHHTQSANCFSINHPFHQQLYNYVKHHYETQGQAEPAKQGSFHVGFPEPEAERCVIAKTIESELHKFENRNGLAVSIDDRKSSHETLANGDL

SEQ ID NO: 1242 - DNA, 2463 bp, Arabidopsis thaliana
  misc_feature (1)..(2463): Ceres Seq. ID no. 12601343
tatatctcttcctcctactttcccttagggtttttcagcttcaaaccctccttgcactctccgcttccctccgttacctttacttctctattgcttagctcgaaaaatggcatcttcagccgcccaaatccacgttctcggcggaattggattcgcttcttcttcttcttccaagagaaatctcaatggtaaaggcggtacctttatgccgagaagtgccttcttcggtacaagaaccggtcctttctccacacccacttctgcttttctcagaatgggcaccagaaatggcggcggcgcttctagatacgcggttggtccggttcgtgtggttaacgagaaggttgttggaattgatttgggtacgactaactctgcagtagctgctatggaaggaggtaagcctacgattgtgactaacgctgaaggtcagaggacaacgccttctgttgtggcttacacgaagagtggtgataggcttgttgggcagattgcgaagaggcaagctgttgttaatcccgagaatactttcttctcagtgaagaggtttattggtaggaagatgaacgaggttgatgaagagtctaagcaggtttcttacagagttgttagagatgagaacaataatgttaagcttgagtgtcctgccattaacaaacaatttgctgctgaggagatttcagctcaggttctaaggaaacttgtggatgatgcatcaagattcttgaacgacaaagtaaccaaggctgtcatcactgtgcctgcttacttcaacgattcacagaggacagctacaaaagatgctggtcgaattgctgggttggaagttcttcgtattatcaatgagcccacagctgcttcattggcttatgggtttgacagaaaagccaatgaaacaatcctagtcttcgatcttggtggtggtacctttgatgtctcagtgcttgaggttggtgatggtgtgtttgaagtgctttccacttctggcgacacacacttgggtggtgatgactttgacaagagagttgttgattggcttgctgcagaattcaagaaagacgaagggatagatcttctgaaagacaagcaagctcttcagaggttaacagaggcagcagaaaaagctaaaattgagctttcttcactgactcagacaaatatgagcttaccttttatcacggccacagctgatggacctaaacacatagaaaccaccctcacacgtgccaagttcgaagaattgtgttcagatttacttgacagggtcaggactcctgtcgagaattccctgcgggatgcaaagctcagcttcaaagatattgatgaagtcatccttgtcggtggatccacacgtattcctgctgttcaggaactcgtgaggaaggtgactgggaaagaacctaatgttacagtaaatcctgacgaggttgtagcgttaggtgctgcagtccaggctggtgttcttgctggagatgtgagtgacattgtgcttcttgatgtgacaccgctttcgattggtttggagaccctaggtggtgttatgactaagattattccaaggaacaccacactgcctacttctaaatcagaagtcttttcaactgctgctgatggacagacaagtgttgagattaatgtgttgcagggtgagagggagtttgttagggataacaagtctcttggtagcttccgtctagatggtatcccccctgcaccacgtggagttccacaaatcgaagtcaaatttgacattgatgccaatggaattctatctgtcagtgctgttgacaagggcacaggaaagaagcaagacatcaccattactggcgcaagtacattgcccaaggatgaggtagaccaaatggtccaggaggcagaaagatttgcaaaagatgacaaagagaagagagacgcaatcgacacgaaaaaccaagcagattcagtggtgtaccagacagagaagcaactgaaagaactaggagagaaaattccaggtgaagtgaaagagaaggtggaggctaagctacaagagctgaaagacaagataggaagtggatcaacccaagaaatcaaagacgccatggctgctcttaaccaagaagtgatgcagattggtcagtctctatacaaccagcctggagctggaggtccaggtgcaggtccttccccgggaggcgaaggtgcttcatcaggagattcatcttcaagtaaaggaggagatggtgatgatgtgatcgatgctgacttcacagacagccaatgagaaaacaaactaggaaggctttggaattcatacatgggatgcgatgggagagacaaatgattttgtaggttggatttgagaacacaaatgaatttaagcaatgcttgtggacaacatttatttgtcgttagaaggaagcagtgtggttacagaggatgatgtttaatacataataatatgcaagccttctcttacacggt

SEQ ID NO: 1243 - protein, 718 aa, Arabidopsis thaliana
  peptide (1)..(718): Ceres Seq. ID no. 12601344
  misc_feature (80)..(675): Pfam Name: Pfam Description:  Hsp70 protein
  misc_feature (1)..(718): NCBI GI NO: 7441880 NR Description: dnaK-type molecular chaperone HSC70-9
  misc_feature (1)..(718): NCBI GI NO: 7441856 NR Description: heat shock protein, 70K, chloroplast - cucumber
  misc_feature (1)..(718): NCBI GI NO: 1928991 NR Description: heat shock protein 70 precursor
  misc_feature (1)..(718): NCBI GI NO: 399942 NR Description: Stromal 70 kDa heat shock-related protein
  misc_feature (1)..(718): NCBI GI NO: 445605 NR Description: heat shock protein hsp70
  misc_feature (134)..(702): NCBI GI NO: 1708311 NR Description: Stromal 70 kDa heat shock-related protein
  misc_feature (64)..(718): NCBI GI NO: 7441862 NR Description: dnaK-type molecular chaperone hsp70b precursor
  misc_feature (79)..(668): NCBI GI NO: 3121997 NR Description: Chaperone protein dnaK
  misc_feature (79)..(668): NCBI GI NO: 17230482 NR Description: DnaK-type molecular chaperone
  misc_feature (79)..(666): NCBI GI NO: 23040330 NR Description: hypothetical protein
MASSAAQIHVLGGIGFASSSSSKRNLNGKGGTFMPRSAFFGTRTGPFSTPTSAFLRMGTRNGGGASRYAVGPVRVVNEKVVGIDLGTTNSAVAAMEGGKPTIVTNAEGQRTTPSVVAYTKSGDRLVGQIAKRQAVVNPENTFFSVKRFIGRKMNEVDEESKQVSYRVVRDENNNVKLECPAINKQFAAEEISAQVLRKLVDDASRFLNDKVTKAVITVPAYFNDSQRTATKDAGRIAGLEVLRIINEPTAASLAYGFDRKANETILVFDLGGGTFDVSVLEVGDGVFEVLSTSGDTHLGGDDFDKRVVDWLAAEFKKDEGIDLLKDKQALQRLTEAAEKAKIELSSLTQTNMSLPFITATADGPKHIETTLTRAKFEELCSDLLDRVRTPVENSLRDAKLSFKDIDEVILVGGSTRIPAVQELVRKVTGKEPNVTVNPDEVVALGAAVQAGVLAGDVSDIVLLDVTPLSIGLETLGGVMTKIIPRNTTLPTSKSEVFSTAADGQTSVEINVLQGEREFVRDNKSLGSFRLDGIPPAPRGVPQIEVKFDIDANGILSVSAVDKGTGKKQDITITGASTLPKDEVDQMVQEAERFAKDDKEKRDAIDTKNQADSVVYQTEKQLKELGEKIPGEVKEKVEAKLQELKDKIGSGSTQEIKDAMAALNQEVMQIGQSLYNQPGAGGPGAGPSPGGEGASSGDSSSSKGGDGDDVIDADFTDSQ

SEQ ID NO: 1244 - protein, 685 aa, Arabidopsis thaliana
  peptide (1)..(685): Ceres Seq. ID no. 12601345
  misc_feature (47)..(642): Pfam Name: Pfam Description:  Hsp70 protein
  misc_feature (1)..(685): NCBI GI NO: 7441880 NR Description: dnaK-type molecular chaperone HSC70-9
  misc_feature (1)..(685): NCBI GI NO: 7441856 NR Description: heat shock protein, 70K, chloroplast - cucumber
  misc_feature (1)..(685): NCBI GI NO: 1928991 NR Description: heat shock protein 70 precursor
  misc_feature (1)..(685): NCBI GI NO: 399942 NR Description: Stromal 70 kDa heat shock-related protein
  misc_feature (1)..(685): NCBI GI NO: 445605 NR Description: heat shock protein hsp70
  misc_feature (101)..(669): NCBI GI NO: 1708311 NR Description: Stromal 70 kDa heat shock-related protein
  misc_feature (31)..(685): NCBI GI NO: 7441862 NR Description: dnaK-type molecular chaperone hsp70b precursor
  misc_feature (46)..(635): NCBI GI NO: 3121997 NR Description: Chaperone protein dnaK
  misc_feature (46)..(635): NCBI GI NO: 17230482 NR Description: DnaK-type molecular chaperone
  misc_feature (46)..(633): NCBI GI NO: 23040330 NR Description: hypothetical protein
MPRSAFFGTRTGPFSTPTSAFLRMGTRNGGGASRYAVGPVRVVNEKVVGIDLGTTNSAVAAMEGGKPTIVTNAEGQRTTPSVVAYTKSGDRLVGQIAKRQAVVNPENTFFSVKRFIGRKMNEVDEESKQVSYRVVRDENNNVKLECPAINKQFAAEEISAQVLRKLVDDASRFLNDKVTKAVITVPAYFNDSQRTATKDAGRIAGLEVLRIINEPTAASLAYGFDRKANETILVFDLGGGTFDVSVLEVGDGVFEVLSTSGDTHLGGDDFDKRVVDWLAAEFKKDEGIDLLKDKQALQRLTEAAEKAKIELSSLTQTNMSLPFITATADGPKHIETTLTRAKFEELCSDLLDRVRTPVENSLRDAKLSFKDIDEVILVGGSTRIPAVQELVRKVTGKEPNVTVNPDEVVALGAAVQAGVLAGDVSDIVLLDVTPLSIGLETLGGVMTKIIPRNTTLPTSKSEVFSTAADGQTSVEINVLQGEREFVRDNKSLGSFRLDGIPPAPRGVPQIEVKFDIDANGILSVSAVDKGTGKKQDITITGASTLPKDEVDQMVQEAERFAKDDKEKRDAIDTKNQADSVVYQTEKQLKELGEKIPGEVKEKVEAKLQELKDKIGSGSTQEIKDAMAALNQEVMQIGQSLYNQPGAGGPGAGPSPGGEGASSGDSSSSKGGDGDDVIDADFTDSQ

SEQ ID NO: 1245 - protein, 662 aa, Arabidopsis thaliana
  peptide (1)..(662): Ceres Seq. ID no. 12601346
  misc_feature (24)..(619): Pfam Name: Pfam Description:  Hsp70 protein
  misc_feature (1)..(662): NCBI GI NO: 7441880 NR Description: dnaK-type molecular chaperone HSC70-9
  misc_feature (1)..(662): NCBI GI NO: 7441856 NR Description: heat shock protein, 70K, chloroplast - cucumber
  misc_feature (1)..(662): NCBI GI NO: 1928991 NR Description: heat shock protein 70 precursor
  misc_feature (1)..(662): NCBI GI NO: 399942 NR Description: Stromal 70 kDa heat shock-related protein
  misc_feature (1)..(662): NCBI GI NO: 445605 NR Description: heat shock protein hsp70
  misc_feature (78)..(646): NCBI GI NO: 1708311 NR Description: Stromal 70 kDa heat shock-related protein
  misc_feature (8)..(662): NCBI GI NO: 7441862 NR Description: dnaK-type molecular chaperone hsp70b precursor
  misc_feature (23)..(612): NCBI GI NO: 3121997 NR Description: Chaperone protein dnaK
  misc_feature (23)..(612): NCBI GI NO: 17230482 NR Description: DnaK-type molecular chaperone
  misc_feature (23)..(610): NCBI GI NO: 23040330 NR Description: hypothetical protein
MGTRNGGGASRYAVGPVRVVNEKVVGIDLGTTNSAVAAMEGGKPTIVTNAEGQRTTPSVVAYTKSGDRLVGQIAKRQAVVNPENTFFSVKRFIGRKMNEVDEESKQVSYRVVRDENNNVKLECPAINKQFAAEEISAQVLRKLVDDASRFLNDKVTKAVITVPAYFNDSQRTATKDAGRIAGLEVLRIINEPTAASLAYGFDRKANETILVFDLGGGTFDVSVLEVGDGVFEVLSTSGDTHLGGDDFDKRVVDWLAAEFKKDEGIDLLKDKQALQRLTEAAEKAKIELSSLTQTNMSLPFITATADGPKHIETTLTRAKFEELCSDLLDRVRTPVENSLRDAKLSFKDIDEVILVGGSTRIPAVQELVRKVTGKEPNVTVNPDEVVALGAAVQAGVLAGDVSDIVLLDVTPLSIGLETLGGVMTKIIPRNTTLPTSKSEVFSTAADGQTSVEINVLQGEREFVRDNKSLGSFRLDGIPPAPRGVPQIEVKFDIDANGILSVSAVDKGTGKKQDITITGASTLPKDEVDQMVQEAERFAKDDKEKRDAIDTKNQADSVVYQTEKQLKELGEKIPGEVKEKVEAKLQELKDKIGSGSTQEIKDAMAALNQEVMQIGQSLYNQPGAGGPGAGPSPGGEGASSGDSSSSKGGDGDDVIDADFTDSQ

SEQ ID NO: 1246 - DNA, 533 bp, Arabidopsis thaliana
  misc_feature (1)..(533): Ceres Seq. ID no. 12673734
aaccataacacaaatacaccaaaaaaaaaaaaacagaaagtaacatgagatctctcttattagccgtgtgcctggttcttgctttacactgcggtgaagcagccgtgtcttgcaacacggtgattgcggatctttacccttgcttatcctacgtgactcagggcggaccggtcccaaccctctgctgcaacggtctcacaacactcaagagtcaggctcaaacttctgtggaccgtcagggggtctgtcgttgcatcaaatctgctattggaggactcactctctctcctagaaccatccaaaatgctttggaattgccttctaaatgtggtgtcgatctcccttacaagttcagcccttccactgactgcgacagtatccagtgagacaagcagaaaatcttaaaggaagctactacaagaactataataacctaataattaataaatgagggcattggtttgctagttgctaattgatcagtgatgtattgtcattttgaatgttctaatatcagcaggcacttatctctg

SEQ ID NO: 1247 - protein, 113 aa, Arabidopsis thaliana
  peptide (1)..(113): Ceres Seq. ID no. 12673735
  misc_feature (23)..(109): Pfam Name: Pfam Description:  Protease inhibitor/seed storage/LTP family
  misc_feature (1)..(113): NCBI GI NO: 15231964 NR Description: putative nonspecific lipid-transfer protein
  misc_feature (1)..(113): NCBI GI NO: 15241086 NR Description: lipid-transfer protein-like; protein id: At5g01870
  misc_feature (8)..(113): NCBI GI NO: 16903206 NR Description: lipid transfer protein precursor
  misc_feature (3)..(113): NCBI GI NO: 6782436 NR Description: lipid-transfer protein [Nicotiana glauca]
  misc_feature (4)..(113): NCBI GI NO: 2497753 NR Description: NONSPECIFIC LIPID-TRANSFER PROTEIN 3 PRECURSOR
  misc_feature (9)..(113): NCBI GI NO: 6093512 NR Description: NONSPECIFIC LIPID-TRANSFER PROTEIN PRECURSOR
  misc_feature (5)..(113): NCBI GI NO: 16930759 NR Description: lipid transfer protein-like protein
  misc_feature (9)..(113): NCBI GI NO: 7438274 NR Description: lipid transfer protein SDi-9
  misc_feature (3)..(113): NCBI GI NO: 18477856 NR Description: lipid transfer protein [Fragaria x ananassa]
  misc_feature (5)..(113): NCBI GI NO: 11095210 NR Description: lipid transfer protein 3 precursor
MRSLLLAVCLVLALHCGEAAVSCNTVIADLYPCLSYVTQGGPVPTLCCNGLTTLKSQAQTSVDRQGVCRCIKSAIGGLTLSPRTIQNALELPSKCGVDLPYKFSPSTDCDSIQ

SEQ ID NO: 1248 - DNA, 758 bp, Arabidopsis thaliana
  misc_feature (1)..(758): Ceres Seq. ID no. 13487077
aaaaaaaaaaaagcatttacacaacgaagatcattaatggctctcgaggcatggtttatggatgatagcaatgaggaccagagacttcctcatcatcgtaacccgaaagaactcgtctcgttggattacttggcagagttgggagtgttgtactggaagttgaaccctgagaactacgagaatgattctgaacttagcaagattagagaagacaggggttacgattacatggatttgctggatctgtgtcccgagaaagtcagcaactacgaagaaaagctgaagaactttttcacagaacacattcacaaggacgaagagattcggtactgcctagcaggaagtggctactttgatgttagggacaaggatgatcgttggatccgtatctggatgcaacctggcgatctcattgtccttcctgccggaatctaccaccggttcacactcgacgccagcaactacatcaagctaatgaggctgttcgtgggggaaccggtttggacaccatataaccggccacaggaagaacatcctgttaggaaaaagtatatccacggcttaacctacaagtttggagaaaccgttaaagcacattaacaatattaatatatgcttgttgtgtaatttgtatgtattgtttactctttagtcttaagcagtaaaataaaaacagcggctccttctggatagttgttcttgtaacatacttttgcgatgtatgcttttatacataaaaaaaatagtgtgtatttatc

SEQ ID NO: 1249 - protein, 199 aa, Arabidopsis thaliana
  peptide (1)..(199): Ceres Seq. ID no. 13487078
  misc_feature (16)..(170): Pfam Name: Pfam Description:  ARD/ARD' family
  misc_feature (13)..(199): NCBI GI NO: 18422379 NR Description: expressed protein [Arabidopsis thaliana]
  misc_feature (15)..(199): NCBI GI NO: 10177955 NR Description: gene_id:MQD19
  misc_feature (13)..(199): NCBI GI NO: 21554849 NR Description: submergence induced protein 2A
  misc_feature (15)..(185): NCBI GI NO: 18414289 NR Description: expressed protein [Arabidopsis thaliana]
  misc_feature (15)..(198): NCBI GI NO: 7489559 NR Description: probable submergence induced
  misc_feature (15)..(185): NCBI GI NO: 18414293 NR Description: expressed protein [Arabidopsis thaliana]
  misc_feature (15)..(198): NCBI GI NO: 14522834 NR Description: iron-deficiency induced gene [Hordeum vulgare]
  misc_feature (15)..(194): NCBI GI NO: 7489558 NR Description: probable submergence induced protein 2 - rice
  misc_feature (15)..(194): NCBI GI NO: 37534408 NR Description: putative zinc finger protein ID1
  misc_feature (15)..(198): NCBI GI NO: 34902616 NR Description: Putative probable submergence induced
KKKKAFTQRRSLMALEAWFMDDSNEDQRLPHHRNPKELVSLDYLAELGVLYWKLNPENYENDSELSKIREDRGYDYMDLLDLCPEKVSNYEEKLKNFFTEHIHKDEEIRYCLAGSGYFDVRDKDDRWIRIWMQPGDLIVLPAGIYHRFTLDASNYIKLMRLFVGEPVWTPYNRPQEEHPVRKKYIHGLTYKFGETVKAH

SEQ ID NO: 1250 - protein, 187 aa, Arabidopsis thaliana
  peptide (1)..(187): Ceres Seq. ID no. 13487079
  misc_feature (4)..(158): Pfam Name: Pfam Description:  ARD/ARD' family
  misc_feature (1)..(187): NCBI GI NO: 18422379 NR Description: expressed protein [Arabidopsis thaliana]
  misc_feature (3)..(187): NCBI GI NO: 10177955 NR Description: gene_id:MQD19
  misc_feature (1)..(187): NCBI GI NO: 21554849 NR Description: submergence induced protein 2A
  misc_feature (3)..(173): NCBI GI NO: 18414289 NR Description: expressed protein [Arabidopsis thaliana]
  misc_feature (3)..(186): NCBI GI NO: 7489559 NR Description: probable submergence induced
  misc_feature (3)..(173): NCBI GI NO: 18414293 NR Description: expressed protein [Arabidopsis thaliana]
  misc_feature (3)..(186): NCBI GI NO: 14522834 NR Description: iron-deficiency induced gene [Hordeum vulgare]
  misc_feature (3)..(182): NCBI GI NO: 7489558 NR Description: probable submergence induced protein 2 - rice
  misc_feature (3)..(182): NCBI GI NO: 37534408 NR Description: putative zinc finger protein ID1
  misc_feature (3)..(186): NCBI GI NO: 34902616 NR Description: Putative probable submergence induced
MALEAWFMDDSNEDQRLPHHRNPKELVSLDYLAELGVLYWKLNPENYENDSELSKIREDRGYDYMDLLDLCPEKVSNYEEKLKNFFTEHIHKDEEIRYCLAGSGYFDVRDKDDRWIRIWMQPGDLIVLPAGIYHRFTLDASNYIKLMRLFVGEPVWTPYNRPQEEHPVRKKYIHGLTYKFGETVKAH

SEQ ID NO: 1251 - protein, 180 aa, Arabidopsis thaliana
  peptide (1)..(180): Ceres Seq. ID no. 13487080
  misc_feature (1)..(151): Pfam Name: Pfam Description:  ARD/ARD' family
  misc_feature (1)..(180): NCBI GI NO: 18422379 NR Description: expressed protein [Arabidopsis thaliana]
  misc_feature (1)..(180): NCBI GI NO: 10177955 NR Description: gene_id:MQD19
  misc_feature (1)..(180): NCBI GI NO: 21554849 NR Description: submergence induced protein 2A
  misc_feature (1)..(166): NCBI GI NO: 18414289 NR Description: expressed protein [Arabidopsis thaliana]
  misc_feature (1)..(179): NCBI GI NO: 7489559 NR Description: probable submergence induced
  misc_feature (1)..(166): NCBI GI NO: 18414293 NR Description: expressed protein [Arabidopsis thaliana]
  misc_feature (1)..(179): NCBI GI NO: 14522834 NR Description: iron-deficiency induced gene [Hordeum vulgare]
  misc_feature (1)..(175): NCBI GI NO: 7489558 NR Description: probable submergence induced protein 2 - rice
  misc_feature (1)..(175): NCBI GI NO: 37534408 NR Description: putative zinc finger protein ID1
  misc_feature (1)..(179): NCBI GI NO: 34902616 NR Description: Putative probable submergence induced
MDDSNEDQRLPHHRNPKELVSLDYLAELGVLYWKLNPENYENDSELSKIREDRGYDYMDLLDLCPEKVSNYEEKLKNFFTEHIHKDEEIRYCLAGSGYFDVRDKDDRWIRIWMQPGDLIVLPAGIYHRFTLDASNYIKLMRLFVGEPVWTPYNRPQEEHPVRKKYIHGLTYKFGETVKAH

SEQ ID NO: 1252 - DNA, 1486 bp, Arabidopsis thaliana
  misc_feature (1)..(1486): Ceres Seq. ID no. 12370913
aacattctcattattcacccaaggagagagatcggagctaaaaagccatctctcgccggaaaatttctcagttttcttattaccttagccacagacaacaagacgacagaggaatctaatcttagccccctttcctctctgtctctctctatatctctgtctttaggctttgagatatcttcaacacgaagctttttgcttcttttttttatctctttaaaaaattccagccaatggttcgaatccaatagtagcttcaaaggtcatggatttagtcaggggtttgtggaggaaacatagaaggaagattttggtgacgacgacttgtttgggaagtgggtatttgctctataaactatacaatgcccatactcgtaagctcgctgatttggaacgagagcttgctaatgagcgtgaaaacgacgagatcatcaaaacccaaatgaaggcacatttcgataacattcagatgattgctgatactactacattgcctcacgcaattcatcacttgagtagtcgtgtagttgaagagattgatgtctcgagtattatggataagctaagcaaaggcaaaggaatattgattccttctgagaagcttcaactctggaatgagctcaaaattttgagtttcacgagaatggtcttgtccctttggtcggtcactatgcttagtttgtacattagggttcaagtcaatattttgggcagacatttatatatcgacactgctagaggtcttgggagctcccatttacttgacgaactagatctcatagagagagatgatgaacaaaagtttttgacaagcgctgattttcttgcgaccagtggcatgccgagtttgatttctaacatgcagaacgcagtgaaagaagttctcaagggaaagcagttaaaggatgtgttaaccacaagtgctcttcgagaaactgtgatgcggattctcgatgtgtttatgagcacaggaagtccacaccactgggtagattatctaatgatgtcccaagacgcaaccactgatgtttcctcttctgatgcaactgttaccaagtttcatctactcataaccgagacacgggaagtactcacaaacaatttttcaaatgtagcagagatctcactcaagtgttgtgccgttgcgttagtagaggagatggaaacgcagaccggtctggccacagggatgcaattggcaaagctattaccacagattgagaaaaccatgccggagatttcagctgagccggagaagaaccggttcttgcaactcatccgagatttgcctgaagttaaactcttttttactcttttatacgcaaatatgcctcagtagcattattaaaccccattgccaaaaattgtttcctgatcactttttatcatatgtttcgatttacttcaaaatagtaaaaccaaacatctctagaataattgttcaatatctatatcaaatcatttactaatatagtaatattgcagc

SEQ ID NO: 1253 - protein, 357 aa, Arabidopsis thaliana
  peptide (1)..(357): Ceres Seq. ID no. 12370914
  misc_feature (1)..(355): Pfam Name: Pfam Description:  Peroxin-3
  misc_feature (1)..(357): NCBI GI NO: 18401790 NR Description: expressed protein; protein id: At3g18160
  misc_feature (1)..(357): NCBI GI NO: 21554142 NR Description: unknown [Arabidopsis thaliana]
  misc_feature (1)..(357): NCBI GI NO: 22330115 NR Description: expressed protein; protein id: At1g48635
  misc_feature (55)..(344): NCBI GI NO: 12597815 NR Description: lysine and histidine specific transporter
  misc_feature (10)..(62): NCBI GI NO: 12597815 NR Description: lysine and histidine specific transporter
  misc_feature (55)..(333): NCBI GI NO: 12321594 NR Description: hypothetical protein, 3' partial
  misc_feature (10)..(62): NCBI GI NO: 12321594 NR Description: hypothetical protein, 3' partial
  misc_feature (167)..(357): NCBI GI NO: 9294071 NR Description: gene_id:MRC8.15~unknown protein
  misc_feature (9)..(352): NCBI GI NO: 28278477 NR Description: Similar to peroxisomal biogenesis factor 3
  misc_feature (3)..(299): NCBI GI NO: 12230450 NR Description: Peroxisomal assembly protein PEX3 (Peroxin-3)
MDLVRGLWRKHRRKILVTTTCLGSGYLLYKLYNAHTRKLADLERELANERENDEIIKTQMKAHFDNIQMIADTTTLPHAIHHLSSRVVEEIDVSSIMDKLSKGKGILIPSEKLQLWNELKILSFTRMVLSLWSVTMLSLYIRVQVNILGRHLYIDTARGLGSSHLLDELDLIERDDEQKFLTSADFLATSGMPSLISNMQNAVKEVLKGKQLKDVLTTSALRETVMRILDVFMSTGSPHHWVDYLMMSQDATTDVSSSDATVTKFHLLITETREVLTNNFSNVAEISLKCCAVALVEEMETQTGLATGMQLAKLLPQIEKTMPEISAEPEKNRFLQLIRDLPEVKLFFTLLYANMPQ

SEQ ID NO: 1254 - protein, 298 aa, Arabidopsis thaliana
  peptide (1)..(298): Ceres Seq. ID no. 12370915
  misc_feature (1)..(296): Pfam Name: Pfam Description:  Peroxin-3
  misc_feature (1)..(298): NCBI GI NO: 18401790 NR Description: expressed protein; protein id: At3g18160
  misc_feature (1)..(298): NCBI GI NO: 21554142 NR Description: unknown [Arabidopsis thaliana]
  misc_feature (1)..(298): NCBI GI NO: 22330115 NR Description: expressed protein; protein id: At1g48635
  misc_feature (1)..(285): NCBI GI NO: 12597815 NR Description: lysine and histidine specific transporter
  misc_feature (1)..(274): NCBI GI NO: 12321594 NR Description: hypothetical protein, 3' partial
  misc_feature (108)..(298): NCBI GI NO: 9294071 NR Description: gene_id:MRC8.15~unknown protein
  misc_feature (1)..(293): NCBI GI NO: 28278477 NR Description: Similar to peroxisomal biogenesis factor 3
  misc_feature (1)..(240): NCBI GI NO: 12230450 NR Description: Peroxisomal assembly protein PEX3 (Peroxin-3)
  misc_feature (1)..(240): NCBI GI NO: 4505727 NR Description: peroxisomal biogenesis factor 3 [Homo sapiens]
  misc_feature (1)..(240): NCBI GI NO: 9910484 NR Description: peroxisomal biogenesis factor 3
MKAHFDNIQMIADTTTLPHAIHHLSSRVVEEIDVSSIMDKLSKGKGILIPSEKLQLWNELKILSFTRMVLSLWSVTMLSLYIRVQVNILGRHLYIDTARGLGSSHLLDELDLIERDDEQKFLTSADFLATSGMPSLISNMQNAVKEVLKGKQLKDVLTTSALRETVMRILDVFMSTGSPHHWVDYLMMSQDATTDVSSSDATVTKFHLLITETREVLTNNFSNVAEISLKCCAVALVEEMETQTGLATGMQLAKLLPQIEKTMPEISAEPEKNRFLQLIRDLPEVKLFFTLLYANMPQ

SEQ ID NO: 1255 - protein, 289 aa, Arabidopsis thaliana
  peptide (1)..(289): Ceres Seq. ID no. 12370916
  misc_feature (1)..(287): Pfam Name: Pfam Description:  Peroxin-3
  misc_feature (1)..(289): NCBI GI NO: 18401790 NR Description: expressed protein; protein id: At3g18160
  misc_feature (1)..(289): NCBI GI NO: 21554142 NR Description: unknown [Arabidopsis thaliana]
  misc_feature (1)..(289): NCBI GI NO: 22330115 NR Description: expressed protein; protein id: At1g48635
  misc_feature (1)..(276): NCBI GI NO: 12597815 NR Description: lysine and histidine specific transporter
  misc_feature (1)..(265): NCBI GI NO: 12321594 NR Description: hypothetical protein, 3' partial
  misc_feature (99)..(289): NCBI GI NO: 9294071 NR Description: gene_id:MRC8.15~unknown protein
  misc_feature (1)..(284): NCBI GI NO: 28278477 NR Description: Similar to peroxisomal biogenesis factor 3
  misc_feature (1)..(231): NCBI GI NO: 12230450 NR Description: Peroxisomal assembly protein PEX3 (Peroxin-3)
  misc_feature (1)..(231): NCBI GI NO: 4505727 NR Description: peroxisomal biogenesis factor 3 [Homo sapiens]
  misc_feature (1)..(231): NCBI GI NO: 9910484 NR Description: peroxisomal biogenesis factor 3
MIADTTTLPHAIHHLSSRVVEEIDVSSIMDKLSKGKGILIPSEKLQLWNELKILSFTRMVLSLWSVTMLSLYIRVQVNILGRHLYIDTARGLGSSHLLDELDLIERDDEQKFLTSADFLATSGMPSLISNMQNAVKEVLKGKQLKDVLTTSALRETVMRILDVFMSTGSPHHWVDYLMMSQDATTDVSSSDATVTKFHLLITETREVLTNNFSNVAEISLKCCAVALVEEMETQTGLATGMQLAKLLPQIEKTMPEISAEPEKNRFLQLIRDLPEVKLFFTLLYANMPQ

SEQ ID NO: 1256 - DNA, 1220 bp, Arabidopsis thaliana
  misc_feature (1)..(1220): Ceres Seq. ID no. 12335068
aaacacacacatatacacccaaacgttatgtaactgcaaaaaaaatatcgaaacgagattctacaattagtctctagtcaaagagcttcatggcaatggtgtgaccccaaagttagtcttcacatgtttcttaagtttcaaacattgaatttttttccttttataaatagttaagacttatcttcattttctaaaatagtcaagatttatattcctcttaaaaaataatttatttccttcctaagaagaattattagatttattttctttgctagtatagattgatgaaagtgaggaaatgggagaagaaatgaagaacacaggatgtgtcttcttcttctaagtcactaacaaaatcaacaaagaggagaagccattattatataatagagagattgagagaagagatttatccaaaaaaatattgcaattcttcttggagtgaataatgccagtccctcttgcaccatatccaacacctccggcaccggcactggctccgtcgtacaacactcctccggcaaatggaagtacaagtgggcagagccagttagtgtgttcaggttgcagaaaccttctgatgtatcccgtcggagcaacctccgtctgttgcgccgtctgtaacgccgtcacggccgttcctccgcccggaacggagatggcacagttggtatgtggaggatgtcatacactcttaatgtacattcgtggagctacaagtgttcaatgttcttgttgtcacactgttaatctcgccctcgaagcaaaccaagtagcgcatgtgaattgcggaaactgcatgatgctactaatgtatcaatatggagcaagatcagtgaaatgtgccgtttgtaactttgtcacatctgttgggggttcaacgagcacgactgattcgaagtttaacaattaaaacttggatctatctacctatcaatacatattgagttatgagcaatatagaggaagcatcaaatctttttcactctctcttcgatcaagaatccggcagtgatgagtttgaaaccattttcggaagtaaatgaaatatgtaattcgtcgaaatttctgactttggtctctttgtccgtttgtatagagctatctctcttctttggtttttgttttgttctcttaagaaaaatttgattcaccagtttgtaagagtgattcagaaatcaaagctagactttttatgcatgaaaaaaatagattgtttt

SEQ ID NO: 1257 - protein, 154 aa, Arabidopsis thaliana
  peptide (1)..(154): Ceres Seq. ID no. 12335069
  misc_feature (1)..(154): NCBI GI NO: 18398482 NR Description: zinc-finger protein, putative
  misc_feature (1)..(151): NCBI GI NO: 30692719 NR Description: zinc-finger protein -related
  misc_feature (1)..(151): NCBI GI NO: 34905200 NR Description: P0672D01.2
  misc_feature (1)..(105): NCBI GI NO: 25403154 NR Description: probable zinc-finger protein, 7043-7771
  misc_feature (32)..(154): NCBI GI NO: 30685083 NR Description: zinc-finger protein Lsd1 [Arabidopsis thaliana]
  misc_feature (32)..(154): NCBI GI NO: 30685085 NR Description: zinc-finger protein Lsd1 [Arabidopsis thaliana]
  misc_feature (32)..(141): NCBI GI NO: 17981380 NR Description: zinc finger protein LSD2 [Brassica oleracea]
  misc_feature (32)..(141): NCBI GI NO: 29467531 NR Description: P0582D05.23
  misc_feature (65)..(154): NCBI GI NO: 17981378 NR Description: zinc finger protein LSD1 [Brassica oleracea]
  misc_feature (71)..(145): NCBI GI NO: 32400832 NR Description: 18S subunit ribosomal protein [Triticum aestivum]
MPVPLAPYPTPPAPALAPSYNTPPANGSTSGQSQLVCSGCRNLLMYPVGATSVCCAVCNAVTAVPPPGTEMAQLVCGGCHTLLMYIRGATSVQCSCCHTVNLALEANQVAHVNCGNCMMLLMYQYGARSVKCAVCNFVTSVGGSTSTTDSKFNN

SEQ ID NO: 1258 - protein, 110 aa, Arabidopsis thaliana
  peptide (1)..(110): Ceres Seq. ID no. 12335070
  misc_feature (1)..(110): NCBI GI NO: 18398482 NR Description: zinc-finger protein, putative
  misc_feature (1)..(107): NCBI GI NO: 30692719 NR Description: zinc-finger protein -related
  misc_feature (1)..(107): NCBI GI NO: 34905200 NR Description: P0672D01.2
  misc_feature (1)..(61): NCBI GI NO: 25403154 NR Description: probable zinc-finger protein, 7043-7771
  misc_feature (1)..(110): NCBI GI NO: 30685083 NR Description: zinc-finger protein Lsd1 [Arabidopsis thaliana]
  misc_feature (1)..(110): NCBI GI NO: 30685085 NR Description: zinc-finger protein Lsd1 [Arabidopsis thaliana]
  misc_feature (1)..(97): NCBI GI NO: 17981380 NR Description: zinc finger protein LSD2 [Brassica oleracea]
  misc_feature (1)..(97): NCBI GI NO: 29467531 NR Description: P0582D05.23
  misc_feature (21)..(110): NCBI GI NO: 17981378 NR Description: zinc finger protein LSD1 [Brassica oleracea]
  misc_feature (27)..(101): NCBI GI NO: 32400832 NR Description: 18S subunit ribosomal protein [Triticum aestivum]
MYPVGATSVCCAVCNAVTAVPPPGTEMAQLVCGGCHTLLMYIRGATSVQCSCCHTVNLALEANQVAHVNCGNCMMLLMYQYGARSVKCAVCNFVTSVGGSTSTTDSKFNN

SEQ ID NO: 1259 - protein, 84 aa, Arabidopsis thaliana
  peptide (1)..(84): Ceres Seq. ID no. 12335071
  misc_feature (1)..(84): NCBI GI NO: 18398482 NR Description: zinc-finger protein, putative
  misc_feature (1)..(81): NCBI GI NO: 30692719 NR Description: zinc-finger protein -related
  misc_feature (1)..(81): NCBI GI NO: 34905200 NR Description: P0672D01.2
  misc_feature (1)..(35): NCBI GI NO: 25403154 NR Description: probable zinc-finger protein, 7043-7771
  misc_feature (1)..(84): NCBI GI NO: 30685083 NR Description: zinc-finger protein Lsd1 [Arabidopsis thaliana]
  misc_feature (1)..(84): NCBI GI NO: 30685085 NR Description: zinc-finger protein Lsd1 [Arabidopsis thaliana]
  misc_feature (1)..(71): NCBI GI NO: 17981380 NR Description: zinc finger protein LSD2 [Brassica oleracea]
  misc_feature (1)..(71): NCBI GI NO: 29467531 NR Description: P0582D05.23
  misc_feature (1)..(84): NCBI GI NO: 17981378 NR Description: zinc finger protein LSD1 [Brassica oleracea]
  misc_feature (1)..(75): NCBI GI NO: 32400832 NR Description: 18S subunit ribosomal protein [Triticum aestivum]
MAQLVCGGCHTLLMYIRGATSVQCSCCHTVNLALEANQVAHVNCGNCMMLLMYQYGARSVKCAVCNFVTSVGGSTSTTDSKFNN

SEQ ID NO: 1260 - DNA, 1408 bp, Arabidopsis thaliana
  misc_feature (1)..(1408): Ceres Seq. ID no. 13490509
atccgttggtgaatctggacagtcccctcaaataaaagttgtgagagctgtttcgtcgctttgatcgaaatggcgtcgtcttctccaactcagctagctcacgtcccgattcctccagaaccaggaggaaggtcgccgacacaagaagctaatgagccaccagttccgatttacattgtgacggatccgtttcaacttcctgctgatttcctaaacccttctcctgaaaagaaattggttatcggttttgactgtgagggtgttgacctctgccgacatgggaaactttgtatcatgcagattgcattctctaatgcaatatacttggttgatgtcatcgaaggtggagaggtgattatgaaagcgtgtaagcctgcactcgagtctaattacatcacgaaagttattcacgattgcaagcgtgacagtgaggctctatacttccagtttgggataagattgcacaatgttgtggacactcagattgcttattctctgattgaagaacaagaagggcggaggagacctctagatgattacatatcgtttgtttcactccttgctgatccacgttactgcggtatatcctatgaagagaaagaagaagttcgagttctcatgcgccaggacccaaagttttggacatacaggcctatgactgagctcatgatccgcgcagctgctgatgatgtccgcttccttctgtatctctatcacaaaatgatgggaaagctaaatcagcggtcactatggcatcttgcagttcgtggtgctttgtactgtcggtgtctctgctgcatgaatgatgctgattttgctgattggccaaccgttcctccaattccagataacctgaagtcagaagatcaatgtcttgaagaagagatcctgtcagtgcttgatgttccaccaggaaagatgggacgtgtgattggaaggaaaggagcatcgatcctcgccattaaggaagcttgcaacgcggaaattctaattggaggggcaaagggtccacctgataagatatttgtgattggaccggtgagagaagtgcgtaaggcggaggctatactgagaggaagaatgatagactattgaaggaaatgagggtcctttgtaatctgtctcattgcccctataaaaaaaaatactaaaaccctcttaaaacttggaaactccatggttcagtacggacccgagagagtcgtcccctcttcaataaaagttacatcattaacttccgtttatactgtggaacttaccattccatttcccgcaagggacttcatagtttgatgaaacaaaaagaccatatcaagtatggtttattggcaaatgcaagagtagtttatctgattgaccgttaagattgattttatttactttgcgactcaaattgagtctgaaaccc

SEQ ID NO: 1261 - protein, 341 aa, Arabidopsis thaliana
  peptide (1)..(341): Ceres Seq. ID no. 13490510
  misc_feature (276)..(323): Pfam Name: Pfam Description:  KH domain
  misc_feature (1)..(341): NCBI GI NO: 18400976 NR Description: expressed protein [Arabidopsis thaliana]
  misc_feature (55)..(341): NCBI GI NO: 34914238 NR Description: P0002B05.11
  misc_feature (76)..(334): NCBI GI NO: 25407824 NR Description: hypothetical protein At2g25910
  misc_feature (258)..(321): NCBI GI NO: 25407824 NR Description: hypothetical protein At2g25910
  misc_feature (54)..(222): NCBI GI NO: 24762379 NR Description: egalitarian CG4051-PA [Drosophila melanogaster]
  misc_feature (54)..(222): NCBI GI NO: 33589402 NR Description: RE33408p [Drosophila melanogaster]
  misc_feature (54)..(222): NCBI GI NO: 38681451 NR Description: egalitarian [Drosophila melanogaster]
  misc_feature (57)..(227): NCBI GI NO: 23612774 NR Description: exonuclease, putative [Plasmodium falciparum 3D7]
  misc_feature (35)..(214): NCBI GI NO: 27370298 NR Description: hypothetical protein 4932702D22 [Mus musculus]
  misc_feature (48)..(218): NCBI GI NO: 31210151 NR Description: ENSANGP00000003614 [Anopheles gambiae]
MASSSPTQLAHVPIPPEPGGRSPTQEANEPPVPIYIVTDPFQLPADFLNPSPEKKLVIGFDCEGVDLCRHGKLCIMQIAFSNAIYLVDVIEGGEVIMKACKPALESNYITKVIHDCKRDSEALYFQFGIRLHNVVDTQIAYSLIEEQEGRRRPLDDYISFVSLLADPRYCGISYEEKEEVRVLMRQDPKFWTYRPMTELMIRAAADDVRFLLYLYHKMMGKLNQRSLWHLAVRGALYCRCLCCMNDADFADWPTVPPIPDNLKSEDQCLEEEILSVLDVPPGKMGRVIGRKGASILAIKEACNAEILIGGAKGPPDKIFVIGPVREVRKAEAILRGRMIDY

SEQ ID NO: 1262 - protein, 266 aa, Arabidopsis thaliana
  peptide (1)..(266): Ceres Seq. ID no. 13490511
  misc_feature (201)..(248): Pfam Name: Pfam Description:  KH domain
  misc_feature (1)..(266): NCBI GI NO: 18400976 NR Description: expressed protein [Arabidopsis thaliana]
  misc_feature (1)..(266): NCBI GI NO: 34914238 NR Description: P0002B05.11
  misc_feature (1)..(259): NCBI GI NO: 25407824 NR Description: hypothetical protein At2g25910
  misc_feature (183)..(246): NCBI GI NO: 25407824 NR Description: hypothetical protein At2g25910
  misc_feature (1)..(147): NCBI GI NO: 24762379 NR Description: egalitarian CG4051-PA [Drosophila melanogaster]
  misc_feature (1)..(147): NCBI GI NO: 33589402 NR Description: RE33408p [Drosophila melanogaster]
  misc_feature (1)..(147): NCBI GI NO: 38681451 NR Description: egalitarian [Drosophila melanogaster]
  misc_feature (1)..(152): NCBI GI NO: 23612774 NR Description: exonuclease, putative [Plasmodium falciparum 3D7]
  misc_feature (1)..(139): NCBI GI NO: 27370298 NR Description: hypothetical protein 4932702D22 [Mus musculus]
  misc_feature (1)..(143): NCBI GI NO: 31210151 NR Description: ENSANGP00000003614 [Anopheles gambiae]
MQIAFSNAIYLVDVIEGGEVIMKACKPALESNYITKVIHDCKRDSEALYFQFGIRLHNVVDTQIAYSLIEEQEGRRRPLDDYISFVSLLADPRYCGISYEEKEEVRVLMRQDPKFWTYRPMTELMIRAAADDVRFLLYLYHKMMGKLNQRSLWHLAVRGALYCRCLCCMNDADFADWPTVPPIPDNLKSEDQCLEEEILSVLDVPPGKMGRVIGRKGASILAIKEACNAEILIGGAKGPPDKIFVIGPVREVRKAEAILRGRMIDY

SEQ ID NO: 1263 - protein, 245 aa, Arabidopsis thaliana
  peptide (1)..(245): Ceres Seq. ID no. 13490512
  misc_feature (180)..(227): Pfam Name: Pfam Description:  KH domain
  misc_feature (1)..(245): NCBI GI NO: 18400976 NR Description: expressed protein [Arabidopsis thaliana]
  misc_feature (1)..(245): NCBI GI NO: 34914238 NR Description: P0002B05.11
  misc_feature (1)..(238): NCBI GI NO: 25407824 NR Description: hypothetical protein At2g25910
  misc_feature (162)..(225): NCBI GI NO: 25407824 NR Description: hypothetical protein At2g25910
  misc_feature (1)..(126): NCBI GI NO: 24762379 NR Description: egalitarian CG4051-PA [Drosophila melanogaster]
  misc_feature (1)..(126): NCBI GI NO: 33589402 NR Description: RE33408p [Drosophila melanogaster]
  misc_feature (1)..(126): NCBI GI NO: 38681451 NR Description: egalitarian [Drosophila melanogaster]
  misc_feature (1)..(131): NCBI GI NO: 23612774 NR Description: exonuclease, putative [Plasmodium falciparum 3D7]
  misc_feature (1)..(118): NCBI GI NO: 27370298 NR Description: hypothetical protein 4932702D22 [Mus musculus]
  misc_feature (1)..(122): NCBI GI NO: 31210151 NR Description: ENSANGP00000003614 [Anopheles gambiae]
MKACKPALESNYITKVIHDCKRDSEALYFQFGIRLHNVVDTQIAYSLIEEQEGRRRPLDDYISFVSLLADPRYCGISYEEKEEVRVLMRQDPKFWTYRPMTELMIRAAADDVRFLLYLYHKMMGKLNQRSLWHLAVRGALYCRCLCCMNDADFADWPTVPPIPDNLKSEDQCLEEEILSVLDVPPGKMGRVIGRKGASILAIKEACNAEILIGGAKGPPDKIFVIGPVREVRKAEAILRGRMIDY

SEQ ID NO: 1264 - DNA, 1678 bp, Arabidopsis thaliana
  misc_feature (1)..(1678): Ceres Seq. ID no. 12385488
atcgcttcttcctcctcctgcttcttcaactccaaacctcaccctctcaatttccctccttcgccggtccacggcgtcatttcacggtggcgcttcacctctctccgtcacctactctcctaaaaatccaatctttacaaaatccagaccaatatagaaatgactttaatcgcttctctgtctctcccaccaccagctatacaaagacaatcactttctgaatttcataatcttcccgctaaatctcaatccttcaattgtcaattccggtcttctagttcacctttatcttctctccattcttcatcgcttagtaactttctagattttagactaaggcggagaaacagcggattggttccagtggtggcgtgttcaacgacgccgtttatgggtagagttggattgcattggagagatgggaatatgtctctgttatcgttttgtggtggaactgatgttacagagagagctgattcgtctcagttttggtctgctttgcttccatttgttgttgctctcactgccgttgctgctctctcttacccacctagtttcacttgggtatctaaagacctctatgctcctgctcttggagggattatgttatctattggaattcagctttcagttgacgattttgctcttgcattcaaaagaccagtgccgttatctgttgggtttgttgctcagtacgttttgaaaccgcttctcggggttttagttgctaatgcatttgggatgccgaggaccttctacgctggttttatactcacgtgttgtgtggctggggctcagttgtctagttacgcgagttctctgagtaaagctgatgtggccatgagcattcttctcactagttctacaactattgcttctgtaatctttacacctttgcttagtggtcttctaattggatcagtagttcctgttgatgcagttgccatgtcgaagtctatacttcaggtggtacttgttccaatcactcttggccttgtgttaaatacttatgcgaagcctgtggtcactcttcttcaacctgtgatgccgtttgttgctatggtatgcacttcattgtgcattggaagcccactttcgattaatcgcagtcagattctgtcagctgaaggtcttggattgattgttccaattgttacattccatgccgtagcatttgccttaggatattggttctctaagatcccaggcttacgacaagaggaagaagtaagccggactatctccctttgcacgggaatgcaaagctccacattagccgggcttcttgcaagccagttccttggtagcagccaagccgtgccagcagcttgctctgtagttgtaatggccataatgggtctatgccttgcctcattctggggcaatgggttccgaatcagagatgttctatcgctatcaacaccgcaaagcagaggctacaccactgaatcatgagcaatatcagcagaagctacaaacctgtaaagcaagggaaccacaccttgggacattgatcgcgcatattctttccggtttttaatttgatgtacaagcagcgtttgggaagtaaagataaggtttagaggggatggtataggtagtgtagacaaaatggtattcatcaatcatcttgtatgtaatctgctaattcaaggtataaaagatatcttttgttgcc

SEQ ID NO: 1265 - protein, 431 aa, Arabidopsis thaliana
  peptide (1)..(431): Ceres Seq. ID no. 12385489
  misc_feature (142)..(322): Pfam Name: Pfam Description:  Sodium Bile acid symporter family
  misc_feature (1)..(431): NCBI GI NO: 21554890 NR Description: unknown [Arabidopsis thaliana]
  misc_feature (1)..(431): NCBI GI NO: 18404505 NR Description: expressed protein; protein id: At3g25410
  misc_feature (1)..(395): NCBI GI NO: 9279722 NR Description: contains similarity to transporter protein~gene_id:MWL2
  misc_feature (85)..(407): NCBI GI NO: 18416020 NR Description: similar to putative transport protein
  misc_feature (50)..(409): NCBI GI NO: 20269901 NR Description: putative sodium-dependent bile acid symporter
  misc_feature (112)..(409): NCBI GI NO: 34911708 NR Description: P0707D10.18
  misc_feature (50)..(409): NCBI GI NO: 30683305 NR Description: bile acid:sodium symporter family
  misc_feature (112)..(407): NCBI GI NO: 7486890 NR Description: hypothetical protein T12H17
  misc_feature (129)..(398): NCBI GI NO: 7485401 NR Description: hypothetical protein At2g26900
  misc_feature (149)..(409): NCBI GI NO: 28393076 NR Description: putative Na+ dependent ileal bile acid transporter
MTLIASLSLPPPAIQRQSLSEFHNLPAKSQSFNCQFRSSSSPLSSLHSSSLSNFLDFRLRRRNSGLVPVVACSTTPFMGRVGLHWRDGNMSLLSFCGGTDVTERADSSQFWSALLPFVVALTAVAALSYPPSFTWVSKDLYAPALGGIMLSIGIQLSVDDFALAFKRPVPLSVGFVAQYVLKPLLGVLVANAFGMPRTFYAGFILTCCVAGAQLSSYASSLSKADVAMSILLTSSTTIASVIFTPLLSGLLIGSVVPVDAVAMSKSILQVVLVPITLGLVLNTYAKPVVTLLQPVMPFVAMVCTSLCIGSPLSINRSQILSAEGLGLIVPIVTFHAVAFALGYWFSKIPGLRQEEEVSRTISLCTGMQSSTLAGLLASQFLGSSQAVPAACSVVVMAIMGLCLASFWGNGFRIRDVLSLSTPQSRGYTTES

SEQ ID NO: 1266 - protein, 354 aa, Arabidopsis thaliana
  peptide (1)..(354): Ceres Seq. ID no. 12385490
  misc_feature (65)..(245): Pfam Name: Pfam Description:  Sodium Bile acid symporter family
  misc_feature (1)..(354): NCBI GI NO: 21554890 NR Description: unknown [Arabidopsis thaliana]
  misc_feature (1)..(354): NCBI GI NO: 18404505 NR Description: expressed protein; protein id: At3g25410
  misc_feature (1)..(318): NCBI GI NO: 9279722 NR Description: contains similarity to transporter protein~gene_id:MWL2
  misc_feature (8)..(330): NCBI GI NO: 18416020 NR Description: similar to putative transport protein
  misc_feature (1)..(332): NCBI GI NO: 20269901 NR Description: putative sodium-dependent bile acid symporter
  misc_feature (35)..(332): NCBI GI NO: 34911708 NR Description: P0707D10.18
  misc_feature (1)..(332): NCBI GI NO: 30683305 NR Description: bile acid:sodium symporter family
  misc_feature (35)..(330): NCBI GI NO: 7486890 NR Description: hypothetical protein T12H17
  misc_feature (52)..(321): NCBI GI NO: 7485401 NR Description: hypothetical protein At2g26900
  misc_feature (72)..(332): NCBI GI NO: 28393076 NR Description: putative Na+ dependent ileal bile acid transporter
MGRVGLHWRDGNMSLLSFCGGTDVTERADSSQFWSALLPFVVALTAVAALSYPPSFTWVSKDLYAPALGGIMLSIGIQLSVDDFALAFKRPVPLSVGFVAQYVLKPLLGVLVANAFGMPRTFYAGFILTCCVAGAQLSSYASSLSKADVAMSILLTSSTTIASVIFTPLLSGLLIGSVVPVDAVAMSKSILQVVLVPITLGLVLNTYAKPVVTLLQPVMPFVAMVCTSLCIGSPLSINRSQILSAEGLGLIVPIVTFHAVAFALGYWFSKIPGLRQEEEVSRTISLCTGMQSSTLAGLLASQFLGSSQAVPAACSVVVMAIMGLCLASFWGNGFRIRDVLSLSTPQSRGYTTES

SEQ ID NO: 1267 - protein, 342 aa, Arabidopsis thaliana
  peptide (1)..(342): Ceres Seq. ID no. 12385491
  misc_feature (53)..(233): Pfam Name: Pfam Description:  Sodium Bile acid symporter family
  misc_feature (1)..(342): NCBI GI NO: 21554890 NR Description: unknown [Arabidopsis thaliana]
  misc_feature (1)..(342): NCBI GI NO: 18404505 NR Description: expressed protein; protein id: At3g25410
  misc_feature (1)..(306): NCBI GI NO: 9279722 NR Description: contains similarity to transporter protein~gene_id:MWL2
  misc_feature (1)..(318): NCBI GI NO: 18416020 NR Description: similar to putative transport protein
  misc_feature (1)..(320): NCBI GI NO: 20269901 NR Description: putative sodium-dependent bile acid symporter
  misc_feature (23)..(320): NCBI GI NO: 34911708 NR Description: P0707D10.18
  misc_feature (1)..(320): NCBI GI NO: 30683305 NR Description: bile acid:sodium symporter family
  misc_feature (23)..(318): NCBI GI NO: 7486890 NR Description: hypothetical protein T12H17
  misc_feature (40)..(309): NCBI GI NO: 7485401 NR Description: hypothetical protein At2g26900
  misc_feature (60)..(320): NCBI GI NO: 28393076 NR Description: putative Na+ dependent ileal bile acid transporter
MSLLSFCGGTDVTERADSSQFWSALLPFVVALTAVAALSYPPSFTWVSKDLYAPALGGIMLSIGIQLSVDDFALAFKRPVPLSVGFVAQYVLKPLLGVLVANAFGMPRTFYAGFILTCCVAGAQLSSYASSLSKADVAMSILLTSSTTIASVIFTPLLSGLLIGSVVPVDAVAMSKSILQVVLVPITLGLVLNTYAKPVVTLLQPVMPFVAMVCTSLCIGSPLSINRSQILSAEGLGLIVPIVTFHAVAFALGYWFSKIPGLRQEEEVSRTISLCTGMQSSTLAGLLASQFLGSSQAVPAACSVVVMAIMGLCLASFWGNGFRIRDVLSLSTPQSRGYTTES

SEQ ID NO: 1268 - DNA, 1295 bp, Arabidopsis thaliana
  misc_feature (1)..(1295): Ceres Seq. ID no. 12323001
aatatttctccttcaggtttctatgatggaactagaatcagaaactcaagaactccatcttcacgtaaatggcgaacctgaagggaaattttcaacagaagagagaagtcacaagtactcttggaggttaagagtgtctctctatgtcactctcctcttagctggagagacaatagccactctcttaggtagactttactacgaaaaaggcggtaaaagcacatggctcgaaaccttggttcagcttgtagggtttcctttaacccttccttgctattattacttaaagcctgagccgtccaagactaaaaccattaccaaaaaaactacttcttccttcttgacactatctttagtgtatattggacttggcttgcttgttgctggacattgtattttgtactcatttgggctactttaccttcctgtctcaactttctctttgatctctgcgtcgcaattggcttttaacgccgtcttctcttacttcctaaactcacaaaaaatcacaccatttatactcaattcacttgttctcttaaccatatcttctacacttcttgttatccaacatgaaccagaatctccctcttctacttcaaagtccgcagccaagtccaagtatgtgattggatacatctgcgcggtcggtagctcagctggttattctctggtgctttctttaacagattacgcgttcgaaaagattctaaagaaatacacattcaaggctattttagacatggccacatatccgtctatggtagctacttgtgtagttgtggtaggactttttggaagtggtgggtggaaaaagctgagtacagaaatggaagagtttcaactagggaaaagctcatacattttgataaacatcggttcaacgatatcatggcaagcttgtttgattggaagtgttggtttgattatcgaagtttcatcgcttttttccaatgtcataagcactctttgtttaccagttgtgcctgttcttgctgttgtcttcttccgtgatgagatgagtggaatcaagttgattgcaatgtttttggccatctggggatttgtttcttatggttatcagcattatgtcaatgatagaaagccagaagaagaccaagagcttcctcagtctaaagaagaagaagaacaaaaacaagtagataccattcatgtccaagcttaggcaaagatccaagaaaaccaaaagcttttgtaatttgaaccagtttaatttaaaataaaaatgagttatatatattgtaggcactacaaataaaattggtaagtgtctc

SEQ ID NO: 1269 - protein, 394 aa, Arabidopsis thaliana
  peptide (1)..(394): Ceres Seq. ID no. 12323002
  misc_feature (194)..(376): Pfam Name: Pfam Description:  Domain of unknown function, DUF250
  misc_feature (25)..(394): NCBI GI NO: 15236794 NR Description: putative protein; protein id: At4g18190.1
  misc_feature (31)..(383): NCBI GI NO: 30684325 NR Description: purine permease family [Arabidopsis thaliana]
  misc_feature (55)..(382): NCBI GI NO: 15236799 NR Description: putative protein; protein id: At4g18220.1
  misc_feature (17)..(384): NCBI GI NO: 15236796 NR Description: putative protein; protein id: At4g18200.1
  misc_feature (17)..(384): NCBI GI NO: 18491221 NR Description: unknown protein [Arabidopsis thaliana]
  misc_feature (65)..(383): NCBI GI NO: 7487849 NR Description: hypothetical protein T9A21
  misc_feature (39)..(382): NCBI GI NO: 15219436 NR Description: hypothetical protein; protein id: At1g44750
  misc_feature (65)..(376): NCBI GI NO: 15236796 NR Description: putative protein; protein id: At4g18200.1
  misc_feature (39)..(371): NCBI GI NO: 38605752 NR Description: OSJNBb0016D16.5
  misc_feature (39)..(371): NCBI GI NO: 38344290 NR Description: OSJNBa0013K16.22
IFLLQVSMMELESETQELHLHVNGEPEGKFSTEERSHKYSWRLRVSLYVTLLLAGETIATLLGRLYYEKGGKSTWLETLVQLVGFPLTLPCYYYLKPEPSKTKTITKKTTSSFLTLSLVYIGLGLLVAGHCILYSFGLLYLPVSTFSLISASQLAFNAVFSYFLNSQKITPFILNSLVLLTISSTLLVIQHEPESPSSTSKSAAKSKYVIGYICAVGSSAGYSLVLSLTDYAFEKILKKYTFKAILDMATYPSMVATCVVVVGLFGSGGWKKLSTEMEEFQLGKSSYILINIGSTISWQACLIGSVGLIIEVSSLFSNVISTLCLPVVPVLAVVFFRDEMSGIKLIAMFLAIWGFVSYGYQHYVNDRKPEEDQELPQSKEEEEQKQVDTIHVQA

SEQ ID NO: 1270 - protein, 387 aa, Arabidopsis thaliana
  peptide (1)..(387): Ceres Seq. ID no. 12323003
  misc_feature (187)..(369): Pfam Name: Pfam Description:  Domain of unknown function, DUF250
  misc_feature (18)..(387): NCBI GI NO: 15236794 NR Description: putative protein; protein id: At4g18190.1
  misc_feature (24)..(376): NCBI GI NO: 30684325 NR Description: purine permease family [Arabidopsis thaliana]
  misc_feature (48)..(375): NCBI GI NO: 15236799 NR Description: putative protein; protein id: At4g18220.1
  misc_feature (10)..(377): NCBI GI NO: 15236796 NR Description: putative protein; protein id: At4g18200.1
  misc_feature (10)..(377): NCBI GI NO: 18491221 NR Description: unknown protein [Arabidopsis thaliana]
  misc_feature (58)..(376): NCBI GI NO: 7487849 NR Description: hypothetical protein T9A21
  misc_feature (32)..(375): NCBI GI NO: 15219436 NR Description: hypothetical protein; protein id: At1g44750
  misc_feature (58)..(369): NCBI GI NO: 15236796 NR Description: putative protein; protein id: At4g18200.1
  misc_feature (32)..(364): NCBI GI NO: 38605752 NR Description: OSJNBb0016D16.5
  misc_feature (32)..(364): NCBI GI NO: 38344290 NR Description: OSJNBa0013K16.22
MMELESETQELHLHVNGEPEGKFSTEERSHKYSWRLRVSLYVTLLLAGETIATLLGRLYYEKGGKSTWLETLVQLVGFPLTLPCYYYLKPEPSKTKTITKKTTSSFLTLSLVYIGLGLLVAGHCILYSFGLLYLPVSTFSLISASQLAFNAVFSYFLNSQKITPFILNSLVLLTISSTLLVIQHEPESPSSTSKSAAKSKYVIGYICAVGSSAGYSLVLSLTDYAFEKILKKYTFKAILDMATYPSMVATCVVVVGLFGSGGWKKLSTEMEEFQLGKSSYILINIGSTISWQACLIGSVGLIIEVSSLFSNVISTLCLPVVPVLAVVFFRDEMSGIKLIAMFLAIWGFVSYGYQHYVNDRKPEEDQELPQSKEEEEQKQVDTIHVQA

SEQ ID NO: 1271 - protein, 386 aa, Arabidopsis thaliana
  peptide (1)..(386): Ceres Seq. ID no. 12323004
  misc_feature (186)..(368): Pfam Name: Pfam Description:  Domain of unknown function, DUF250
  misc_feature (17)..(386): NCBI GI NO: 15236794 NR Description: putative protein; protein id: At4g18190.1
  misc_feature (23)..(375): NCBI GI NO: 30684325 NR Description: purine permease family [Arabidopsis thaliana]
  misc_feature (47)..(374): NCBI GI NO: 15236799 NR Description: putative protein; protein id: At4g18220.1
  misc_feature (9)..(376): NCBI GI NO: 15236796 NR Description: putative protein; protein id: At4g18200.1
  misc_feature (9)..(376): NCBI GI NO: 18491221 NR Description: unknown protein [Arabidopsis thaliana]
  misc_feature (57)..(375): NCBI GI NO: 7487849 NR Description: hypothetical protein T9A21
  misc_feature (31)..(374): NCBI GI NO: 15219436 NR Description: hypothetical protein; protein id: At1g44750
  misc_feature (57)..(368): NCBI GI NO: 15236796 NR Description: putative protein; protein id: At4g18200.1
  misc_feature (31)..(363): NCBI GI NO: 38605752 NR Description: OSJNBb0016D16.5
  misc_feature (31)..(363): NCBI GI NO: 38344290 NR Description: OSJNBa0013K16.22
MELESETQELHLHVNGEPEGKFSTEERSHKYSWRLRVSLYVTLLLAGETIATLLGRLYYEKGGKSTWLETLVQLVGFPLTLPCYYYLKPEPSKTKTITKKTTSSFLTLSLVYIGLGLLVAGHCILYSFGLLYLPVSTFSLISASQLAFNAVFSYFLNSQKITPFILNSLVLLTISSTLLVIQHEPESPSSTSKSAAKSKYVIGYICAVGSSAGYSLVLSLTDYAFEKILKKYTFKAILDMATYPSMVATCVVVVGLFGSGGWKKLSTEMEEFQLGKSSYILINIGSTISWQACLIGSVGLIIEVSSLFSNVISTLCLPVVPVLAVVFFRDEMSGIKLIAMFLAIWGFVSYGYQHYVNDRKPEEDQELPQSKEEEEQKQVDTIHVQA

SEQ ID NO: 1272 - DNA, 753 bp, Arabidopsis thaliana
  misc_feature (1)..(753): Ceres Seq. ID no. 12385641
ttctccaatctcttttcgatttcgaatttttccatctttcaattttcagtagtttcgtctcaatttcacaatttcagtgtagtctacgatgaattcggctttagattttgcttttccggctacatttccggttaaatcgagttctgttggcggatatcggattccttctgctggattcagttcccgcttaagattgtgctctcttcctccttcttcatctatcaaggctgagtcatgtttaaaaagagacgtgcacaggcaaagaagcagtcttgagtcaatgttctgttatgataaaccaataccagaggaaataatcgaggagccagttggattatccatgtcagagagagagattggtgataatcagcgttgcacttgttgtgaagctaaaggtgcattgctttgttccacttgttctggaactggtctatatgtagattccattatggagagtcaaggcatcattgttaaagtccgttgcttaggttgtggtggaagtggtaatattatgtgcaaactttgtggtgggcgtggtcacgtaggacactgatgactccgtgtttcacttgtttccactcatggttctgttttacctattcgccacttttcttgctctgatcttattgtaaaatcctactctttgagttccatacatagatttgtgttcttgtactgatgtaatctctagctaaactatgcacaatcttgtcccagactattcattttctgttgttatataaaatggtttcc

SEQ ID NO: 1273 - protein, 154 aa, Arabidopsis thaliana
  peptide (1)..(154): Ceres Seq. ID no. 12385642
  misc_feature (1)..(154): NCBI GI NO: 21554941 NR Description: unknown [Arabidopsis thaliana]
  misc_feature (1)..(154): NCBI GI NO: 15238662 NR Description: putative protein; protein id: At5g17840
MNSALDFAFPATFPVKSSSVGGYRIPSAGFSSRLRLCSLPPSSSIKAESCLKRDVHRQRSSLESMFCYDKPIPEEIIEEPVGLSMSEREIGDNQRCTCCEAKGALLCSTCSGTGLYVDSIMESQGIIVKVRCLGCGGSGNIMCKLCGGRGHVGH

SEQ ID NO: 1274 - protein, 90 aa, Arabidopsis thaliana
  peptide (1)..(90): Ceres Seq. ID no. 12385643
  misc_feature (1)..(90): NCBI GI NO: 21554941 NR Description: unknown [Arabidopsis thaliana]
  misc_feature (1)..(90): NCBI GI NO: 15238662 NR Description: putative protein; protein id: At5g17840
MFCYDKPIPEEIIEEPVGLSMSEREIGDNQRCTCCEAKGALLCSTCSGTGLYVDSIMESQGIIVKVRCLGCGGSGNIMCKLCGGRGHVGH

SEQ ID NO: 1275 - DNA, 935 bp, Arabidopsis thaliana
  misc_feature (1)..(935): Ceres Seq. ID no. 12357795
aaaacgccgtcgagaaatctccctctagggtttctttgatcaaaccagagagccgtcagggagagcaaaacaaagatcggagaagatgaagacgattctttcttccgaaacgatggacatccccgacagtgttaccatcaaggttcacgctaaagtgatcgaagtcgaaggacctcgcgggaagcttgttcgcgatttcaagcatctcaacctcgatttccagctgatcaaggatccagagactggaaagaagaagcttaagatcgattcgtggtttggaacacgcaaaaccagcgcctccatcagaaccgctcttagccacgtcgataacttgatctccggtgttaccagaggtttccgttacaagatgaggttcgtgtacgcccattttcccatcaacgcctccatcggcggtgacggaaagtctatcgagatccgtaacttccttggcgagaagaaggtgaggaaggtagagatgttggatggtgtaaccattgttcgatctgagaaggtgaaggatgagattgttcttgacggtaacgacatcgagcttgtttcaaggtcatgcgctttgatcaaccagaaatgtcacgtgaagaagaaggatatcaggaagtttcttgatggtatctatgttagcgagaaaagcaagatcgtagaggaagaatgaatgcccatatcatcgtcttagctcctatttcttgtcttttgaatgttagtttcgttttatggaccaaatccaccggtgttgcaaaactctggctatcccttgttccctttttgtgttcgagattttatttacttatgcacaagttttggagacgagctatcattttcacctttgcttaattaaatcatatcgtgtgaatttgggattgttctggatttggcattgtgggttgtgcattcaaaattgatacttcagtcactaaact

SEQ ID NO: 1276 - protein, 194 aa, Arabidopsis thaliana
  peptide (1)..(194): Ceres Seq. ID no. 12357796
  misc_feature (102)..(181): Pfam Name: Pfam Description:  Ribosomal protein L6
  misc_feature (1)..(194): NCBI GI NO: 18398753 NR Description: ribosomal protein L9, putative
  misc_feature (1)..(194): NCBI GI NO: 21554945 NR Description: ribosomal protein L9, putative
  misc_feature (1)..(194): NCBI GI NO: 2129720 NR Description: ribosomal protein L9
  misc_feature (1)..(194): NCBI GI NO: 15235114 NR Description: putative ribosomal protein L9, cytosolic
  misc_feature (1)..(194): NCBI GI NO: 266945 NR Description: 60S ribosomal protein L9
  misc_feature (1)..(194): NCBI GI NO: 6015604 NR Description: ribosomal protein L9 [Pisum sativum]
  misc_feature (1)..(193): NCBI GI NO: 33087067 NR Description: ribosomal L9-like protein
  misc_feature (1)..(193): NCBI GI NO: 6174959 NR Description: 60S RIBOSOMAL PROTEIN L9
  misc_feature (33)..(166): NCBI GI NO: 12322579 NR Description: ribosomal protein L9, 5' partial
  misc_feature (1)..(194): NCBI GI NO: 37779100 NR Description: ribosomal protein L9 [Pagrus major]
MKTILSSETMDIPDSVTIKVHAKVIEVEGPRGKLVRDFKHLNLDFQLIKDPETGKKKLKIDSWFGTRKTSASIRTALSHVDNLISGVTRGFRYKMRFVYAHFPINASIGGDGKSIEIRNFLGEKKVRKVEMLDGVTIVRSEKVKDEIVLDGNDIELVSRSCALINQKCHVKKKDIRKFLDGIYVSEKSKIVEEE

SEQ ID NO: 1277 - protein, 185 aa, Arabidopsis thaliana
  peptide (1)..(185): Ceres Seq. ID no. 12357797
  misc_feature (93)..(172): Pfam Name: Pfam Description:  Ribosomal protein L6
  misc_feature (1)..(185): NCBI GI NO: 18398753 NR Description: ribosomal protein L9, putative
  misc_feature (1)..(185): NCBI GI NO: 21554945 NR Description: ribosomal protein L9, putative
  misc_feature (1)..(185): NCBI GI NO: 2129720 NR Description: ribosomal protein L9
  misc_feature (1)..(185): NCBI GI NO: 15235114 NR Description: putative ribosomal protein L9, cytosolic
  misc_feature (1)..(185): NCBI GI NO: 266945 NR Description: 60S ribosomal protein L9
  misc_feature (1)..(185): NCBI GI NO: 6015604 NR Description: ribosomal protein L9 [Pisum sativum]
  misc_feature (1)..(184): NCBI GI NO: 33087067 NR Description: ribosomal L9-like protein
  misc_feature (1)..(184): NCBI GI NO: 6174959 NR Description: 60S RIBOSOMAL PROTEIN L9
  misc_feature (24)..(157): NCBI GI NO: 12322579 NR Description: ribosomal protein L9, 5' partial
  misc_feature (1)..(185): NCBI GI NO: 37779100 NR Description: ribosomal protein L9 [Pagrus major]
MDIPDSVTIKVHAKVIEVEGPRGKLVRDFKHLNLDFQLIKDPETGKKKLKIDSWFGTRKTSASIRTALSHVDNLISGVTRGFRYKMRFVYAHFPINASIGGDGKSIEIRNFLGEKKVRKVEMLDGVTIVRSEKVKDEIVLDGNDIELVSRSCALINQKCHVKKKDIRKFLDGIYVSEKSKIVEEE

SEQ ID NO: 1278 - protein, 100 aa, Arabidopsis thaliana
  peptide (1)..(100): Ceres Seq. ID no. 12357798
  misc_feature (8)..(87): Pfam Name: Pfam Description:  Ribosomal protein L6
  misc_feature (1)..(100): NCBI GI NO: 18398753 NR Description: ribosomal protein L9, putative
  misc_feature (1)..(100): NCBI GI NO: 21554945 NR Description: ribosomal protein L9, putative
  misc_feature (1)..(100): NCBI GI NO: 2129720 NR Description: ribosomal protein L9
  misc_feature (1)..(100): NCBI GI NO: 15235114 NR Description: putative ribosomal protein L9, cytosolic
  misc_feature (1)..(100): NCBI GI NO: 266945 NR Description: 60S ribosomal protein L9
  misc_feature (1)..(100): NCBI GI NO: 6015604 NR Description: ribosomal protein L9 [Pisum sativum]
  misc_feature (1)..(99): NCBI GI NO: 33087067 NR Description: ribosomal L9-like protein
  misc_feature (1)..(99): NCBI GI NO: 6174959 NR Description: 60S RIBOSOMAL PROTEIN L9
  misc_feature (1)..(72): NCBI GI NO: 12322579 NR Description: ribosomal protein L9, 5' partial
  misc_feature (1)..(100): NCBI GI NO: 37779100 NR Description: ribosomal protein L9 [Pagrus major]
MRFVYAHFPINASIGGDGKSIEIRNFLGEKKVRKVEMLDGVTIVRSEKVKDEIVLDGNDIELVSRSCALINQKCHVKKKDIRKFLDGIYVSEKSKIVEEE

SEQ ID NO: 1279 - DNA, 1575 bp, Arabidopsis thaliana
  misc_feature (1)..(1575): Ceres Seq. ID no. 13495954
gtcaaatcgaaaacaaacacaaaaagcaaacaaatatggctacttcaatcaaatctataaccctagctctcttgatattctcagtgttactaatctccttgtctctcggctccgtcacagcgacggagactacacgaaacgaggcggaggcacgacggatgtatgaaaggtggcttgttgagaatcggaagaactataatggtctcggagagaaagagagacgctttgagatcttcaaagacaacttgaagttcgtcgaagagcacagttccatcccgaatcggacttacgaagtcgggttgacccggttcgctgatttgactaacgatgagtttcgtgcgatttacttgaggagcaagatggagagaactagggttccggtgaagggagagaagtatttgtataaggttggagatagcttacctgatgctatcgattggagagctaaaggtgctgttaatccagtcaaagatcaaggatcctgtggaagttgttgggcgttttccgcgattggagcggttgaaggtataaatcagattaagacaggagagttgatatctttgtctgagcaagaacttgttgattgtgacacaagttacaatgatggatgtggtggaggtcttatggattatgcttttaagttcattattgaaaacggtggtattgatacagaggaagattatccttatattgcaactgatgttaacgtgtgcaattctgataagaagaacactcgtgttgttaccatcgatggttatgaggatgttcctcaaaacgatgagaagtctttgaagaaggctcttgctaatcaacctattagtgttgccattgaagctggtggcagagctttccagctttacacatctggtgtgtttacaggaacatgtggaacatctttggaccatggtgttgtagctgtgggatacggatcagaaggtggtcaagactactggattgttcgtaactcatggggatcaaactggggagaaagcggatactttaagctcgaacgtaacatcaaagagtcatcagggaaatgcggtgtggcgatgatggcttcttaccctaccaaatcatcaggctcaaacccaccaaaaccgccagcgccttcaccggttgtttgtgacaagtctaacacttgtccagctaagtccacttgttgttgcctatatgagtacaatggtaaatgctatagctggggatgttgtccgtatgagtcagccacttgttgcgatgatggttctagctgctgcccccagtcataccctgtctgcgatttaaaggccaatacttgtagaatgaagggaaacagtccgttaagcataaaagctttgacacgaggaccagcgattgcgaccacaaagtctacaaacatgctagtgggcagcgcttgaggagagataatacaaacgaagaaccgatttgttttcagcccacgttatcaagattcagtcttttgtctttagacacttccaagttggatcatagtttgattactcttgtcaaatttaatgttatcttggatttgattttacttgatgtaaatgtttaagaagtaatctgatatttgcttcc

SEQ ID NO: 1280 - protein, 463 aa, Arabidopsis thaliana
  peptide (1)..(463): Ceres Seq. ID no. 13495955
  misc_feature (140)..(356): Pfam Name: Pfam Description:  Papain family cysteine protease
  misc_feature (12)..(463): NCBI GI NO: 18402225 NR Description: cysteine proteinase [Arabidopsis thaliana]
  misc_feature (17)..(463): NCBI GI NO: 18141281 NR Description: senescence-associated cysteine protease
  misc_feature (30)..(450): NCBI GI NO: 18422289 NR Description: cysteine proteinase RD21A [Arabidopsis thaliana]
  misc_feature (38)..(449): NCBI GI NO: 18141283 NR Description: senescence-associated cysteine protease
  misc_feature (20)..(449): NCBI GI NO: 14517542 NR Description: F2G19.31/F2G19.31 [Arabidopsis thaliana]
  misc_feature (20)..(449): NCBI GI NO: 18401614 NR Description: cysteine proteinase RD21A [Arabidopsis thaliana]
  misc_feature (35)..(457): NCBI GI NO: 30141019 NR Description: cysteine protease-1 [Helianthus annuus]
  misc_feature (12)..(446): NCBI GI NO: 5777889 NR Description: cysteine protease [Solanum tuberosum]
  misc_feature (55)..(452): NCBI GI NO: 1361974 NR Description: cysteine proteinase (EC 3
  misc_feature (8)..(431): NCBI GI NO: 18141285 NR Description: senescence-associated cysteine protease
QIENKHKKQTNMATSIKSITLALLIFSVLLISLSLGSVTATETTRNEAEARRMYERWLVENRKNYNGLGEKERRFEIFKDNLKFVEEHSSIPNRTYEVGLTRFADLTNDEFRAIYLRSKMERTRVPVKGEKYLYKVGDSLPDAIDWRAKGAVNPVKDQGSCGSCWAFSAIGAVEGINQIKTGELISLSEQELVDCDTSYNDGCGGGLMDYAFKFIIENGGIDTEEDYPYIATDVNVCNSDKKNTRVVTIDGYEDVPQNDEKSLKKALANQPISVAIEAGGRAFQLYTSGVFTGTCGTSLDHGVVAVGYGSEGGQDYWIVRNSWGSNWGESGYFKLERNIKESSGKCGVAMMASYPTKSSGSNPPKPPAPSPVVCDKSNTCPAKSTCCCLYEYNGKCYSWGCCPYESATCCDDGSSCCPQSYPVCDLKANTCRMKGNSPLSIKALTRGPAIATTKSTNMLVGSA

SEQ ID NO: 1281 - protein, 452 aa, Arabidopsis thaliana
  peptide (1)..(452): Ceres Seq. ID no. 13495956
  misc_feature (129)..(345): Pfam Name: Pfam Description:  Papain family cysteine protease
  misc_feature (1)..(452): NCBI GI NO: 18402225 NR Description: cysteine proteinase [Arabidopsis thaliana]
  misc_feature (6)..(452): NCBI GI NO: 18141281 NR Description: senescence-associated cysteine protease
  misc_feature (19)..(439): NCBI GI NO: 18422289 NR Description: cysteine proteinase RD21A [Arabidopsis thaliana]
  misc_feature (27)..(438): NCBI GI NO: 18141283 NR Description: senescence-associated cysteine protease
  misc_feature (9)..(438): NCBI GI NO: 14517542 NR Description: F2G19.31/F2G19.31 [Arabidopsis thaliana]
  misc_feature (9)..(438): NCBI GI NO: 18401614 NR Description: cysteine proteinase RD21A [Arabidopsis thaliana]
  misc_feature (24)..(446): NCBI GI NO: 30141019 NR Description: cysteine protease-1 [Helianthus annuus]
  misc_feature (1)..(435): NCBI GI NO: 5777889 NR Description: cysteine protease [Solanum tuberosum]
  misc_feature (44)..(441): NCBI GI NO: 1361974 NR Description: cysteine proteinase (EC 3
  misc_feature (1)..(420): NCBI GI NO: 18141285 NR Description: senescence-associated cysteine protease
MATSIKSITLALLIFSVLLISLSLGSVTATETTRNEAEARRMYERWLVENRKNYNGLGEKERRFEIFKDNLKFVEEHSSIPNRTYEVGLTRFADLTNDEFRAIYLRSKMERTRVPVKGEKYLYKVGDSLPDAIDWRAKGAVNPVKDQGSCGSCWAFSAIGAVEGINQIKTGELISLSEQELVDCDTSYNDGCGGGLMDYAFKFIIENGGIDTEEDYPYIATDVNVCNSDKKNTRVVTIDGYEDVPQNDEKSLKKALANQPISVAIEAGGRAFQLYTSGVFTGTCGTSLDHGVVAVGYGSEGGQDYWIVRNSWGSNWGESGYFKLERNIKESSGKCGVAMMASYPTKSSGSNPPKPPAPSPVVCDKSNTCPAKSTCCCLYEYNGKCYSWGCCPYESATCCDDGSSCCPQSYPVCDLKANTCRMKGNSPLSIKALTRGPAIATTKSTNMLVGSA

SEQ ID NO: 1282 - protein, 411 aa, Arabidopsis thaliana
  peptide (1)..(411): Ceres Seq. ID no. 13495957
  misc_feature (88)..(304): Pfam Name: Pfam Description:  Papain family cysteine protease
  misc_feature (1)..(411): NCBI GI NO: 18402225 NR Description: cysteine proteinase [Arabidopsis thaliana]
  misc_feature (1)..(411): NCBI GI NO: 18141281 NR Description: senescence-associated cysteine protease
  misc_feature (1)..(398): NCBI GI NO: 18422289 NR Description: cysteine proteinase RD21A [Arabidopsis thaliana]
  misc_feature (1)..(397): NCBI GI NO: 18141283 NR Description: senescence-associated cysteine protease
  misc_feature (1)..(397): NCBI GI NO: 14517542 NR Description: F2G19.31/F2G19.31 [Arabidopsis thaliana]
  misc_feature (1)..(397): NCBI GI NO: 18401614 NR Description: cysteine proteinase RD21A [Arabidopsis thaliana]
  misc_feature (1)..(405): NCBI GI NO: 30141019 NR Description: cysteine protease-1 [Helianthus annuus]
  misc_feature (1)..(394): NCBI GI NO: 5777889 NR Description: cysteine protease [Solanum tuberosum]
  misc_feature (3)..(400): NCBI GI NO: 1361974 NR Description: cysteine proteinase (EC 3
  misc_feature (1)..(379): NCBI GI NO: 18141285 NR Description: senescence-associated cysteine protease
MYERWLVENRKNYNGLGEKERRFEIFKDNLKFVEEHSSIPNRTYEVGLTRFADLTNDEFRAIYLRSKMERTRVPVKGEKYLYKVGDSLPDAIDWRAKGAVNPVKDQGSCGSCWAFSAIGAVEGINQIKTGELISLSEQELVDCDTSYNDGCGGGLMDYAFKFIIENGGIDTEEDYPYIATDVNVCNSDKKNTRVVTIDGYEDVPQNDEKSLKKALANQPISVAIEAGGRAFQLYTSGVFTGTCGTSLDHGVVAVGYGSEGGQDYWIVRNSWGSNWGESGYFKLERNIKESSGKCGVAMMASYPTKSSGSNPPKPPAPSPVVCDKSNTCPAKSTCCCLYEYNGKCYSWGCCPYESATCCDDGSSCCPQSYPVCDLKANTCRMKGNSPLSIKALTRGPAIATTKSTNMLVGSA

SEQ ID NO: 1283 - DNA, 719 bp, Arabidopsis thaliana
  misc_feature (1)..(719): Ceres Seq. ID no. 12322937
acatctcactgctcactactctcactgtaatcccttagatcttcttttcaaatttcaatggcgtccggtgatgttgagtatcggtgcttcgttggaggtctagcatgggccactgatgacagagctcttgagactgccttcgctcaatacggcgacgttattgattccaagatcattaacgatcgtgagactggaagatcaaggggattcggattcgtcaccttcaaggatgagaaagccatgaaggatgcgattgagggaatgaacggacaagatctcgatggccgtagcatcactgttaacgaggctcagtcacgaggaagcggtggcggcggtagacgcgagggtggaggaggatacagcggcggcggcggttactcctcaagaggtggtggtggcggaagctacggtggtggaagacgtgagggaggaggaggatacggtggtggtgaaggaggaggttacggaggaagcggtggtggtggaggatggtaattcctttaattaggtttgggattaccaatgaatgttctctctctcgcttgttatgcttctacttggttttgtgtgttctctattttgttctggttctgctttatatttgatgtaacagttcgtgattaggtattttggtatctggaaacgtaatgttaagtcacttgtcattctctaaataacaaatttcttcggagatattatctctgttgattgattctacc

SEQ ID NO: 1284 - protein, 145 aa, Arabidopsis thaliana
  peptide (1)..(145): Ceres Seq. ID no. 12322938
  misc_feature (10)..(81): Pfam Name: a.k.a. RRM, RBD, or RNP domain Pfam Description: RNA recognition motif.
  misc_feature (1)..(145): NCBI GI NO: 30681492 NR Description: glycine-rich RNA-binding protein (AtGRP7)
  misc_feature (1)..(145): NCBI GI NO: 21553354 NR Description: glycine-rich RNA binding protein 7
  misc_feature (1)..(145): NCBI GI NO: 15226605 NR Description: glycine-rich RNA binding protein AtGRP7
  misc_feature (1)..(145): NCBI GI NO: 1346181 NR Description: Glycine-rich RNA-binding protein GRP2A
  misc_feature (1)..(145): NCBI GI NO: 1346180 NR Description: Glycine-rich RNA-binding protein GRP1A
  misc_feature (5)..(145): NCBI GI NO: 544426 NR Description: Glycine-rich RNA-binding protein
  misc_feature (1)..(138): NCBI GI NO: 2267567 NR Description: glycine-rich RNA binding protein 1
  misc_feature (3)..(143): NCBI GI NO: 7439998 NR Description: glycine-rich RNA-binding protein GRP1
  misc_feature (5)..(144): NCBI GI NO: 2119044 NR Description: glycine-rich RNA-binding protein RGP-1b
  misc_feature (5)..(144): NCBI GI NO: 2119042 NR Description: glycine-rich RNA-binding protein RGP-1a
MASGDVEYRCFVGGLAWATDDRALETAFAQYGDVIDSKIINDRETGRSRGFGFVTFKDEKAMKDAIEGMNGQDLDGRSITVNEAQSRGSGGGGRREGGGGYSGGGGYSSRGGGGGSYGGGRREGGGGYGGGEGGGYGGSGGGGGW

SEQ ID NO: 1285 - protein, 84 aa, Arabidopsis thaliana
  peptide (1)..(84): Ceres Seq. ID no. 12322939
  misc_feature (15)..(83): Pfam Name: Pfam Description:  Herpesvirus large structural phospho protein UL32
  misc_feature (1)..(84): NCBI GI NO: 30681492 NR Description: glycine-rich RNA-binding protein (AtGRP7)
  misc_feature (1)..(84): NCBI GI NO: 21553354 NR Description: glycine-rich RNA binding protein 7
  misc_feature (1)..(84): NCBI GI NO: 15226605 NR Description: glycine-rich RNA binding protein AtGRP7
  misc_feature (1)..(84): NCBI GI NO: 1346181 NR Description: Glycine-rich RNA-binding protein GRP2A
  misc_feature (1)..(84): NCBI GI NO: 1346180 NR Description: Glycine-rich RNA-binding protein GRP1A
  misc_feature (1)..(84): NCBI GI NO: 544426 NR Description: Glycine-rich RNA-binding protein
  misc_feature (1)..(77): NCBI GI NO: 2267567 NR Description: glycine-rich RNA binding protein 1
  misc_feature (1)..(82): NCBI GI NO: 7439998 NR Description: glycine-rich RNA-binding protein GRP1
  misc_feature (1)..(83): NCBI GI NO: 2119044 NR Description: glycine-rich RNA-binding protein RGP-1b
  misc_feature (1)..(83): NCBI GI NO: 2119042 NR Description: glycine-rich RNA-binding protein RGP-1a
MKDAIEGMNGQDLDGRSITVNEAQSRGSGGGGRREGGGGYSGGGGYSSRGGGGGSYGGGRREGGGGYGGGEGGGYGGSGGGGGW

SEQ ID NO: 1286 - protein, 77 aa, Arabidopsis thaliana
  peptide (1)..(77): Ceres Seq. ID no. 12322940
  misc_feature (8)..(76): Pfam Name: Pfam Description:  Herpesvirus large structural phospho protein UL32
  misc_feature (1)..(77): NCBI GI NO: 30681492 NR Description: glycine-rich RNA-binding protein (AtGRP7)
  misc_feature (1)..(77): NCBI GI NO: 21553354 NR Description: glycine-rich RNA binding protein 7
  misc_feature (1)..(77): NCBI GI NO: 15226605 NR Description: glycine-rich RNA binding protein AtGRP7
  misc_feature (1)..(77): NCBI GI NO: 1346181 NR Description: Glycine-rich RNA-binding protein GRP2A
  misc_feature (1)..(77): NCBI GI NO: 1346180 NR Description: Glycine-rich RNA-binding protein GRP1A
  misc_feature (1)..(77): NCBI GI NO: 544426 NR Description: Glycine-rich RNA-binding protein
  misc_feature (1)..(70): NCBI GI NO: 2267567 NR Description: glycine-rich RNA binding protein 1
  misc_feature (1)..(75): NCBI GI NO: 7439998 NR Description: glycine-rich RNA-binding protein GRP1
  misc_feature (1)..(76): NCBI GI NO: 2119044 NR Description: glycine-rich RNA-binding protein RGP-1b
  misc_feature (1)..(76): NCBI GI NO: 2119042 NR Description: glycine-rich RNA-binding protein RGP-1a
MNGQDLDGRSITVNEAQSRGSGGGGRREGGGGYSGGGGYSSRGGGGGSYGGGRREGGGGYGGGEGGGYGGSGGGGGW

SEQ ID NO: 1287 - DNA, 917 bp, Arabidopsis thaliana
  misc_feature (1)..(917): Ceres Seq. ID no. 12396494
ctctgcacattcctcagtgatctatcaaagttcgaagagaccgacgcaaaagggacagaaacggagaaggagaaagaggcagagatgggagtagagatccaatcgccgcaggaacagagctcttacaccgttgagcagctcgtcgcccttaatcctttcaaccctgaaatcctgcctgatctcgaaaactacgttaacgttacatcgcaaacgtatagtctggaagtaaacctatgcttgcttcggctctatcagtttgagcctgagcgcatgaacactcatatcgtggctcgaatcttggtcaaggctcttatggctatgccaactccagacttcagcctttgcctcttcttgattcccgaaagagtgcaaatggaggagcagttcaagtcactaattgttctatcacactaccttgagactgggaggttccaacagttctgggatgaagctgccaagaaccgtcacattctcgaggctgttccaggttttgagcaagctattcaagcatatgcaagtcaccttcttagcttaagctaccaaaaggttccaagatcagtgctggctgaggctgttaacatggatggtgcatctctagacaaattcatcgagcagcaagtgactaacagtggatggattgttgagaaagagggtggaagtattgtcttaccacaaaatgaatttaaccatccggagctcaagaaaaatacaggtgagaatgttcccttggaacacattgcccgcatcttccccatccttggttgaaccaattcatgagaacactgcaaattttccttttgtctcttgttatcttgtgatgtacacttttaagacaccgtaatgtgaattttggcaatggccttcctctttgcaatttgacagattttcttaaaaatctagtagaccgagactttgcc

SEQ ID NO: 1288 - protein, 254 aa, Arabidopsis thaliana
  peptide (1)..(254): Ceres Seq. ID no. 12396495
  misc_feature (33)..(254): Pfam Name: eIF-3 p25 Pfam Description: Eukaryotic translation initiation factor 3 subunit 11
  misc_feature (29)..(254): NCBI GI NO: 15234123 NR Description: putative protein; protein id: At4g33250
  misc_feature (35)..(253): NCBI GI NO: 23396617 NR Description: Eukaryotic translation initiation factor 3 subunit 11
  misc_feature (194)..(254): NCBI GI NO: 20453126 NR Description: AT4g33250/F17M5_10 [Arabidopsis thaliana]
  misc_feature (38)..(249): NCBI GI NO: 21312044 NR Description: RIKEN cDNA 1200009C21 [Mus musculus]
  misc_feature (38)..(249): NCBI GI NO: 10801345 NR Description: muscle specific gene [Homo sapiens]
  misc_feature (38)..(249): NCBI GI NO: 27730981 NR Description: similar to RIKEN cDNA 1200009C21
  misc_feature (38)..(249): NCBI GI NO: 5114051 NR Description: HSPC029 [Homo sapiens]
  misc_feature (39)..(249): NCBI GI NO: 19922704 NR Description: CG10306-PA [Drosophila melanogaster]
  misc_feature (39)..(212): NCBI GI NO: 38047673 NR Description: similar to Drosophila melanogaster CG10306
  misc_feature (84)..(249): NCBI GI NO: 20380678 NR Description: Similar to RIKEN cDNA 1200009C21 gene
LCTFLSDLSKFEETDAKGTETEKEKEAEMGVEIQSPQEQSSYTVEQLVALNPFNPEILPDLENYVNVTSQTYSLEVNLCLLRLYQFEPERMNTHIVARILVKALMAMPTPDFSLCLFLIPERVQMEEQFKSLIVLSHYLETGRFQQFWDEAAKNRHILEAVPGFEQAIQAYASHLLSLSYQKVPRSVLAEAVNMDGASLDKFIEQQVTNSGWIVEKEGGSIVLPQNEFNHPELKKNTGENVPLEHIARIFPILG

SEQ ID NO: 1289 - protein, 226 aa, Arabidopsis thaliana
  peptide (1)..(226): Ceres Seq. ID no. 12396496
  misc_feature (5)..(226): Pfam Name: eIF-3 p25 Pfam Description: Eukaryotic translation initiation factor 3 subunit 11
  misc_feature (1)..(226): NCBI GI NO: 15234123 NR Description: putative protein; protein id: At4g33250
  misc_feature (7)..(225): NCBI GI NO: 23396617 NR Description: Eukaryotic translation initiation factor 3 subunit 11
  misc_feature (166)..(226): NCBI GI NO: 20453126 NR Description: AT4g33250/F17M5_10 [Arabidopsis thaliana]
  misc_feature (10)..(221): NCBI GI NO: 21312044 NR Description: RIKEN cDNA 1200009C21 [Mus musculus]
  misc_feature (10)..(221): NCBI GI NO: 10801345 NR Description: muscle specific gene [Homo sapiens]
  misc_feature (10)..(221): NCBI GI NO: 27730981 NR Description: similar to RIKEN cDNA 1200009C21
  misc_feature (10)..(221): NCBI GI NO: 5114051 NR Description: HSPC029 [Homo sapiens]
  misc_feature (11)..(221): NCBI GI NO: 19922704 NR Description: CG10306-PA [Drosophila melanogaster]
  misc_feature (11)..(184): NCBI GI NO: 38047673 NR Description: similar to Drosophila melanogaster CG10306
  misc_feature (56)..(221): NCBI GI NO: 20380678 NR Description: Similar to RIKEN cDNA 1200009C21 gene
MGVEIQSPQEQSSYTVEQLVALNPFNPEILPDLENYVNVTSQTYSLEVNLCLLRLYQFEPERMNTHIVARILVKALMAMPTPDFSLCLFLIPERVQMEEQFKSLIVLSHYLETGRFQQFWDEAAKNRHILEAVPGFEQAIQAYASHLLSLSYQKVPRSVLAEAVNMDGASLDKFIEQQVTNSGWIVEKEGGSIVLPQNEFNHPELKKNTGENVPLEHIARIFPILG

SEQ ID NO: 1290 - protein, 164 aa, Arabidopsis thaliana
  peptide (1)..(164): Ceres Seq. ID no. 12396497
  misc_feature (1)..(164): Pfam Name: eIF-3 p25 Pfam Description: Eukaryotic translation initiation factor 3 subunit 11
  misc_feature (1)..(164): NCBI GI NO: 15234123 NR Description: putative protein; protein id: At4g33250
  misc_feature (1)..(163): NCBI GI NO: 23396617 NR Description: Eukaryotic translation initiation factor 3 subunit 11
  misc_feature (104)..(164): NCBI GI NO: 20453126 NR Description: AT4g33250/F17M5_10 [Arabidopsis thaliana]
  misc_feature (1)..(159): NCBI GI NO: 21312044 NR Description: RIKEN cDNA 1200009C21 [Mus musculus]
  misc_feature (1)..(159): NCBI GI NO: 10801345 NR Description: muscle specific gene [Homo sapiens]
  misc_feature (1)..(159): NCBI GI NO: 27730981 NR Description: similar to RIKEN cDNA 1200009C21
  misc_feature (1)..(159): NCBI GI NO: 5114051 NR Description: HSPC029 [Homo sapiens]
  misc_feature (1)..(159): NCBI GI NO: 19922704 NR Description: CG10306-PA [Drosophila melanogaster]
  misc_feature (1)..(122): NCBI GI NO: 38047673 NR Description: similar to Drosophila melanogaster CG10306
  misc_feature (1)..(159): NCBI GI NO: 20380678 NR Description: Similar to RIKEN cDNA 1200009C21 gene
MNTHIVARILVKALMAMPTPDFSLCLFLIPERVQMEEQFKSLIVLSHYLETGRFQQFWDEAAKNRHILEAVPGFEQAIQAYASHLLSLSYQKVPRSVLAEAVNMDGASLDKFIEQQVTNSGWIVEKEGGSIVLPQNEFNHPELKKNTGENVPLEHIARIFPILG

SEQ ID NO: 1291 - DNA, 1310 bp, Arabidopsis thaliana
  misc_feature (1)..(1310): Ceres Seq. ID no. 12738714
gtgtagactgagaaataaagaagcccttgattttgcccattgcagtcatctctctcgaatctctctctataatccgatctgagaaatttcgccggagctaggttttgttgtttaccgatcaatcctttaatcaatggcaatggctgttttccgtcgcgaagggaggcgtctcctcccttcaatcgccgctcgcccaatcgctgctatccgatctcctctctcttctgaccaggaggaaggacttcttggagttcgatctatctcaactcaagtggtgcgtaaccgcatgaagagtgttaagaacatccaaaagatcacaaaggcaatgaagatggttgctgcttccaagcttagagcagttcaaggccgagctgagaactcccgtggactttggcagccatttactgcacttctaggagataatcccagcattgatgtaaagaagagtgtggtggtcactctctcttctgacaagggtctctgtggtggaatcaactccactgtcgttaaagtgagcagggctctgtacaaattgaatgctggtcctgaaaaggaagttcagtttgttattgtcggagagaaagcaaaggctataatgtttcgtgactcaaagaacgacattgtcctctctgtaacagagctgaataagaacccactcaattatgctcaggtgtcagttctagctgatgacatcctgaagaacgttgaatttgatgctttgcgcattgtctacaacaagttccattcagttgtcgcatttctgccaactgtgtccactgttttgtcacctgagattattgagaaggagtctgaaattggaggaaaacttggcgagcttgactcatatgagattgaaggtggggaaacaaagggagaaatattgcagaatctggccgagttccaattctcttgtgtgatgttcaatgcggttctggagaatgcatgtagtgagatgggagcaagaatgtctgccatggacagctcaagcagaaacgcaggagaaatgctcgaccgtctcaccctcacatacaacaggactcgtcaagcttctattacaacagagcttattgagattatctctggagcttctgctcttgaagctgctaaataagcccatccgtgttagttctcttttcttcgctttgatatttacccccaccttgaaggagaagagtgtgttaaaattttactgaatcagtttcctttgctggcttcttgttgagacctaccaatgtttgctcaacgatttttaataaacatacctgtaatttccagcaggatttcgaataattgcattaacattttgttcc

SEQ ID NO: 1292 - protein, 325 aa, Arabidopsis thaliana
  peptide (1)..(325): Ceres Seq. ID no. 12738715
  misc_feature (43)..(321): Pfam Name: Pfam Description:  ATP synthase
  misc_feature (1)..(325): NCBI GI NO: 15227257 NR Description: mitochondrial F1-ATPase, gamma subunit
  misc_feature (1)..(325): NCBI GI NO: 22530902 NR Description: mitochondrial F1-ATPase, gamma subunit
  misc_feature (3)..(325): NCBI GI NO: 7436158 NR Description: probable H+-transporting two-sector ATPase (EC 3
  misc_feature (1)..(322): NCBI GI NO: 543867 NR Description: ATP synthase gamma chain, mitochondrial precursor
  misc_feature (180)..(322): NCBI GI NO: 37532654 NR Description: putative ATP SYNTHASE GAMMA CHAIN
  misc_feature (46)..(179): NCBI GI NO: 37532654 NR Description: putative ATP SYNTHASE GAMMA CHAIN
  misc_feature (160)..(322): NCBI GI NO: 7436157 NR Description: probable H+-transporting two-sector ATPase (EC 3
  misc_feature (44)..(325): NCBI GI NO: 11466530 NR Description: ATP synthase F1 subunit alpha
  misc_feature (40)..(321): NCBI GI NO: 38512238 NR Description: Mitochondrial ATP synthase gamma-subunit
  misc_feature (40)..(322): NCBI GI NO: 543875 NR Description: ATP synthase gamma chain, mitochondrial precursor
MAMAVFRREGRRLLPSIAARPIAAIRSPLSSDQEEGLLGVRSISTQVVRNRMKSVKNIQKITKAMKMVAASKLRAVQGRAENSRGLWQPFTALLGDNPSIDVKKSVVVTLSSDKGLCGGINSTVVKVSRALYKLNAGPEKEVQFVIVGEKAKAIMFRDSKNDIVLSVTELNKNPLNYAQVSVLADDILKNVEFDALRIVYNKFHSVVAFLPTVSTVLSPEIIEKESEIGGKLGELDSYEIEGGETKGEILQNLAEFQFSCVMFNAVLENACSEMGARMSAMDSSSRNAGEMLDRLTLTYNRTRQASITTELIEIISGASALEAAK

SEQ ID NO: 1293 - protein, 323 aa, Arabidopsis thaliana
  peptide (1)..(323): Ceres Seq. ID no. 12738716
  misc_feature (41)..(319): Pfam Name: Pfam Description:  ATP synthase
  misc_feature (1)..(323): NCBI GI NO: 15227257 NR Description: mitochondrial F1-ATPase, gamma subunit
  misc_feature (1)..(323): NCBI GI NO: 22530902 NR Description: mitochondrial F1-ATPase, gamma subunit
  misc_feature (1)..(323): NCBI GI NO: 7436158 NR Description: probable H+-transporting two-sector ATPase (EC 3
  misc_feature (1)..(320): NCBI GI NO: 543867 NR Description: ATP synthase gamma chain, mitochondrial precursor
  misc_feature (178)..(320): NCBI GI NO: 37532654 NR Description: putative ATP SYNTHASE GAMMA CHAIN
  misc_feature (44)..(177): NCBI GI NO: 37532654 NR Description: putative ATP SYNTHASE GAMMA CHAIN
  misc_feature (158)..(320): NCBI GI NO: 7436157 NR Description: probable H+-transporting two-sector ATPase (EC 3
  misc_feature (42)..(323): NCBI GI NO: 11466530 NR Description: ATP synthase F1 subunit alpha
  misc_feature (38)..(319): NCBI GI NO: 38512238 NR Description: Mitochondrial ATP synthase gamma-subunit
  misc_feature (38)..(320): NCBI GI NO: 543875 NR Description: ATP synthase gamma chain, mitochondrial precursor
MAVFRREGRRLLPSIAARPIAAIRSPLSSDQEEGLLGVRSISTQVVRNRMKSVKNIQKITKAMKMVAASKLRAVQGRAENSRGLWQPFTALLGDNPSIDVKKSVVVTLSSDKGLCGGINSTVVKVSRALYKLNAGPEKEVQFVIVGEKAKAIMFRDSKNDIVLSVTELNKNPLNYAQVSVLADDILKNVEFDALRIVYNKFHSVVAFLPTVSTVLSPEIIEKESEIGGKLGELDSYEIEGGETKGEILQNLAEFQFSCVMFNAVLENACSEMGARMSAMDSSSRNAGEMLDRLTLTYNRTRQASITTELIEIISGASALEAAK

SEQ ID NO: 1294 - protein, 274 aa, Arabidopsis thaliana
  peptide (1)..(274): Ceres Seq. ID no. 12738717
  misc_feature (1)..(270): Pfam Name: Pfam Description:  ATP synthase
  misc_feature (1)..(274): NCBI GI NO: 15227257 NR Description: mitochondrial F1-ATPase, gamma subunit
  misc_feature (1)..(274): NCBI GI NO: 22530902 NR Description: mitochondrial F1-ATPase, gamma subunit
  misc_feature (1)..(274): NCBI GI NO: 7436158 NR Description: probable H+-transporting two-sector ATPase (EC 3
  misc_feature (1)..(271): NCBI GI NO: 543867 NR Description: ATP synthase gamma chain, mitochondrial precursor
  misc_feature (129)..(271): NCBI GI NO: 37532654 NR Description: putative ATP SYNTHASE GAMMA CHAIN
  misc_feature (1)..(128): NCBI GI NO: 37532654 NR Description: putative ATP SYNTHASE GAMMA CHAIN
  misc_feature (109)..(271): NCBI GI NO: 7436157 NR Description: probable H+-transporting two-sector ATPase (EC 3
  misc_feature (1)..(274): NCBI GI NO: 11466530 NR Description: ATP synthase F1 subunit alpha
  misc_feature (1)..(270): NCBI GI NO: 38512238 NR Description: Mitochondrial ATP synthase gamma-subunit
  misc_feature (1)..(271): NCBI GI NO: 543875 NR Description: ATP synthase gamma chain, mitochondrial precursor
MKSVKNIQKITKAMKMVAASKLRAVQGRAENSRGLWQPFTALLGDNPSIDVKKSVVVTLSSDKGLCGGINSTVVKVSRALYKLNAGPEKEVQFVIVGEKAKAIMFRDSKNDIVLSVTELNKNPLNYAQVSVLADDILKNVEFDALRIVYNKFHSVVAFLPTVSTVLSPEIIEKESEIGGKLGELDSYEIEGGETKGEILQNLAEFQFSCVMFNAVLENACSEMGARMSAMDSSSRNAGEMLDRLTLTYNRTRQASITTELIEIISGASALEAAK

SEQ ID NO: 1295 - DNA, 1953 bp, Arabidopsis thaliana
  misc_feature (1)..(1953): Ceres Seq. ID no. 13580493
gttttttagcttacgtttttcttcttcttctccttatgagttcaatatctgcaaatccacaaatctggattcacacctgagacgtttgttaatcggtacatctctatatttttgcaatcggagatggagatcgaatccgtcgcagctggttcttgttccaaggagaatcaaatgatctacaaggaatggttcgaattctccgattcagacggcgatggccgtattactggtaacgatgcgatcaagttcttcactatgtcgaatttgcctcgtccggaattgaagcagatctgggctattgcagattcaaagagacaagggtatcttggtttcaaagagtttattgttgccatgcagcttgtttcgttggctcaaactggacatgaaatatcgcatgaagttcttattagcgatgttgatttcaaaaatatcaatcctcctaccatggaaggtctgggtgtattaatggcgaaaaagaagcattcatcaaagtcgagtgatcctaatatgaatggtagccctgccgcagacacctcacttacagctcactggttctcttcaaaatcttcaaaaaagatttctctgtcctccgtaacatctatagtggatggcctgaagaggttgtacattcagaagctgaagccacttgaagtagcatatcggtttaacgattttgtatcccctttgttgactaacagtgatttcgatgcaaaacctatggtaatgcttctgggtcaatactccacaggaaaaacaacattcattaagcatttgcttaaatctacttatccaggagctcatattggaccagagccgactactgacagatttgttgttgtcatgtctggacctgatgaaagaagcattccggggaacacagtagcagttcaagcagatatgccattcagtggtcttacaacttttgggactgcctttttgtcaaagtttgaatgctctcagatgcctcaccctctgctggagcatgtaacatttgtcgacacccctggagttttatcaggggaaaaacaaagaacacagcgagcatatgatttcactggtgttacatcatggtttgcctctaagtgtgatcttatcctcctcctatttgacccacacaagctggatgtaagtgatgagttcaagcgtgtaatttcatctttacgcggtcatgatgacaagatccgcgttgttctgaataaggctgaccaagtggacactcagcagctaatgagggtatatggagctctcatgtggtcacttgggaaagttctcaatactcctgaggtctctcgtgtctacattggttccttcagtgataaacccataaacgaagctgcaactggtccaattgggagagagttgtttgaaaaggagcaagatgaccttcttgctgatttgaaagacattcctaagaaagcttgtgatcgtcgaataaatgagtttgtgaaacgggcaagagcagcaaagatacatgcgtacatcatcagccatttgaagaaggagatgccagcgataatggggaaagccaaagctcaacagaaactgatagataacttggaagacgagtttggaaaggtacaaagagagcatcacttacctaaaggagatttcccaaatgtggatcatttcagggaggtgctaagtggttacaacatcgacaagtttgagaagctaaagccgaaaatgttgcagactgttgatgatatgttggggtatgacatcccagagctcttgaaaaatttcaaaaacccttatgattaatatttctatccctcttatcttctgcggttgctgtataatccaaaactatacattcacttttggcctagcccttgtgacttgtgagcgttaatgcatatttgtattcttacaagccttgtagacaatagagacaaacataaagagtgctgacttgataatttgcttatatcacaaaccaaaagtattattgtt

SEQ ID NO: 1296 - protein, 545 aa, Arabidopsis thaliana
  peptide (1)..(545): Ceres Seq. ID no. 13580494
  misc_feature (18)..(46): Pfam Name: Pfam Description:  EF hand
  misc_feature (1)..(545): NCBI GI NO: 18402561 NR Description: calcium-binding EF-hand family protein
  misc_feature (127)..(545): NCBI GI NO: 9294546 NR Description: contains similarity to EH domain containingproteins~gene_id:MQC12
  misc_feature (1)..(110): NCBI GI NO: 9294546 NR Description: contains similarity to EH domain containingproteins~gene_id:MQC12
  misc_feature (13)..(545): NCBI GI NO: 38345297 NR Description: OSJNBa0043A12.19
  misc_feature (5)..(491): NCBI GI NO: 18412957 NR Description: calcium-binding EF-hand family protein
  misc_feature (143)..(537): NCBI GI NO: 39594267 NR Description: Hypothetical protein CBG18887
  misc_feature (122)..(537): NCBI GI NO: 7206819 NR Description: Receptor mediated endocytosis protein 1, isoform a
  misc_feature (122)..(537): NCBI GI NO: 17565132 NR Description: Receptor Mediated Endocytosis 1 RME-1 isoform 2
  misc_feature (126)..(537): NCBI GI NO: 17565130 NR Description: Receptor Mediated Endocytosis 1 isoform 1
  misc_feature (143)..(537): NCBI GI NO: 18250262 NR Description: Receptor mediated endocytosis protein 1, isoform e
MEIESVAAGSCSKENQMIYKEWFEFSDSDGDGRITGNDAIKFFTMSNLPRPELKQIWAIADSKRQGYLGFKEFIVAMQLVSLAQTGHEISHEVLISDVDFKNINPPTMEGLGVLMAKKKHSSKSSDPNMNGSPAADTSLTAHWFSSKSSKKISLSSVTSIVDGLKRLYIQKLKPLEVAYRFNDFVSPLLTNSDFDAKPMVMLLGQYSTGKTTFIKHLLKSTYPGAHIGPEPTTDRFVVVMSGPDERSIPGNTVAVQADMPFSGLTTFGTAFLSKFECSQMPHPLLEHVTFVDTPGVLSGEKQRTQRAYDFTGVTSWFASKCDLILLLFDPHKLDVSDEFKRVISSLRGHDDKIRVVLNKADQVDTQQLMRVYGALMWSLGKVLNTPEVSRVYIGSFSDKPINEAATGPIGRELFEKEQDDLLADLKDIPKKACDRRINEFVKRARAAKIHAYIISHLKKEMPAIMGKAKAQQKLIDNLEDEFGKVQREHHLPKGDFPNVDHFREVLSGYNIDKFEKLKPKMLQTVDDMLGYDIPELLKNFKNPYD

SEQ ID NO: 1297 - protein, 529 aa, Arabidopsis thaliana
  peptide (1)..(529): Ceres Seq. ID no. 13580495
  misc_feature (2)..(30): Pfam Name: Pfam Description:  EF hand
  misc_feature (1)..(529): NCBI GI NO: 18402561 NR Description: calcium-binding EF-hand family protein
  misc_feature (111)..(529): NCBI GI NO: 9294546 NR Description: contains similarity to EH domain containingproteins~gene_id:MQC12
  misc_feature (1)..(94): NCBI GI NO: 9294546 NR Description: contains similarity to EH domain containingproteins~gene_id:MQC12
  misc_feature (1)..(529): NCBI GI NO: 38345297 NR Description: OSJNBa0043A12.19
  misc_feature (1)..(475): NCBI GI NO: 18412957 NR Description: calcium-binding EF-hand family protein
  misc_feature (127)..(521): NCBI GI NO: 39594267 NR Description: Hypothetical protein CBG18887
  misc_feature (106)..(521): NCBI GI NO: 7206819 NR Description: Receptor mediated endocytosis protein 1, isoform a
  misc_feature (106)..(521): NCBI GI NO: 17565132 NR Description: Receptor Mediated Endocytosis 1 RME-1 isoform 2
  misc_feature (110)..(521): NCBI GI NO: 17565130 NR Description: Receptor Mediated Endocytosis 1 isoform 1
  misc_feature (127)..(521): NCBI GI NO: 18250262 NR Description: Receptor mediated endocytosis protein 1, isoform e
MIYKEWFEFSDSDGDGRITGNDAIKFFTMSNLPRPELKQIWAIADSKRQGYLGFKEFIVAMQLVSLAQTGHEISHEVLISDVDFKNINPPTMEGLGVLMAKKKHSSKSSDPNMNGSPAADTSLTAHWFSSKSSKKISLSSVTSIVDGLKRLYIQKLKPLEVAYRFNDFVSPLLTNSDFDAKPMVMLLGQYSTGKTTFIKHLLKSTYPGAHIGPEPTTDRFVVVMSGPDERSIPGNTVAVQADMPFSGLTTFGTAFLSKFECSQMPHPLLEHVTFVDTPGVLSGEKQRTQRAYDFTGVTSWFASKCDLILLLFDPHKLDVSDEFKRVISSLRGHDDKIRVVLNKADQVDTQQLMRVYGALMWSLGKVLNTPEVSRVYIGSFSDKPINEAATGPIGRELFEKEQDDLLADLKDIPKKACDRRINEFVKRARAAKIHAYIISHLKKEMPAIMGKAKAQQKLIDNLEDEFGKVQREHHLPKGDFPNVDHFREVLSGYNIDKFEKLKPKMLQTVDDMLGYDIPELLKNFKNPYD

SEQ ID NO: 1298 - protein, 501 aa, Arabidopsis thaliana
  peptide (1)..(501): Ceres Seq. ID no. 13580496
  misc_feature (1)..(501): NCBI GI NO: 18402561 NR Description: calcium-binding EF-hand family protein
  misc_feature (83)..(501): NCBI GI NO: 9294546 NR Description: contains similarity to EH domain containingproteins~gene_id:MQC12
  misc_feature (1)..(66): NCBI GI NO: 9294546 NR Description: contains similarity to EH domain containingproteins~gene_id:MQC12
  misc_feature (1)..(501): NCBI GI NO: 38345297 NR Description: OSJNBa0043A12.19
  misc_feature (1)..(447): NCBI GI NO: 18412957 NR Description: calcium-binding EF-hand family protein
  misc_feature (99)..(493): NCBI GI NO: 39594267 NR Description: Hypothetical protein CBG18887
  misc_feature (78)..(493): NCBI GI NO: 7206819 NR Description: Receptor mediated endocytosis protein 1, isoform a
  misc_feature (78)..(493): NCBI GI NO: 17565132 NR Description: Receptor Mediated Endocytosis 1 RME-1 isoform 2
  misc_feature (82)..(493): NCBI GI NO: 17565130 NR Description: Receptor Mediated Endocytosis 1 isoform 1
  misc_feature (99)..(493): NCBI GI NO: 18250262 NR Description: Receptor mediated endocytosis protein 1, isoform e
MSNLPRPELKQIWAIADSKRQGYLGFKEFIVAMQLVSLAQTGHEISHEVLISDVDFKNINPPTMEGLGVLMAKKKHSSKSSDPNMNGSPAADTSLTAHWFSSKSSKKISLSSVTSIVDGLKRLYIQKLKPLEVAYRFNDFVSPLLTNSDFDAKPMVMLLGQYSTGKTTFIKHLLKSTYPGAHIGPEPTTDRFVVVMSGPDERSIPGNTVAVQADMPFSGLTTFGTAFLSKFECSQMPHPLLEHVTFVDTPGVLSGEKQRTQRAYDFTGVTSWFASKCDLILLLFDPHKLDVSDEFKRVISSLRGHDDKIRVVLNKADQVDTQQLMRVYGALMWSLGKVLNTPEVSRVYIGSFSDKPINEAATGPIGRELFEKEQDDLLADLKDIPKKACDRRINEFVKRARAAKIHAYIISHLKKEMPAIMGKAKAQQKLIDNLEDEFGKVQREHHLPKGDFPNVDHFREVLSGYNIDKFEKLKPKMLQTVDDMLGYDIPELLKNFKNPYD

SEQ ID NO: 1299 - DNA, 1477 bp, Arabidopsis thaliana
  misc_feature (1)..(1477): Ceres Seq. ID no. 12321987
tagtttcgtcctccgtcaatctctctcgccgctttatccttgttacaaatcccatcgatcttttcggaatcttccctcattatgctcagccaccattaccagagctccattgtttcagttctccgttcaacgattatcggaattattcacaacactattagtatcaccgtcgccaaccgattttgattaccagctttggtgacgacagtcgtgattaaggaggttttggtaaatttcttcgttcctgtttgttttcaaagatggctgctttgaaaggttatggcttgtgttctatggactctgctcttcaattcccctgtcctaagctattcaatggctataagagaaggagctcgaaatgggtctctcccaaagcagctgttgtacccaatttccatctcccaatgcgcagcttggaggttaaaaacaggacaaacacagacgacattaaagctctacgtgtgatcacagctatcaaaacaccgtatctacctgatggaagattcgaccttgaagcctacgatgacttagtcaacattcagatacaaaacggtgctgaaggtgtcattgttggtggtacaactgtgaaggacaactgatgagctgggacgaacacattatgcttataggccataccgttaactgttttggcggaagcatcaaagtcattggaaacactggaagcaattcgactagagaagcaatccacgcgactgaacaaggattcgcggttggaatgcatgctgctcttcatataaacccttactatggcaagacttctattgagggactgattgcacatttccagtctgttcttcatatgggaccgacgattatatacaatgtgcctggtcgaacagggcaagatataccgcctcgtgccatcttcaaactttctcagaatccgaatttagctggtgtgaaggaatgtgttgggaacaagcgagtcgaagagtacactgagaatggggttgttgtgtggagtgggaatgatgatgagtgtcatgattccagatgggattatggagcaacaggagttatatcagttactagtaatttagttccgggtttgatgaggaagttgatgtttgaaggtaggaattcatctttgaactcaaagcttctacctttgatggcttggctgttccacgagccaaacccgattggaatcaacactgctttggctcagcttggagtttcgaggccggtttttaggttaccatatgtaccattgccactgtctaagaggcttgagtttgtgaaactggtgaaggagattggacgagagcattttgtgggtgagaaagatgttcaggctcttgatgatgatgattttatccttatcggtcgatattagcatacttttttttttgaatttttggttcctttttgtttggtgttaatgaagaagagatggttctatcatttggttttatgtagctgatgaatgaatgaaaactcaaggaatgatttcatc

SEQ ID NO: 1300 - protein, 252 aa, Arabidopsis thaliana
  peptide (1)..(252): Ceres Seq. ID no. 12321988
  misc_feature (1)..(228): Pfam Name: Pfam Description:  Dihydrodipicolinate synthetase family
  misc_feature (1)..(252): NCBI GI NO: 11066382 NR Description: dihydrodipicolinate synthase 2
  misc_feature (1)..(252): NCBI GI NO: 15225477 NR Description: putative dihydrodipicolinate synthase
  misc_feature (1)..(252): NCBI GI NO: 30695296 NR Description: dihydrodipicolinate synthase precursor
  misc_feature (1)..(252): NCBI GI NO: 15232971 NR Description: dihydrodipicolinate synthase precursor
  misc_feature (1)..(252): NCBI GI NO: 1076317 NR Description: dihydrodipicolinate synthase (EC 4
  misc_feature (1)..(252): NCBI GI NO: 6014908 NR Description: Dihydrodipicolinate synthase
  misc_feature (1)..(251): NCBI GI NO: 8648949 NR Description: dihydrodipicolinate synthase
  misc_feature (1)..(251): NCBI GI NO: 1076280 NR Description: dihydrodipicolinate synthase (EC 4
  misc_feature (1)..(252): NCBI GI NO: 6014907 NR Description: Dihydrodipicolinate synthase
  misc_feature (1)..(252): NCBI GI NO: 1084359 NR Description: dihydrodipicolinate synthase (EC 4.2.1.52)
MSWDEHIMLIGHTVNCFGGSIKVIGNTGSNSTREAIHATEQGFAVGMHAALHINPYYGKTSIEGLIAHFQSVLHMGPTIIYNVPGRTGQDIPPRAIFKLSQNPNLAGVKECVGNKRVEEYTENGVVVWSGNDDECHDSRWDYGATGVISVTSNLVPGLMRKLMFEGRNSSLNSKLLPLMAWLFHEPNPIGINTALAQLGVSRPVFRLPYVPLPLSKRLEFVKLVKEIGREHFVGEKDVQALDDDDFILIGRY

SEQ ID NO: 1301 - protein, 245 aa, Arabidopsis thaliana
  peptide (1)..(245): Ceres Seq. ID no. 12321989
  misc_feature (1)..(221): Pfam Name: Pfam Description:  Dihydrodipicolinate synthetase family
  misc_feature (1)..(245): NCBI GI NO: 11066382 NR Description: dihydrodipicolinate synthase 2
  misc_feature (1)..(245): NCBI GI NO: 15225477 NR Description: putative dihydrodipicolinate synthase
  misc_feature (1)..(245): NCBI GI NO: 30695296 NR Description: dihydrodipicolinate synthase precursor
  misc_feature (1)..(245): NCBI GI NO: 15232971 NR Description: dihydrodipicolinate synthase precursor
  misc_feature (1)..(245): NCBI GI NO: 1076317 NR Description: dihydrodipicolinate synthase (EC 4
  misc_feature (1)..(245): NCBI GI NO: 6014908 NR Description: Dihydrodipicolinate synthase
  misc_feature (1)..(244): NCBI GI NO: 8648949 NR Description: dihydrodipicolinate synthase
  misc_feature (1)..(244): NCBI GI NO: 1076280 NR Description: dihydrodipicolinate synthase (EC 4
  misc_feature (1)..(245): NCBI GI NO: 6014907 NR Description: Dihydrodipicolinate synthase
  misc_feature (1)..(245): NCBI GI NO: 1084359 NR Description: dihydrodipicolinate synthase (EC 4.2.1.52)
MLIGHTVNCFGGSIKVIGNTGSNSTREAIHATEQGFAVGMHAALHINPYYGKTSIEGLIAHFQSVLHMGPTIIYNVPGRTGQDIPPRAIFKLSQNPNLAGVKECVGNKRVEEYTENGVVVWSGNDDECHDSRWDYGATGVISVTSNLVPGLMRKLMFEGRNSSLNSKLLPLMAWLFHEPNPIGINTALAQLGVSRPVFRLPYVPLPLSKRLEFVKLVKEIGREHFVGEKDVQALDDDDFILIGRY

SEQ ID NO: 1302 - protein, 206 aa, Arabidopsis thaliana
  peptide (1)..(206): Ceres Seq. ID no. 12321990
  misc_feature (1)..(182): Pfam Name: Pfam Description:  Dihydrodipicolinate synthetase family
  misc_feature (1)..(206): NCBI GI NO: 11066382 NR Description: dihydrodipicolinate synthase 2
  misc_feature (1)..(206): NCBI GI NO: 15225477 NR Description: putative dihydrodipicolinate synthase
  misc_feature (1)..(206): NCBI GI NO: 30695296 NR Description: dihydrodipicolinate synthase precursor
  misc_feature (1)..(206): NCBI GI NO: 15232971 NR Description: dihydrodipicolinate synthase precursor
  misc_feature (1)..(206): NCBI GI NO: 1076317 NR Description: dihydrodipicolinate synthase (EC 4
  misc_feature (1)..(206): NCBI GI NO: 6014908 NR Description: Dihydrodipicolinate synthase
  misc_feature (1)..(205): NCBI GI NO: 8648949 NR Description: dihydrodipicolinate synthase
  misc_feature (1)..(205): NCBI GI NO: 1076280 NR Description: dihydrodipicolinate synthase (EC 4
  misc_feature (1)..(206): NCBI GI NO: 6014907 NR Description: Dihydrodipicolinate synthase
  misc_feature (1)..(206): NCBI GI NO: 1084359 NR Description: dihydrodipicolinate synthase (EC 4.2.1.52)
MHAALHINPYYGKTSIEGLIAHFQSVLHMGPTIIYNVPGRTGQDIPPRAIFKLSQNPNLAGVKECVGNKRVEEYTENGVVVWSGNDDECHDSRWDYGATGVISVTSNLVPGLMRKLMFEGRNSSLNSKLLPLMAWLFHEPNPIGINTALAQLGVSRPVFRLPYVPLPLSKRLEFVKLVKEIGREHFVGEKDVQALDDDDFILIGRY

SEQ ID NO: 1303 - DNA, 1290 bp, Arabidopsis thaliana
  misc_feature (1)..(1290): Ceres Seq. ID no. 13486716
aaaaactcagtgagtgagtcaccgaaaacctcttgtagtagattcgtgacgggtttgatcatctcttcgaggtcggttctagggtttcactacgagaatggacggagatgagctcaccgagcaggaaactgctctttatgaccgtcaaattagggtatggggagctggtgctcaaagaagattgagtaaatctcatgttttggtatctggaattaagggcactgttgctgagttttgtaagaacattgtgttggcaggagtaggtagtgtgactctgttggatgatcgattggttacaacggaagtcttcaacgcaaacttcttgattcttcctgatgaaaatgcttatgtaggcaaaaccgtagctgagatttgttgtgattcacttaaggattttaaccctatggttcatgtttcaatagagaaaggtgatttgtcaacacttggtgttgattttttcgagaagtttgatgttgtggttatcggctacagttctcgtgctactaagaaagcagttaatgaaaagtgtaggaacctagcaaaagatgtagcgttctatacagttgattgtagaggctcatgtggcgaaatatttgtcgaccttcagaattataagtacacaaagaaaaagcttgatgaaacagtggaatgtgaactaacatttccaagttttgaggaggcagtttcagtaccgtggaaaccgatgccaaggagaacagcaaagctctactttgcaatgagagtgatagaactatttgaggaaactgaaggacgtaaacctggggaatgttcgctgtctgatctcccaagagttttgaaactcaaaaaggaactatgtgaaggaaattcggtcagcgagaatcatattccagatatcctcttggagagactcgtatctaataacacagaattcccaccggcttgtgccatcattggagggattctaggacaggaggtgataaaagttatatcaggcaaaggagagccgttgaagaacttcttctactttgatgcagaggatgggaaaggtgtaatcgaggacctatcccacaagctttaacttccaaacatgaaaggtgctgtgaaacgctgctcttagtaattagttccttgttgaagattgtattggaaattagactttagagtacttagaacttggctccttgtcttttgtatctactaacttggttcgctcctaaagacaatctgtaacccactatttactttaatccatcaatttacacactcctatctaaaaaaaaaaaaaaaaaactccaccgggggcccggt

SEQ ID NO: 1304 - protein, 320 aa, Arabidopsis thaliana
  peptide (1)..(320): Ceres Seq. ID no. 13486717
  misc_feature (30)..(168): Pfam Name: Pfam Description:  ThiF family
  misc_feature (1)..(320): NCBI GI NO: 18423184 NR Description: SUMO activating enzyme 1b (SAE1b)
  misc_feature (1)..(320): NCBI GI NO: 22652852 NR Description: SUMO activating enzyme 1b [Arabidopsis thaliana]
  misc_feature (1)..(320): NCBI GI NO: 30695912 NR Description: SUMO activating enzyme 1b (SAE1b)
  misc_feature (1)..(320): NCBI GI NO: 21554965 NR Description: ubiquitin activating enzyme [Arabidopsis thaliana]
  misc_feature (1)..(317): NCBI GI NO: 18416454 NR Description: SUMO activating enzyme, putative
  misc_feature (1)..(317): NCBI GI NO: 7488411 NR Description: ubiquitin-activating enzyme homolog F13M23
  misc_feature (3)..(317): NCBI GI NO: 3647283 NR Description: ubiquitin activating enzyme
  misc_feature (86)..(319): NCBI GI NO: 25494393 NR Description: probable ubiquitin activating enzyme 2
  misc_feature (3)..(178): NCBI GI NO: 9790247 NR Description: ubiquitin-like 1
  misc_feature (176)..(316): NCBI GI NO: 9790247 NR Description: ubiquitin-like 1
MDGDELTEQETALYDRQIRVWGAGAQRRLSKSHVLVSGIKGTVAEFCKNIVLAGVGSVTLLDDRLVTTEVFNANFLILPDENAYVGKTVAEICCDSLKDFNPMVHVSIEKGDLSTLGVDFFEKFDVVVIGYSSRATKKAVNEKCRNLAKDVAFYTVDCRGSCGEIFVDLQNYKYTKKKLDETVECELTFPSFEEAVSVPWKPMPRRTAKLYFAMRVIELFEETEGRKPGECSLSDLPRVLKLKKELCEGNSVSENHIPDILLERLVSNNTEFPPACAIIGGILGQEVIKVISGKGEPLKNFFYFDAEDGKGVIEDLSHKL

SEQ ID NO: 1305 - protein, 218 aa, Arabidopsis thaliana
  peptide (1)..(218): Ceres Seq. ID no. 13486718
  misc_feature (1)..(66): Pfam Name: Pfam Description:  ThiF family
  misc_feature (1)..(218): NCBI GI NO: 18423184 NR Description: SUMO activating enzyme 1b (SAE1b)
  misc_feature (1)..(218): NCBI GI NO: 22652852 NR Description: SUMO activating enzyme 1b [Arabidopsis thaliana]
  misc_feature (1)..(218): NCBI GI NO: 30695912 NR Description: SUMO activating enzyme 1b (SAE1b)
  misc_feature (1)..(218): NCBI GI NO: 21554965 NR Description: ubiquitin activating enzyme [Arabidopsis thaliana]
  misc_feature (1)..(215): NCBI GI NO: 18416454 NR Description: SUMO activating enzyme, putative
  misc_feature (1)..(215): NCBI GI NO: 7488411 NR Description: ubiquitin-activating enzyme homolog F13M23
  misc_feature (1)..(215): NCBI GI NO: 3647283 NR Description: ubiquitin activating enzyme
  misc_feature (1)..(217): NCBI GI NO: 25494393 NR Description: probable ubiquitin activating enzyme 2
  misc_feature (1)..(76): NCBI GI NO: 9790247 NR Description: ubiquitin-like 1
  misc_feature (74)..(214): NCBI GI NO: 9790247 NR Description: ubiquitin-like 1
MVHVSIEKGDLSTLGVDFFEKFDVVVIGYSSRATKKAVNEKCRNLAKDVAFYTVDCRGSCGEIFVDLQNYKYTKKKLDETVECELTFPSFEEAVSVPWKPMPRRTAKLYFAMRVIELFEETEGRKPGECSLSDLPRVLKLKKELCEGNSVSENHIPDILLERLVSNNTEFPPACAIIGGILGQEVIKVISGKGEPLKNFFYFDAEDGKGVIEDLSHKL

SEQ ID NO: 1306 - DNA, 1166 bp, Arabidopsis thaliana
  misc_feature (1)..(1166): Ceres Seq. ID no. 12321452
aaagctgaactataaaaatggcgatttctacattactctcaatctcttctttcactctatcttcttcctcatcaacaaaaacccatctccttacttcaatacctgcttcaagggtttattcttatccaatttcacccaaatggaagcaaattcgtttcctgcagagtcaaagttccagtcttttctatccattacgccgcaatttcaccagattctgttcttctccagatgggtttctcagaaacaccaaagacgacgaagaaggaaacgaaatcattcagcttccgtctattggtgtaaaccctgtgaaattcgcgatttgcgttgtgttgtgggcttctttctctctgctttggtttgctaggtctggagatgccaaagctgcgactgattctatcaaatcttcgagctttggtctcagaatcgcctccactcttcgccgttttggttggccagacgaagctgttgtgtttgctttagctactcttccggttattgaactccgtggtgccattcctgttggttattggatgcaactaaaaccggtggttctcacttccttctctgttcttggcaatatggttccagttccattcatcgtactttacctcaaaacgtttgcatcttttgtggcgggtaagagccaaacagcttctaaattacttgatatcttgtttaaaagagctaaagagaaagctggacctgtggaagagttcaaatggttagggctaatgctctttgtagctgttccattccctggaaccggtgcttggacaggagctataatagcatcaatcctcgacatgccgttttggtctgctgtttcgtctaatttctgcggtgtagtgttggctggactgttggtgaacttgctggtaaatcttggtttgaaacaagccattgtagctggtattgctctcttctttgtatctacgtttatgtggagcgttctcagaaacattaggaagtctataaaaccatcgttgccttgaattcgttattagatacttagatgtagaagaaagagttcttcacactattggttctttttttcttcaactgttaataatgtttttaagggatttgtgttggtcttaatttcctcaattcactcttctcataaatcccttattgtgatatacaaataatgcaatttatcattactc

SEQ ID NO: 1307 - protein, 324 aa, Arabidopsis thaliana
  peptide (1)..(324): Ceres Seq. ID no. 12321453
  misc_feature (1)..(324): NCBI GI NO: 15227004 NR Description: putative transport protein; protein id: At2g02590
  misc_feature (118)..(319): NCBI GI NO: 34897152 NR Description: unknown protein
  misc_feature (157)..(291): NCBI GI NO: 11499286 NR Description: small multidrug export protein (qacE)
  misc_feature (151)..(290): NCBI GI NO: 28212098 NR Description: putative small multi-drug export protein
  misc_feature (157)..(285): NCBI GI NO: 15613797 NR Description: small multidrug export related protein
  misc_feature (150)..(290): NCBI GI NO: 22537969 NR Description: conserved hypothetical protein
  misc_feature (146)..(291): NCBI GI NO: 21227925 NR Description: putative small multi-drug export protein
  misc_feature (146)..(296): NCBI GI NO: 23052254 NR Description: hypothetical protein [Methanosarcina barkeri]
  misc_feature (151)..(291): NCBI GI NO: 18978147 NR Description: putative small multidrug export protein; (qacE)
  misc_feature (151)..(282): NCBI GI NO: 14591427 NR Description: hypothetical protein [Pyrococcus horikoshii]
MAISTLLSISSFTLSSSSSTKTHLLTSIPASRVYSYPISPKWKQIRFLQSQSSSLFYPLRRNFTRFCSSPDGFLRNTKDDEEGNEIIQLPSIGVNPVKFAICVVLWASFSLLWFARSGDAKAATDSIKSSSFGLRIASTLRRFGWPDEAVVFALATLPVIELRGAIPVGYWMQLKPVVLTSFSVLGNMVPVPFIVLYLKTFASFVAGKSQTASKLLDILFKRAKEKAGPVEEFKWLGLMLFVAVPFPGTGAWTGAIIASILDMPFWSAVSSNFCGVVLAGLLVNLLVNLGLKQAIVAGIALFFVSTFMWSVLRNIRKSIKPSLP

SEQ ID NO: 1308 - DNA, 1300 bp, Arabidopsis thaliana
  misc_feature (1)..(1300): Ceres Seq. ID no. 12357711
ataacctttgattaatcaaacctttctctatgtgtttttccctcaaaccacatcgttgacttggatctctcattcatcttgttctgtttttgtgacctaattttacagaaacaaaatgggtgtatctgaaatttcaagatcagaggagaagagcggtataggtttcgttaaattgtttgaaaataacgttgtgtttcctggatttttggtatggatgaatcaaacaattcaagagcctcttaaggctgagttcaaaagattaaggaatgtgaaagagctaagtttgaagtcagtgtcaaagatagagactgcttatgaggagcatagagatgaagagaagttagagaagcaattacaagcttggagagataatccctcatggatagatcagcctcctaaagtggtggtgaaatcacaaaatggtttgttttgccatttaaacattgaagcagacgtaggattgcctcctgaattagtatacaacattttcactcatccagacaacaaaagatacttcaaaaacatcaaggaaaacatatcaagaaaagttttgatcgacgaagggccaaagcagaccgtggaagtgaagcaagccgcggcctggaagttcctttggtgggatggaacttgtcctatacatctcattgtcgaagaaaaccggaaaaatctcacttcaaaatataagcaagagacaacaatgttcatgaaagtgtttgagggttgttggaaagtggagccattgtttatagacgaacatttgtgtgaccgctcaaagccaaaatctcaaaaagattaccatagctgtagcaacggacgaggaaggatcggatcaaaggtgacaatggatcaaatgtttcagccttcagctcttcttactcccccgccactttcttggtacatacgtgggatcaccattaaaaccacagagagtatgatcgaagatcttttcgctgaagctactagacttcggggaggaaaaggaggaggctatattgatgatcaaggagaaaacaatgtggtaaccgagaagagcaaagctgatgacattaaggaaagatggagatcacataggagaagtaaacggaggagatttacaactgctaggtcaatgtaattgaagagactgtgattctagaatttcttgattattctggagatttgtaatgttcaagctctttacaagtttcccaaaagggatcctctgtttttaccactaacagaaactacaccttccaatagaaaaaaaaatgcattaaatctctcatatagttccctccacgttttgattgaggcttgtcct

SEQ ID NO: 1309 - protein, 332 aa, Arabidopsis thaliana
  peptide (1)..(332): Ceres Seq. ID no. 12357712
  misc_feature (168)..(268): Pfam Name: Pfam Description:  Domain of unknown function DUF220
  misc_feature (1)..(332): NCBI GI NO: 18395257 NR Description: Expressed protein; protein id: At1g23560
  misc_feature (1)..(332): NCBI GI NO: 8778583 NR Description: F28C11.19 [Arabidopsis thaliana]
  misc_feature (1)..(332): NCBI GI NO: 21554971 NR Description: unknown [Arabidopsis thaliana]
  misc_feature (32)..(325): NCBI GI NO: 18409585 NR Description: expressed protein; protein id: At1g70480
  misc_feature (32)..(325): NCBI GI NO: 21592433 NR Description: unknown [Arabidopsis thaliana]
  misc_feature (32)..(283): NCBI GI NO: 2129655 NR Description: hypothetical protein OBP32 - Arabidopsis thaliana
  misc_feature (26)..(285): NCBI GI NO: 15220802 NR Description: putative OBP32pep protein; protein id: At1g23600.1
  misc_feature (137)..(310): NCBI GI NO: 8778583 NR Description: F28C11.19 [Arabidopsis thaliana]
  misc_feature (26)..(139): NCBI GI NO: 8778583 NR Description: F28C11.19 [Arabidopsis thaliana]
  misc_feature (26)..(286): NCBI GI NO: 15220781 NR Description: OBP32pep protein, putative; protein id: At1g23520
MGVSEISRSEEKSGIGFVKLFENNVVFPGFLVWMNQTIQEPLKAEFKRLRNVKELSLKSVSKIETAYEEHRDEEKLEKQLQAWRDNPSWIDQPPKVVVKSQNGLFCHLNIEADVGLPPELVYNIFTHPDNKRYFKNIKENISRKVLIDEGPKQTVEVKQAAAWKFLWWDGTCPIHLIVEENRKNLTSKYKQETTMFMKVFEGCWKVEPLFIDEHLCDRSKPKSQKDYHSCSNGRGRIGSKVTMDQMFQPSALLTPPPLSWYIRGITIKTTESMIEDLFAEATRLRGGKGGGYIDDQGENNVVTEKSKADDIKERWRSHRRSKRRRFTTARSM

SEQ ID NO: 1310 - protein, 299 aa, Arabidopsis thaliana
  peptide (1)..(299): Ceres Seq. ID no. 12357713
  misc_feature (135)..(235): Pfam Name: Pfam Description:  Domain of unknown function DUF220
  misc_feature (1)..(299): NCBI GI NO: 18395257 NR Description: Expressed protein; protein id: At1g23560
  misc_feature (1)..(299): NCBI GI NO: 8778583 NR Description: F28C11.19 [Arabidopsis thaliana]
  misc_feature (1)..(299): NCBI GI NO: 21554971 NR Description: unknown [Arabidopsis thaliana]
  misc_feature (1)..(292): NCBI GI NO: 18409585 NR Description: expressed protein; protein id: At1g70480
  misc_feature (1)..(292): NCBI GI NO: 21592433 NR Description: unknown [Arabidopsis thaliana]
  misc_feature (1)..(250): NCBI GI NO: 2129655 NR Description: hypothetical protein OBP32 - Arabidopsis thaliana
  misc_feature (1)..(252): NCBI GI NO: 15220802 NR Description: putative OBP32pep protein; protein id: At1g23600.1
  misc_feature (104)..(277): NCBI GI NO: 8778583 NR Description: F28C11.19 [Arabidopsis thaliana]
  misc_feature (1)..(106): NCBI GI NO: 8778583 NR Description: F28C11.19 [Arabidopsis thaliana]
  misc_feature (1)..(253): NCBI GI NO: 15220781 NR Description: OBP32pep protein, putative; protein id: At1g23520
MNQTIQEPLKAEFKRLRNVKELSLKSVSKIETAYEEHRDEEKLEKQLQAWRDNPSWIDQPPKVVVKSQNGLFCHLNIEADVGLPPELVYNIFTHPDNKRYFKNIKENISRKVLIDEGPKQTVEVKQAAAWKFLWWDGTCPIHLIVEENRKNLTSKYKQETTMFMKVFEGCWKVEPLFIDEHLCDRSKPKSQKDYHSCSNGRGRIGSKVTMDQMFQPSALLTPPPLSWYIRGITIKTTESMIEDLFAEATRLRGGKGGGYIDDQGENNVVTEKSKADDIKERWRSHRRSKRRRFTTARSM

SEQ ID NO: 1311 - DNA, 904 bp, Arabidopsis thaliana
  misc_feature (1)..(904): Ceres Seq. ID no. 12323852
agtgagaaaagaatcttcttttggcaaatgcttcgatcctcaattcgacttctctatataagaagaaccagtcctctgcttcgaagtttatcatcatcatcatcattatcatcaaaacgattcgattctgcgaaaccgattttcaattctcatcggactttttgtcttcctccaatctctacaacgggagctaaactttctagatcggagcattcaatggctgcttcttccgaacctaaatctctttacgatttcaccgtcaaggatgctaagggaaacgatgttgatctaagcatctacaaagggaaggttctcttgattgtgaacgttgcttctcaatgtggcttgactaattcgaattatactgagcttgcgcagctgtatgagaagtacaaaggccatggtttcgagattcttgcgtttccgtgtaaccagtttgggaatcaagagcctggtactaatgaagagattgttcagtttgcttgtactcgtttcaaggccgagtacccgattttcgacaaggttgatgttaacggtgacaaagctgccccagtctacaagtttctgaaatcaagcaaaggcgggctctttggagacggcattaagtggaacttcgcaaagttcttggttgacaaagatggaaatgttgtcgaccgtttcgcaccaactacctcccctctcagcattgagaaggatttgaagaagttgttgggagttactgcttaagcaaggcaagattgcataattagacaaataaaagctcattagtattgtattaccaatactgtgtagtaagctgagttcgtgagtgtgtgtgcctttgggaccgcgtacaattataatccgttttttagcggccaaactatgtaataatcgtaaatctaaatatcagatttccctttac

SEQ ID NO: 1312 - protein, 241 aa, Arabidopsis thaliana
  peptide (1)..(241): Ceres Seq. ID no. 12323853
  misc_feature (81)..(190): Pfam Name: Pfam Description:  Glutathione peroxidase
  misc_feature (10)..(241): NCBI GI NO: 30681827 NR Description: glutathione peroxidase, putative
  misc_feature (73)..(241): NCBI GI NO: 20138157 NR Description: Probable phospholipid hydroperoxide glutathione peroxidase
  misc_feature (57)..(237): NCBI GI NO: 6179600 NR Description: GPX12Hv, glutathione peroxidase-like protein
  misc_feature (74)..(237): NCBI GI NO: 27544804 NR Description: phospholipid hydroperoxide glutathione peroxidase-like
  misc_feature (73)..(238): NCBI GI NO: 22268405 NR Description: putative glutathione peroxidase [Zea mays]
  misc_feature (75)..(239): NCBI GI NO: 20138151 NR Description: Probable phospholipid hydroperoxide glutathione peroxidase
  misc_feature (73)..(238): NCBI GI NO: 34334012 NR Description: cytosolic glutathione peroxidase
  misc_feature (73)..(238): NCBI GI NO: 21360380 NR Description: glutathione peroxidase 1 [Oryza sativa]
  misc_feature (73)..(237): NCBI GI NO: 6179604 NR Description: glutathione peroxidase-like protein GPX54Hv
  misc_feature (73)..(240): NCBI GI NO: 20138384 NR Description: Probable phospholipid hydroperoxide glutathione peroxidase
SEKRIFFWQMLRSSIRLLYIRRTSPLLRSLSSSSSLSSKRFDSAKPIFNSHRTFCLPPISTTGAKLSRSEHSMAASSEPKSLYDFTVKDAKGNDVDLSIYKGKVLLIVNVASQCGLTNSNYTELAQLYEKYKGHGFEILAFPCNQFGNQEPGTNEEIVQFACTRFKAEYPIFDKVDVNGDKAAPVYKFLKSSKGGLFGDGIKWNFAKFLVDKDGNVVDRFAPTTSPLSIEKDLKKLLGVTA

SEQ ID NO: 1313 - protein, 232 aa, Arabidopsis thaliana
  peptide (1)..(232): Ceres Seq. ID no. 12323854
  misc_feature (72)..(181): Pfam Name: Pfam Description:  Glutathione peroxidase
  misc_feature (1)..(232): NCBI GI NO: 30681827 NR Description: glutathione peroxidase, putative
  misc_feature (64)..(232): NCBI GI NO: 20138157 NR Description: Probable phospholipid hydroperoxide glutathione peroxidase
  misc_feature (48)..(228): NCBI GI NO: 6179600 NR Description: GPX12Hv, glutathione peroxidase-like protein
  misc_feature (65)..(228): NCBI GI NO: 27544804 NR Description: phospholipid hydroperoxide glutathione peroxidase-like
  misc_feature (64)..(229): NCBI GI NO: 22268405 NR Description: putative glutathione peroxidase [Zea mays]
  misc_feature (66)..(230): NCBI GI NO: 20138151 NR Description: Probable phospholipid hydroperoxide glutathione peroxidase
  misc_feature (64)..(229): NCBI GI NO: 34334012 NR Description: cytosolic glutathione peroxidase
  misc_feature (64)..(229): NCBI GI NO: 21360380 NR Description: glutathione peroxidase 1 [Oryza sativa]
  misc_feature (64)..(228): NCBI GI NO: 6179604 NR Description: glutathione peroxidase-like protein GPX54Hv
  misc_feature (64)..(231): NCBI GI NO: 20138384 NR Description: Probable phospholipid hydroperoxide glutathione peroxidase
MLRSSIRLLYIRRTSPLLRSLSSSSSLSSKRFDSAKPIFNSHRTFCLPPISTTGAKLSRSEHSMAASSEPKSLYDFTVKDAKGNDVDLSIYKGKVLLIVNVASQCGLTNSNYTELAQLYEKYKGHGFEILAFPCNQFGNQEPGTNEEIVQFACTRFKAEYPIFDKVDVNGDKAAPVYKFLKSSKGGLFGDGIKWNFAKFLVDKDGNVVDRFAPTTSPLSIEKDLKKLLGVTA

SEQ ID NO: 1314 - protein, 169 aa, Arabidopsis thaliana
  peptide (1)..(169): Ceres Seq. ID no. 12323855
  misc_feature (9)..(118): Pfam Name: Pfam Description:  Glutathione peroxidase
  misc_feature (1)..(169): NCBI GI NO: 30681827 NR Description: glutathione peroxidase, putative
  misc_feature (1)..(169): NCBI GI NO: 20138157 NR Description: Probable phospholipid hydroperoxide glutathione peroxidase
  misc_feature (1)..(165): NCBI GI NO: 6179600 NR Description: GPX12Hv, glutathione peroxidase-like protein
  misc_feature (2)..(165): NCBI GI NO: 27544804 NR Description: phospholipid hydroperoxide glutathione peroxidase-like
  misc_feature (1)..(166): NCBI GI NO: 22268405 NR Description: putative glutathione peroxidase [Zea mays]
  misc_feature (3)..(167): NCBI GI NO: 20138151 NR Description: Probable phospholipid hydroperoxide glutathione peroxidase
  misc_feature (1)..(166): NCBI GI NO: 34334012 NR Description: cytosolic glutathione peroxidase
  misc_feature (1)..(166): NCBI GI NO: 21360380 NR Description: glutathione peroxidase 1 [Oryza sativa]
  misc_feature (1)..(165): NCBI GI NO: 6179604 NR Description: glutathione peroxidase-like protein GPX54Hv
  misc_feature (1)..(168): NCBI GI NO: 20138384 NR Description: Probable phospholipid hydroperoxide glutathione peroxidase
MAASSEPKSLYDFTVKDAKGNDVDLSIYKGKVLLIVNVASQCGLTNSNYTELAQLYEKYKGHGFEILAFPCNQFGNQEPGTNEEIVQFACTRFKAEYPIFDKVDVNGDKAAPVYKFLKSSKGGLFGDGIKWNFAKFLVDKDGNVVDRFAPTTSPLSIEKDLKKLLGVTA

SEQ ID NO: 1315 - DNA, 1167 bp, Arabidopsis thaliana
  misc_feature (1)..(1167): Ceres Seq. ID no. 12321925
  misc_feature (506)..(506): n is a, c, t, g, unknown, or other
  misc_feature (517)..(517): n is a, c, t, g, unknown, or other
aaaataatttgaaaggaatatgaatattccgttgaagaagacttgctcctgaaatcctttggaccgaaactcgtaaaattatttcccttcaatttctctgaaatctattcaccgtctcctttgtctcctcctccaaatcgatcgttcctcgtcgtcgtctgattttctctacgattgctttttctgtctagctcgataagataaaacaaaactaatttttgaagagtttttttttttgggtttgggagcgatgggtcaagcttttcgtaagctattcgatactttcttcggcaatcaagaaatgagggtcgttatgctggggctggatgctgctggaaaaacaactattctctacaagcttcatattggagaagttttgtctactgttcccaccattggattcaatgttgagaaagttcagtacaagaatgtgatgttcacagtttgggatgttggtggccaagagaaactgagacctctttggaggcattacttcaataaatttnaaaaacccccnttttttttggatggacttatatacgtggtggattccttagatcgagagaggatcgggaaagcaaagcaagaatttcaggagatcataaaagacccattcatgctaaacagtatcattctggtgtttgcaaacaaacaggacatgagaggagccatgtcaccgagagaagtatgtgaagggttaggcttatttgatctcaagaacaggaaatggcacatacaaggtacttgtgctcttcgtggagacgggctttatgaaggcttggactggttatcatctactcttaaggatgttaaagccgctggattcacatcggttggccactcgttttaaatcttccaggtatactttgatatcaatggccagtgtcttcttcttggctttatcacgaaatcagaatctctgaagactttttttgttaaggaaagaatgatcttctcattgtggcaatattagactccattagactatttttgaattttgatcatgctgccatgaaagcttctttgtatattctgctgatgaagagttgtatcatctgaaaaaccttctctttggggtcatctttgtccgattaagactttggtagatgtatatacattccttcgaaatcatgatatatttttttataacaattataagttttcccc

SEQ ID NO: 1316 - protein, 199 aa, Arabidopsis thaliana
  peptide (1)..(199): Ceres Seq. ID no. 12321926
  misc_feature (4)..(184): Pfam Name: Pfam Description:  ADP-ribosylation factor family
  misc_feature (1)..(199): NCBI GI NO: 15237901 NR Description: ADP-ribosylation factor -like protein
  misc_feature (1)..(199): NCBI GI NO: 15228464 NR Description: putative ADP-ribosylation factor
  misc_feature (1)..(198): NCBI GI NO: 37537196 NR Description: putative ADP-ribosylation factor
  misc_feature (1)..(195): NCBI GI NO: 34897926 NR Description: Similar to Drosophila melanogaster ADP-ribosylation factor1
  misc_feature (1)..(186): NCBI GI NO: 3182915 NR Description: ADP-RIBOSYLATION FACTOR
  misc_feature (1)..(188): NCBI GI NO: 32401087 NR Description: ADP-ribosylation factor 1 [Aiptasia pulchella]
  misc_feature (1)..(186): NCBI GI NO: 17136866 NR Description: ADP ribosylation factor 79F CG8385-PB
  misc_feature (1)..(186): NCBI GI NO: 31240205 NR Description: ENSANGP00000015770 [Anopheles gambiae]
  misc_feature (1)..(186): NCBI GI NO: 17551730 NR Description: ADP-Ribosylation Factor related ARF-1 (20
  misc_feature (1)..(186): NCBI GI NO: 39584902 NR Description: Hypothetical protein CBG09004
  misc_feature (86)..(86): Xaa is any aa, unknown or other
  misc_feature (89)..(89): Xaa is any aa, unknown or other
MGQAFRKLFDTFFGNQEMRVVMLGLDAAGKTTILYKLHIGEVLSTVPTIGFNVEKVQYKNVMFTVWDVGGQEKLRPLWRHYFNKFXKPXFFLDGLIYVVDSLDRERIGKAKQEFQEIIKDPFMLNSIILVFANKQDMRGAMSPREVCEGLGLFDLKNRKWHIQGTCALRGDGLYEGLDWLSSTLKDVKAAGFTSVGHSF

SEQ ID NO: 1317 - protein, 182 aa, Arabidopsis thaliana
  peptide (1)..(182): Ceres Seq. ID no. 12321927
  misc_feature (1)..(167): Pfam Name: Pfam Description:  ADP-ribosylation factor family
  misc_feature (1)..(182): NCBI GI NO: 15237901 NR Description: ADP-ribosylation factor -like protein
  misc_feature (1)..(182): NCBI GI NO: 15228464 NR Description: putative ADP-ribosylation factor
  misc_feature (1)..(181): NCBI GI NO: 37537196 NR Description: putative ADP-ribosylation factor
  misc_feature (1)..(178): NCBI GI NO: 34897926 NR Description: Similar to Drosophila melanogaster ADP-ribosylation factor1
  misc_feature (1)..(169): NCBI GI NO: 3182915 NR Description: ADP-RIBOSYLATION FACTOR
  misc_feature (1)..(171): NCBI GI NO: 32401087 NR Description: ADP-ribosylation factor 1 [Aiptasia pulchella]
  misc_feature (1)..(169): NCBI GI NO: 17136866 NR Description: ADP ribosylation factor 79F CG8385-PB
  misc_feature (1)..(169): NCBI GI NO: 31240205 NR Description: ENSANGP00000015770 [Anopheles gambiae]
  misc_feature (1)..(169): NCBI GI NO: 17551730 NR Description: ADP-Ribosylation Factor related ARF-1 (20
  misc_feature (1)..(169): NCBI GI NO: 39584902 NR Description: Hypothetical protein CBG09004
  misc_feature (69)..(69): Xaa is any aa, unknown or other
  misc_feature (72)..(72): Xaa is any aa, unknown or other
MRVVMLGLDAAGKTTILYKLHIGEVLSTVPTIGFNVEKVQYKNVMFTVWDVGGQEKLRPLWRHYFNKFXKPXFFLDGLIYVVDSLDRERIGKAKQEFQEIIKDPFMLNSIILVFANKQDMRGAMSPREVCEGLGLFDLKNRKWHIQGTCALRGDGLYEGLDWLSSTLKDVKAAGFTSVGHSF

SEQ ID NO: 1318 - protein, 178 aa, Arabidopsis thaliana
  peptide (1)..(178): Ceres Seq. ID no. 12321928
  misc_feature (1)..(163): Pfam Name: Pfam Description:  ADP-ribosylation factor family
  misc_feature (1)..(178): NCBI GI NO: 15237901 NR Description: ADP-ribosylation factor -like protein
  misc_feature (1)..(178): NCBI GI NO: 15228464 NR Description: putative ADP-ribosylation factor
  misc_feature (1)..(177): NCBI GI NO: 37537196 NR Description: putative ADP-ribosylation factor
  misc_feature (1)..(174): NCBI GI NO: 34897926 NR Description: Similar to Drosophila melanogaster ADP-ribosylation factor1
  misc_feature (1)..(165): NCBI GI NO: 3182915 NR Description: ADP-RIBOSYLATION FACTOR
  misc_feature (1)..(167): NCBI GI NO: 32401087 NR Description: ADP-ribosylation factor 1 [Aiptasia pulchella]
  misc_feature (1)..(165): NCBI GI NO: 17136866 NR Description: ADP ribosylation factor 79F CG8385-PB
  misc_feature (1)..(165): NCBI GI NO: 31240205 NR Description: ENSANGP00000015770 [Anopheles gambiae]
  misc_feature (1)..(165): NCBI GI NO: 17551730 NR Description: ADP-Ribosylation Factor related ARF-1 (20
  misc_feature (1)..(165): NCBI GI NO: 39584902 NR Description: Hypothetical protein CBG09004
  misc_feature (65)..(65): Xaa is any aa, unknown or other
  misc_feature (68)..(68): Xaa is any aa, unknown or other
MLGLDAAGKTTILYKLHIGEVLSTVPTIGFNVEKVQYKNVMFTVWDVGGQEKLRPLWRHYFNKFXKPXFFLDGLIYVVDSLDRERIGKAKQEFQEIIKDPFMLNSIILVFANKQDMRGAMSPREVCEGLGLFDLKNRKWHIQGTCALRGDGLYEGLDWLSSTLKDVKAAGFTSVGHSF

SEQ ID NO: 1319 - DNA, 1243 bp, Arabidopsis thaliana; identical to SEQ ID NO: 436
  misc_feature (1)..(1243): Ceres Seq. ID no. 12562371

SEQ ID NO: 1320 - protein, 244 aa, Arabidopsis thaliana; identical to SEQ ID NO: 437
  peptide (1)..(244): Ceres Seq. ID no. 12562372
  misc_feature (90)..(160): Pfam Name: a.k.a. RRM, RBD, or RNP domain Pfam Description: RNA recognition motif.
  misc_feature (1)..(244): NCBI GI NO: 30697310 NR Description: RNA and export factor binding protein, putative
  misc_feature (1)..(244): NCBI GI NO: 30697313 NR Description: RNA and export factor binding protein, putative
  misc_feature (1)..(244): NCBI GI NO: 21555029 NR Description: transcriptional coactivator-like protein
  misc_feature (1)..(244): NCBI GI NO: 9757916 NR Description: RNA and export factor binding protein 2-I-like protein
  misc_feature (14)..(244): NCBI GI NO: 6755763 NR Description: RNA and export factor binding protein 1
  misc_feature (1)..(36): NCBI GI NO: 6755763 NR Description: RNA and export factor binding protein 1
  misc_feature (18)..(244): NCBI GI NO: 30411083 NR Description: Similar to THO complex 4 [Homo sapiens]
  misc_feature (1)..(36): NCBI GI NO: 30411083 NR Description: Similar to THO complex 4 [Homo sapiens]
  misc_feature (18)..(219): NCBI GI NO: 11358209 NR Description: hypothetical protein T22P11
  misc_feature (18)..(219): NCBI GI NO: 30679669 NR Description: RNA and export factor binding protein, putative

SEQ ID NO: 1321 - protein, 238 aa, Arabidopsis thaliana; identical to SEQ ID NO: 438
  peptide (1)..(238): Ceres Seq. ID no. 12562373
  misc_feature (84)..(154): Pfam Name: a.k.a. RRM, RBD, or RNP domain Pfam Description: RNA recognition motif.
  misc_feature (1)..(238): NCBI GI NO: 30697310 NR Description: RNA and export factor binding protein, putative
  misc_feature (1)..(238): NCBI GI NO: 30697313 NR Description: RNA and export factor binding protein, putative
  misc_feature (1)..(238): NCBI GI NO: 21555029 NR Description: transcriptional coactivator-like protein
  misc_feature (1)..(238): NCBI GI NO: 9757916 NR Description: RNA and export factor binding protein 2-I-like protein
  misc_feature (8)..(238): NCBI GI NO: 6755763 NR Description: RNA and export factor binding protein 1
  misc_feature (1)..(30): NCBI GI NO: 6755763 NR Description: RNA and export factor binding protein 1
  misc_feature (12)..(238): NCBI GI NO: 30411083 NR Description: Similar to THO complex 4 [Homo sapiens]
  misc_feature (1)..(30): NCBI GI NO: 30411083 NR Description: Similar to THO complex 4 [Homo sapiens]
  misc_feature (12)..(213): NCBI GI NO: 11358209 NR Description: hypothetical protein T22P11
  misc_feature (12)..(213): NCBI GI NO: 30679669 NR Description: RNA and export factor binding protein, putative

SEQ ID NO: 1322 - protein, 233 aa, Arabidopsis thaliana; identical to SEQ ID NO: 439
  peptide (1)..(233): Ceres Seq. ID no. 12562374
  misc_feature (79)..(149): Pfam Name: a.k.a. RRM, RBD, or RNP domain Pfam Description: RNA recognition motif.
  misc_feature (1)..(233): NCBI GI NO: 30697310 NR Description: RNA and export factor binding protein, putative
  misc_feature (1)..(233): NCBI GI NO: 30697313 NR Description: RNA and export factor binding protein, putative
  misc_feature (1)..(233): NCBI GI NO: 21555029 NR Description: transcriptional coactivator-like protein
  misc_feature (1)..(233): NCBI GI NO: 9757916 NR Description: RNA and export factor binding protein 2-I-like protein
  misc_feature (3)..(233): NCBI GI NO: 6755763 NR Description: RNA and export factor binding protein 1
  misc_feature (1)..(25): NCBI GI NO: 6755763 NR Description: RNA and export factor binding protein 1
  misc_feature (7)..(233): NCBI GI NO: 30411083 NR Description: Similar to THO complex 4 [Homo sapiens]
  misc_feature (1)..(25): NCBI GI NO: 30411083 NR Description: Similar to THO complex 4 [Homo sapiens]
  misc_feature (7)..(208): NCBI GI NO: 11358209 NR Description: hypothetical protein T22P11
  misc_feature (7)..(208): NCBI GI NO: 30679669 NR Description: RNA and export factor binding protein, putative

SEQ ID NO: 1323 - DNA, 849 bp, Arabidopsis thaliana
  misc_feature (1)..(849): Ceres Seq. ID no. 13491481
accctaaaactcagcaacaatggccgttaccttttcagatctacacacagaggagggtgtcaaatccgtggaggagcacctcgccggaaaaacctacatctccggagatcaattgtctgtggatgatgtcaaggtttacgctgccgttccagtgaaacccagcgatgccttccccaatgctagcaagtggtacgagtccgtggcttcccaacttgctaaaagtttccctggccgttggagtacaattcggtggctctgctgctgctgctccagctgttgaagctgaggcacctgcagctgcagctgatgatgatgatgacatggatctctttggtgacgagaccgaagaagaaaagaaagctgcagaggagagggaggctgctaagaaggacaccaagaagcctaaagagagtggaaagtcttctgtgctcatggatgttaagccatgggatgatgaaaccgacatgaagaaactggaagaggctgttcgtggtgttgagatgcctggtcttttctggggagcctcaaaacttgtaccagttggttatgggatcaagaaactcacaattatgttcacgattgttgatgacctcgtgtccccggacaacctcattgaagacttcctcacctcagagcctaacaacgagtacatccagagttgtgacattgtcgctttcaacaagatttagagacttcaaatttctccttaccgaaacatatcagaatttcaagttttgttttcgtttgtgttgtttaccgaaatgtttctttcctagttgcaagaccgctttcatgttacaataacactaaattttcaatggttactattccgttgcatcattgttaagg

SEQ ID NO: 1324 - protein, 174 aa, Arabidopsis thaliana
  peptide (1)..(174): Ceres Seq. ID no. 13491482
  misc_feature (85)..(174): Pfam Name: Pfam Description:  EF-1 guanine nucleotide exchange domain
  misc_feature (23)..(174): NCBI GI NO: 30687350 NR Description: elongation factor 1B alpha-subunit
  misc_feature (23)..(174): NCBI GI NO: 15239877 NR Description: elongation factor 1B alpha-subunit (emb|CAB64729
  misc_feature (23)..(174): NCBI GI NO: 27754711 NR Description: putative elongation factor 1B alpha-subunit
  misc_feature (23)..(174): NCBI GI NO: 38175744 NR Description: putative translation elongation factor eEF-1 beta' chain
  misc_feature (25)..(174): NCBI GI NO: 232033 NR Description: ELONGATION FACTOR 1-BETA' (EF-1-BETA')
  misc_feature (23)..(174): NCBI GI NO: 232031 NR Description: ELONGATION FACTOR 1-BETA' (EF-1-BETA')
  misc_feature (23)..(174): NCBI GI NO: 34899162 NR Description: putative translation elongation factor eEF-1 beta' chain
  misc_feature (25)..(174): NCBI GI NO: 6015064 NR Description: ELONGATION FACTOR 1-BETA (EF-1-BETA)
  misc_feature (31)..(174): NCBI GI NO: 38232568 NR Description: translational elongation factor 1 subunit Bbeta
  misc_feature (31)..(174): NCBI GI NO: 6166140 NR Description: ELONGATION FACTOR 1-BETA (EF-1-BETA)
MPSPMLASGTSPWLPNLLKVSLAVGVQFGGSAAAAPAVEAEAPAAAADDDDDMDLFGDETEEEKKAAEEREAAKKDTKKPKESGKSSVLMDVKPWDDETDMKKLEEAVRGVEMPGLFWGASKLVPVGYGIKKLTIMFTIVDDLVSPDNLIEDFLTSEPNNEYIQSCDIVAFNKI

SEQ ID NO: 1325 - protein, 170 aa, Arabidopsis thaliana
  peptide (1)..(170): Ceres Seq. ID no. 13491483
  misc_feature (81)..(170): Pfam Name: Pfam Description:  EF-1 guanine nucleotide exchange domain
  misc_feature (19)..(170): NCBI GI NO: 30687350 NR Description: elongation factor 1B alpha-subunit
  misc_feature (19)..(170): NCBI GI NO: 15239877 NR Description: elongation factor 1B alpha-subunit (emb|CAB64729
  misc_feature (19)..(170): NCBI GI NO: 27754711 NR Description: putative elongation factor 1B alpha-subunit
  misc_feature (19)..(170): NCBI GI NO: 38175744 NR Description: putative translation elongation factor eEF-1 beta' chain
  misc_feature (21)..(170): NCBI GI NO: 232033 NR Description: ELONGATION FACTOR 1-BETA' (EF-1-BETA')
  misc_feature (19)..(170): NCBI GI NO: 232031 NR Description: ELONGATION FACTOR 1-BETA' (EF-1-BETA')
  misc_feature (19)..(170): NCBI GI NO: 34899162 NR Description: putative translation elongation factor eEF-1 beta' chain
  misc_feature (21)..(170): NCBI GI NO: 6015064 NR Description: ELONGATION FACTOR 1-BETA (EF-1-BETA)
  misc_feature (27)..(170): NCBI GI NO: 38232568 NR Description: translational elongation factor 1 subunit Bbeta
  misc_feature (27)..(170): NCBI GI NO: 6166140 NR Description: ELONGATION FACTOR 1-BETA (EF-1-BETA)
MLASGTSPWLPNLLKVSLAVGVQFGGSAAAAPAVEAEAPAAAADDDDDMDLFGDETEEEKKAAEEREAAKKDTKKPKESGKSSVLMDVKPWDDETDMKKLEEAVRGVEMPGLFWGASKLVPVGYGIKKLTIMFTIVDDLVSPDNLIEDFLTSEPNNEYIQSCDIVAFNKI

SEQ ID NO: 1326 - protein, 122 aa, Arabidopsis thaliana
  peptide (1)..(122): Ceres Seq. ID no. 13491484
  misc_feature (33)..(122): Pfam Name: Pfam Description:  EF-1 guanine nucleotide exchange domain
  misc_feature (1)..(122): NCBI GI NO: 30687350 NR Description: elongation factor 1B alpha-subunit
  misc_feature (1)..(122): NCBI GI NO: 15239877 NR Description: elongation factor 1B alpha-subunit (emb|CAB64729
  misc_feature (1)..(122): NCBI GI NO: 27754711 NR Description: putative elongation factor 1B alpha-subunit
  misc_feature (1)..(122): NCBI GI NO: 38175744 NR Description: putative translation elongation factor eEF-1 beta' chain
  misc_feature (1)..(122): NCBI GI NO: 232033 NR Description: ELONGATION FACTOR 1-BETA' (EF-1-BETA')
  misc_feature (1)..(122): NCBI GI NO: 232031 NR Description: ELONGATION FACTOR 1-BETA' (EF-1-BETA')
  misc_feature (1)..(122): NCBI GI NO: 34899162 NR Description: putative translation elongation factor eEF-1 beta' chain
  misc_feature (1)..(122): NCBI GI NO: 6015064 NR Description: ELONGATION FACTOR 1-BETA (EF-1-BETA)
  misc_feature (1)..(122): NCBI GI NO: 38232568 NR Description: translational elongation factor 1 subunit Bbeta
  misc_feature (1)..(122): NCBI GI NO: 6166140 NR Description: ELONGATION FACTOR 1-BETA (EF-1-BETA)
MDLFGDETEEEKKAAEEREAAKKDTKKPKESGKSSVLMDVKPWDDETDMKKLEEAVRGVEMPGLFWGASKLVPVGYGIKKLTIMFTIVDDLVSPDNLIEDFLTSEPNNEYIQSCDIVAFNKI

SEQ ID NO: 1327 - DNA, 776 bp, Arabidopsis thaliana
  misc_feature (1)..(776): Ceres Seq. ID no. 12602631
aatcgaaaaattcgtataatttttcagtaaattatctaaccctctcgatcctctctcgcctgttgaaaaagcacgacgcaagagcaaaggatcaaaaagggaagacgaaagaagagatggatccagacgctgttgcaaaggctttcgttgagcactactactccaccttcgatgaatcgtccaggtttggtttctctataccaagaaggatccatgttgaccttcgaaggccagaagatccagggctctcagaacatcgtcgctaagctcaccggcctccctttccagcagtgtaagcacaacatcaccaccgtcgattgtcagccttctggtcccgccggtggtatgctcgtctttgtctccggcaatcttcagctcgctggtgaacaacacgctctcaagttcagccagatgttccatttgatatcgaatcagggaaactactacgtgttcaatgacatattcaggttgaactatgcctgaggaatttgatgccagaggtacatggaaccattattggaagctgaaaagagagtggtggaaagtttgggactattcaaaaactgtttgagttggttttagatttggaacattaagctttgtttcaggtggtttgctgtctgtttttattttaatcaatggagctatttgttactttgtttgagatgactccttttgttttcgggcactgaaccatgattcagtaagggtaaaacaaaagattttttgaaatacggttctcttttggaaccctttttcatgtggaaaagtttgag

SEQ ID NO: 1328 - protein, 103 aa, Arabidopsis thaliana
  peptide (1)..(103): Ceres Seq. ID no. 12602632
  misc_feature (2)..(100): Pfam Name: NTF2 Pfam Description: Nuclear transport factor 2
  misc_feature (2)..(103): NCBI GI NO: 15223491 NR Description: putative nuclear transport factor
  misc_feature (2)..(103): NCBI GI NO: 15217779 NR Description: nuclear transport factor 2, putative
  misc_feature (2)..(103): NCBI GI NO: 21555203 NR Description: nuclear transport factor 2, putative
  misc_feature (2)..(102): NCBI GI NO: 15214179 NR Description: Nuclear transport factor 2 (NTF-2)
  misc_feature (2)..(102): NCBI GI NO: 34908774 NR Description: putative Nuclear transport factor 2
  misc_feature (2)..(102): NCBI GI NO: 19114665 NR Description: nuclear transport factor, NTF2 homolog
  misc_feature (2)..(103): NCBI GI NO: 6320846 NR Description: May coordinate the Ran-dependent
  misc_feature (2)..(103): NCBI GI NO: 21730277 NR Description: Chain A, N77y Point Mutant Of S.Cerevisiae Ntf2
  misc_feature (2)..(102): NCBI GI NO: 25402667 NR Description: protein T23J18.22
  misc_feature (2)..(103): NCBI GI NO: 15214172 NR Description: Nuclear transport factor 2 (NTF-2)
MNRPGLVSLYQEGSMLTFEGQKIQGSQNIVAKLTGLPFQQCKHNITTVDCQPSGPAGGMLVFVSGNLQLAGEQHALKFSQMFHLISNQGNYYVFNDIFRLNYA

SEQ ID NO: 1329 - protein, 89 aa, Arabidopsis thaliana
  peptide (1)..(89): Ceres Seq. ID no. 12602633
  misc_feature (1)..(86): Pfam Name: NTF2 Pfam Description: Nuclear transport factor 2
  misc_feature (1)..(89): NCBI GI NO: 15223491 NR Description: putative nuclear transport factor
  misc_feature (1)..(89): NCBI GI NO: 15217779 NR Description: nuclear transport factor 2, putative
  misc_feature (1)..(89): NCBI GI NO: 21555203 NR Description: nuclear transport factor 2, putative
  misc_feature (1)..(88): NCBI GI NO: 15214179 NR Description: Nuclear transport factor 2 (NTF-2)
  misc_feature (1)..(88): NCBI GI NO: 34908774 NR Description: putative Nuclear transport factor 2
  misc_feature (1)..(88): NCBI GI NO: 19114665 NR Description: nuclear transport factor, NTF2 homolog
  misc_feature (1)..(89): NCBI GI NO: 6320846 NR Description: May coordinate the Ran-dependent
  misc_feature (1)..(89): NCBI GI NO: 21730277 NR Description: Chain A, N77y Point Mutant Of S.Cerevisiae Ntf2
  misc_feature (1)..(88): NCBI GI NO: 25402667 NR Description: protein T23J18.22
  misc_feature (1)..(89): NCBI GI NO: 15214172 NR Description: Nuclear transport factor 2 (NTF-2)
MLTFEGQKIQGSQNIVAKLTGLPFQQCKHNITTVDCQPSGPAGGMLVFVSGNLQLAGEQHALKFSQMFHLISNQGNYYVFNDIFRLNYA

SEQ ID NO: 1330 - protein, 87 aa, Arabidopsis thaliana
  peptide (1)..(87): Ceres Seq. ID no. 12602634
  misc_feature (39)..(57): NCBI GI NO: 15223491 NR Description: putative nuclear transport factor
  misc_feature (38)..(65): NCBI GI NO: 15217779 NR Description: nuclear transport factor 2, putative
  misc_feature (39)..(65): NCBI GI NO: 21555203 NR Description: nuclear transport factor 2, putative
  misc_feature (39)..(57): NCBI GI NO: 15214179 NR Description: Nuclear transport factor 2 (NTF-2)
SKNSYNFSVNYLTLSILSRLLKKHDARAKDQKGKTKEEMDPDAVAKAFVEHYYSTFDESSRFGFSIPRRIHVDLRRPEDPGLSEHRR

SEQ ID NO: 1331 - DNA, 754 bp, Arabidopsis thaliana
  misc_feature (1)..(754): Ceres Seq. ID no. 13499502
gaaaaaagctctccacgcctaaaaaaaaagaaaaaagagacagaagaagaaaaagataaagaagaatcaaactttgtaaccctttagcagcaatggcgatggctttcaagatggcgacgacggggatgcgtgtgacggatgagtgtacgagttcattcatggacatgaaatggaagaaagttcatagatacatcgttttcaagatcgaagagaagtcacgtaaagtcaccgtcgataaagtcggcggcgccggtgaaagctaccacgatctcgaagattctttaccggtggatgattgtcgctacgctgtctttgatttcgactttgtcaccgtcgataactgccgcaagagcaagatcttcttcattgcatggtcaccggaggcatcaaagataagggcaaagatattgtacgcaacgtcgaaagatgggctgaggagagtgttggaagggattcactatgaacttcaagctactgatccgacggagatgggtttcgatattatccaagaccgtgccaaatagattgatcacttaagagaatatgatttgactcactttgtcaataattaacattaattaggtcatcggttaatgtttaattattgctggttagtgcttactcttttttgagtttattatccttgatcagtcttaccggcactatcctttaattatgacgtttgtgttttgattgtgttgttaaaatatttttttgtcggttaagcaaacataaaaagctacgaatttgtcct

SEQ ID NO: 1332 - protein, 143 aa, Arabidopsis thaliana
  peptide (1)..(143): Ceres Seq. ID no. 13499503
  misc_feature (16)..(143): Pfam Name: Pfam Description:  Cofilin/tropomyosin-type actin-binding protein
  misc_feature (1)..(143): NCBI GI NO: 18398187 NR Description: actin depolymerizing factor 5
  misc_feature (12)..(143): NCBI GI NO: 25295742 NR Description: actin depolymerizing factor 5
  misc_feature (14)..(143): NCBI GI NO: 15236233 NR Description: actin depolymerizing factor - like protein
  misc_feature (7)..(143): NCBI GI NO: 7330254 NR Description: actin depolymerizing factor [Elaeis guineensis]
  misc_feature (8)..(142): NCBI GI NO: 4566614 NR Description: actin depolymerizing factor [Populus x canescens]
  misc_feature (8)..(142): NCBI GI NO: 24745620 NR Description: actin depolymerizing factor 6 [Solanum tuberosum]
  misc_feature (8)..(142): NCBI GI NO: 18402587 NR Description: actin depolymerizing factor 6
  misc_feature (8)..(142): NCBI GI NO: 17366768 NR Description: Actin-depolymerizing factor 1 (ADF 1)
  misc_feature (8)..(142): NCBI GI NO: 21554405 NR Description: Actin-depolymerizing factor ADF-6
  misc_feature (10)..(143): NCBI GI NO: 17136986 NR Description: twinstar CG4254-PA [Drosophila melanogaster]
MAMAFKMATTGMRVTDECTSSFMDMKWKKVHRYIVFKIEEKSRKVTVDKVGGAGESYHDLEDSLPVDDCRYAVFDFDFVTVDNCRKSKIFFIAWSPEASKIRAKILYATSKDGLRRVLEGIHYELQATDPTEMGFDIIQDRAK

SEQ ID NO: 1333 - protein, 141 aa, Arabidopsis thaliana
  peptide (1)..(141): Ceres Seq. ID no. 13499504
  misc_feature (14)..(141): Pfam Name: Pfam Description:  Cofilin/tropomyosin-type actin-binding protein
  misc_feature (1)..(141): NCBI GI NO: 18398187 NR Description: actin depolymerizing factor 5
  misc_feature (10)..(141): NCBI GI NO: 25295742 NR Description: actin depolymerizing factor 5
  misc_feature (12)..(141): NCBI GI NO: 15236233 NR Description: actin depolymerizing factor - like protein
  misc_feature (5)..(141): NCBI GI NO: 7330254 NR Description: actin depolymerizing factor [Elaeis guineensis]
  misc_feature (6)..(140): NCBI GI NO: 4566614 NR Description: actin depolymerizing factor [Populus x canescens]
  misc_feature (6)..(140): NCBI GI NO: 24745620 NR Description: actin depolymerizing factor 6 [Solanum tuberosum]
  misc_feature (6)..(140): NCBI GI NO: 18402587 NR Description: actin depolymerizing factor 6
  misc_feature (6)..(140): NCBI GI NO: 17366768 NR Description: Actin-depolymerizing factor 1 (ADF 1)
  misc_feature (6)..(140): NCBI GI NO: 21554405 NR Description: Actin-depolymerizing factor ADF-6
  misc_feature (8)..(141): NCBI GI NO: 17136986 NR Description: twinstar CG4254-PA [Drosophila melanogaster]
MAFKMATTGMRVTDECTSSFMDMKWKKVHRYIVFKIEEKSRKVTVDKVGGAGESYHDLEDSLPVDDCRYAVFDFDFVTVDNCRKSKIFFIAWSPEASKIRAKILYATSKDGLRRVLEGIHYELQATDPTEMGFDIIQDRAK

SEQ ID NO: 1334 - protein, 137 aa, Arabidopsis thaliana
  peptide (1)..(137): Ceres Seq. ID no. 13499505
  misc_feature (10)..(137): Pfam Name: Pfam Description:  Cofilin/tropomyosin-type actin-binding protein
  misc_feature (1)..(137): NCBI GI NO: 18398187 NR Description: actin depolymerizing factor 5
  misc_feature (6)..(137): NCBI GI NO: 25295742 NR Description: actin depolymerizing factor 5
  misc_feature (8)..(137): NCBI GI NO: 15236233 NR Description: actin depolymerizing factor - like protein
  misc_feature (1)..(137): NCBI GI NO: 7330254 NR Description: actin depolymerizing factor [Elaeis guineensis]
  misc_feature (2)..(136): NCBI GI NO: 4566614 NR Description: actin depolymerizing factor [Populus x canescens]
  misc_feature (2)..(136): NCBI GI NO: 24745620 NR Description: actin depolymerizing factor 6 [Solanum tuberosum]
  misc_feature (2)..(136): NCBI GI NO: 18402587 NR Description: actin depolymerizing factor 6
  misc_feature (2)..(136): NCBI GI NO: 17366768 NR Description: Actin-depolymerizing factor 1 (ADF 1)
  misc_feature (2)..(136): NCBI GI NO: 21554405 NR Description: Actin-depolymerizing factor ADF-6
  misc_feature (4)..(137): NCBI GI NO: 17136986 NR Description: twinstar CG4254-PA [Drosophila melanogaster]
MATTGMRVTDECTSSFMDMKWKKVHRYIVFKIEEKSRKVTVDKVGGAGESYHDLEDSLPVDDCRYAVFDFDFVTVDNCRKSKIFFIAWSPEASKIRAKILYATSKDGLRRVLEGIHYELQATDPTEMGFDIIQDRAK

SEQ ID NO: 1335 - DNA, 895 bp, Arabidopsis thaliana
  misc_feature (1)..(895): Ceres Seq. ID no. 12334166
atctccacaatccccaaaattctttcaacacttgctctccattaatcttttagataataaacctaattgtttctgttttgtttttgtttctgtgagattcttccgaggcttgaagctcaatagctatggcttctctttcagtctcttcctcttcaaccatcatcgattcaagagctcctccttctcgactagcctccgcctccgcctcttctccgtcgtgcatttcacttcccacacttccgattcagtctcatacccgtgccgctaaagccactgcttactgtcggaagattgtgaggaacgttgtgacgagagctactactgaagttggtgaagctcctgccactactaccgaagctgagactactgagttacctgaaatcgtcaagactgctcaagaagcttgggagaaagtggatgacaagtacgctattggttctcttgcctttgctagtgtagtggctctttggggttctgctggaatgatttcgccaatcgataggcttccattggttcctggtgttcttgaacttgtaggcatcggttacacaggatggttcacttacaagaacctggtcttcaaaccagacagggaggctttgtttgagaaggtcaagagcacatacaaagacatattagggagcagctgaatcaaaggaggaagaagaagaagaagagcctttttgaggccattcatgaattggaatgaaggatatcaaaagaatctaacacaaaggccacgtccttccttcaatctttccttcttgtaactaaataattttcatcctttctctctctctgtctctggtcttttttagctcaaagtatcatccatttatgtcaaagtgttgtaaattcctcaagactatatatgagatgttttgtttcattttcc

SEQ ID NO: 1336 - protein, 174 aa, Arabidopsis thaliana
  peptide (1)..(174): Ceres Seq. ID no. 12334167
  misc_feature (1)..(174): NCBI GI NO: 21555057 NR Description: unknown [Arabidopsis thaliana]
  misc_feature (1)..(174): NCBI GI NO: 18407178 NR Description: expressed protein; protein id: At2g46820
  misc_feature (27)..(174): NCBI GI NO: 34393236 NR Description: unknown protein
  misc_feature (1)..(171): NCBI GI NO: 37536446 NR Description: hypothetical protein
  misc_feature (80)..(172): NCBI GI NO: 18403896 NR Description: expressed protein; protein id: At1g52220
  misc_feature (3)..(173): NCBI GI NO: 687677 NR Description: unknown
  misc_feature (3)..(173): NCBI GI NO: 18411555 NR Description: expressed protein; protein id: At4g01150
  misc_feature (80)..(172): NCBI GI NO: 21554231 NR Description: unknown [Arabidopsis thaliana]
  misc_feature (17)..(172): NCBI GI NO: 34909746 NR Description: contains ESTsAU066201
  misc_feature (22)..(173): NCBI GI NO: 38175474 NR Description: unknown protein
MASLSVSSSSTIIDSRAPPSRLASASASSPSCISLPTLPIQSHTRAAKATAYCRKIVRNVVTRATTEVGEAPATTTEAETTELPEIVKTAQEAWEKVDDKYAIGSLAFASVVALWGSAGMISPIDRLPLVPGVLELVGIGYTGWFTYKNLVFKPDREALFEKVKSTYKDILGSS

SEQ ID NO: 1337 - protein, 88 aa, Arabidopsis thaliana
  peptide (1)..(88): Ceres Seq. ID no. 12334168
SPQSPKFFQHLLSINLLDNKPNCFCFVFVSVRFFRGLKLNSYGFSFSLFLFNHHRFKSSSFSTSLRLRLFSVVHFTSHTSDSVSYPCR

SEQ ID NO: 1338 - DNA, 876 bp, Arabidopsis thaliana
  misc_feature (1)..(876): Ceres Seq. ID no. 12332877
atcttagtaaaatagtggagagaagaatattcttctggataccttttaatattccccaaaacttctgaatcttcttctcaatttttctcgacattttctcatcgaaagctctcttcctttccctttttggcgctcaatacaatcatgacgttagagagttacgccggcgatgttcacacggtaccacaatcggagaactcgatggaggagagaggcggcggtgagcttttcgtgccacctcttaacttcgctatggtcgataatggaattttccgttctggttttcctgaacccgtcagtttcagctttctccagtctttgcgtctcaaatccatcatatatttgtgtcctgaggcatatccagaggtgaatagagagtttgcaaaatcaaatgggatccaagtttttcaatttggaattgaaagatgcaaggaaccatttgttaatatccctgacgaggtaatccgagaagccttacaagtacttctagatacagagaatcatcctgtcttgattcattgcaaaagtggaaagcatcggacgggatgtcttgtaggttgtgtgaggaagattcaaagatggtgtttgtcttctatcttcgacgagtaccaaagattcgcagctgcgaaagctagaatctcagaccagagattcatggagctctttgacatctccaatctaaagcatacaccactttccttctcatgctccaagaggtatactaatactattgattactgaagaaaaaaatgtataactttgtgttgaatgcaacttgtagttttgaagctagatgaaaatgggagattttgatctttcaataaaagtccgtttattccaaatcaaataaataaaaattggatcggatggttgtag

SEQ ID NO: 1339 - protein, 198 aa, Arabidopsis thaliana
  peptide (1)..(198): Ceres Seq. ID no. 12332878
  misc_feature (29)..(191): Pfam Name: Pfam Description:  Tyrosine phosphatase family
  misc_feature (1)..(198): NCBI GI NO: 18412419 NR Description: putative protein; protein id: At4g03960
  misc_feature (1)..(194): NCBI GI NO: 7487406 NR Description: hypothetical protein T24M8
  misc_feature (1)..(191): NCBI GI NO: 15220383 NR Description: unkown protein; protein id: At1g05000.1
  misc_feature (14)..(191): NCBI GI NO: 15225761 NR Description: unknown protein; protein id: At2g32960.1
  misc_feature (91)..(191): NCBI GI NO: 30102538 NR Description: At2g32960 [Arabidopsis thaliana]
  misc_feature (14)..(96): NCBI GI NO: 30102538 NR Description: At2g32960 [Arabidopsis thaliana]
  misc_feature (26)..(185): NCBI GI NO: 15232985 NR Description: unknown protein; protein id: At3g02800.1
  misc_feature (20)..(180): NCBI GI NO: 21553927 NR Description: unknown [Arabidopsis thaliana]
  misc_feature (20)..(180): NCBI GI NO: 15237359 NR Description: putative protein; protein id: At5g16480
  misc_feature (30)..(180): NCBI GI NO: 6324296 NR Description: Synthetic interaction with Whi2; Siw14p
MTLESYAGDVHTVPQSENSMEERGGGELFVPPLNFAMVDNGIFRSGFPEPVSFSFLQSLRLKSIIYLCPEAYPEVNREFAKSNGIQVFQFGIERCKEPFVNIPDEVIREALQVLLDTENHPVLIHCKSGKHRTGCLVGCVRKIQRWCLSSIFDEYQRFAAAKARISDQRFMELFDISNLKHTPLSFSCSKRYTNTIDY

SEQ ID NO: 1340 - protein, 179 aa, Arabidopsis thaliana
  peptide (1)..(179): Ceres Seq. ID no. 12332879
  misc_feature (10)..(172): Pfam Name: Pfam Description:  Tyrosine phosphatase family
  misc_feature (1)..(179): NCBI GI NO: 18412419 NR Description: putative protein; protein id: At4g03960
  misc_feature (1)..(175): NCBI GI NO: 7487406 NR Description: hypothetical protein T24M8
  misc_feature (1)..(172): NCBI GI NO: 15220383 NR Description: unkown protein; protein id: At1g05000.1
  misc_feature (1)..(172): NCBI GI NO: 15225761 NR Description: unknown protein; protein id: At2g32960.1
  misc_feature (72)..(172): NCBI GI NO: 30102538 NR Description: At2g32960 [Arabidopsis thaliana]
  misc_feature (1)..(77): NCBI GI NO: 30102538 NR Description: At2g32960 [Arabidopsis thaliana]
  misc_feature (7)..(166): NCBI GI NO: 15232985 NR Description: unknown protein; protein id: At3g02800.1
  misc_feature (1)..(161): NCBI GI NO: 21553927 NR Description: unknown [Arabidopsis thaliana]
  misc_feature (1)..(161): NCBI GI NO: 15237359 NR Description: putative protein; protein id: At5g16480
  misc_feature (11)..(161): NCBI GI NO: 6324296 NR Description: Synthetic interaction with Whi2; Siw14p
MEERGGGELFVPPLNFAMVDNGIFRSGFPEPVSFSFLQSLRLKSIIYLCPEAYPEVNREFAKSNGIQVFQFGIERCKEPFVNIPDEVIREALQVLLDTENHPVLIHCKSGKHRTGCLVGCVRKIQRWCLSSIFDEYQRFAAAKARISDQRFMELFDISNLKHTPLSFSCSKRYTNTIDY

SEQ ID NO: 1341 - protein, 162 aa, Arabidopsis thaliana
  peptide (1)..(162): Ceres Seq. ID no. 12332880
  misc_feature (1)..(155): Pfam Name: Pfam Description:  Tyrosine phosphatase family
  misc_feature (1)..(162): NCBI GI NO: 18412419 NR Description: putative protein; protein id: At4g03960
  misc_feature (1)..(158): NCBI GI NO: 7487406 NR Description: hypothetical protein T24M8
  misc_feature (1)..(155): NCBI GI NO: 15220383 NR Description: unkown protein; protein id: At1g05000.1
  misc_feature (1)..(155): NCBI GI NO: 15225761 NR Description: unknown protein; protein id: At2g32960.1
  misc_feature (55)..(155): NCBI GI NO: 30102538 NR Description: At2g32960 [Arabidopsis thaliana]
  misc_feature (1)..(60): NCBI GI NO: 30102538 NR Description: At2g32960 [Arabidopsis thaliana]
  misc_feature (1)..(149): NCBI GI NO: 15232985 NR Description: unknown protein; protein id: At3g02800.1
  misc_feature (1)..(144): NCBI GI NO: 21553927 NR Description: unknown [Arabidopsis thaliana]
  misc_feature (1)..(144): NCBI GI NO: 15237359 NR Description: putative protein; protein id: At5g16480
  misc_feature (1)..(144): NCBI GI NO: 6324296 NR Description: Synthetic interaction with Whi2; Siw14p
MVDNGIFRSGFPEPVSFSFLQSLRLKSIIYLCPEAYPEVNREFAKSNGIQVFQFGIERCKEPFVNIPDEVIREALQVLLDTENHPVLIHCKSGKHRTGCLVGCVRKIQRWCLSSIFDEYQRFAAAKARISDQRFMELFDISNLKHTPLSFSCSKRYTNTIDY

SEQ ID NO: 1342 - DNA, 1420 bp, Arabidopsis thaliana
  misc_feature (1)..(1420): Ceres Seq. ID no. 12580277
acccgcttagatcgatgtgtgtgctctgtgattgactgattttctcagagggataatcagtgacacatcgagtcgaagaagaacatacatttctactgaatcagatctgatctgctttgtcagtttttaaactgttctgatctaattgagatttctcaattccactcaaaatcctttaaagcttgtctctttttggtatctctgaatcaatttggggaaatcaagaggagaagtgacaatggatgcgtttagaagacaagcgagtaagcttagagaccaagtcgcaaagcagcaactggctgtgataaagcaattcagtgggactggttatgaaagctcagatgtaatggtgattgatgagcttgaaatgcaaaggcatcatcaactcgataaactttaccgctctactcgttctgcaaaggagttccagagagatattgttaaagcagctgaggcatttaccacgatcgggctcagacacattgaagcaggaaccaagttgtctgaagactgttgtaggtatgggaacgaaaatagtcagaacattgatgagaatatactggccaaggctgcagctatatacggtgatgcacggaaacatgtagacaaagaacaagaagacttcaacaagcttttggcttctcaggttttggatcctctaagagctatggttgccggttctcctcttgaagatgctcgtcatcttgctcaacgttacagccgcatgagacaagaagcagagacacatgcaacggaagtctctagacggcaagcacgtgtaagagaagctccgattccagaaaacgtagcaaagcttcaactagcggaagcaaaaatgcaagagctaaaagcaaatatggcagtccttggtaaagaagcaactgctgcattagccgctgttgaatcacagcaacatagactcactttccagaggcttgtggctatggttgaaggggagaagaattatcacttaagaatagcagccatcctcagtgacattgaagccgacatggtaaccgagaaacaacacaaagaatctgctcctcctgcgattccaacagagaacggctcagagaaaacgtcatactttcttgctgaagtgattcatccattttccgctgcttcagagaaagagttagacttggacaaaggagattacatcgttgtccgaaaggtgagccaaaccggttgggctgaaggagaatgcaaaggcaaagctggttggtttcctatggcttacattgagaagcgacagagacttcccactaccaactttgctgctgaagtttactgagtctcttcttcaaagatttcattttttcttacatttgtgtctgaaaactttgtttcagttatgtcctgtccccaacaaactactactcttgttcatatttgttgatccaaaatagagtttacctcc

SEQ ID NO: 1343 - protein, 351 aa, Arabidopsis thaliana
  peptide (1)..(351): Ceres Seq. ID no. 12580278
  misc_feature (284)..(338): Pfam Name: Pfam Description:  SH3 domain
  misc_feature (1)..(351): NCBI GI NO: 22328762 NR Description: putative protein; protein id: At4g18060
  misc_feature (1)..(351): NCBI GI NO: 21928139 NR Description: AT4g18060/F15J5_30 [Arabidopsis thaliana]
  misc_feature (1)..(351): NCBI GI NO: 16974680 NR Description: SH3 domain-containing protein 3
  misc_feature (1)..(243): NCBI GI NO: 7485521 NR Description: hypothetical protein F15J5
  misc_feature (1)..(342): NCBI GI NO: 22093679 NR Description: putative SH3
  misc_feature (1)..(266): NCBI GI NO: 34902022 NR Description: unknown protein
  misc_feature (260)..(344): NCBI GI NO: 34902022 NR Description: unknown protein
  misc_feature (1)..(273): NCBI GI NO: 15221714 NR Description: unknown protein; protein id: At1g31440
  misc_feature (278)..(344): NCBI GI NO: 15221714 NR Description: unknown protein; protein id: At1g31440
  misc_feature (1)..(278): NCBI GI NO: 18418491 NR Description: putative protein; protein id: At4g34660
MDAFRRQASKLRDQVAKQQLAVIKQFSGTGYESSDVMVIDELEMQRHHQLDKLYRSTRSAKEFQRDIVKAAEAFTTIGLRHIEAGTKLSEDCCRYGNENSQNIDENILAKAAAIYGDARKHVDKEQEDFNKLLASQVLDPLRAMVAGSPLEDARHLAQRYSRMRQEAETHATEVSRRQARVREAPIPENVAKLQLAEAKMQELKANMAVLGKEATAALAAVESQQHRLTFQRLVAMVEGEKNYHLRIAAILSDIEADMVTEKQHKESAPPAIPTENGSEKTSYFLAEVIHPFSAASEKELDLDKGDYIVVRKVSQTGWAEGECKGKAGWFPMAYIEKRQRLPTTNFAAEVY

SEQ ID NO: 1344 - protein, 315 aa, Arabidopsis thaliana
  peptide (1)..(315): Ceres Seq. ID no. 12580279
  misc_feature (248)..(302): Pfam Name: Pfam Description:  SH3 domain
  misc_feature (1)..(315): NCBI GI NO: 22328762 NR Description: putative protein; protein id: At4g18060
  misc_feature (1)..(315): NCBI GI NO: 21928139 NR Description: AT4g18060/F15J5_30 [Arabidopsis thaliana]
  misc_feature (1)..(315): NCBI GI NO: 16974680 NR Description: SH3 domain-containing protein 3
  misc_feature (1)..(207): NCBI GI NO: 7485521 NR Description: hypothetical protein F15J5
  misc_feature (1)..(306): NCBI GI NO: 22093679 NR Description: putative SH3
  misc_feature (1)..(230): NCBI GI NO: 34902022 NR Description: unknown protein
  misc_feature (224)..(308): NCBI GI NO: 34902022 NR Description: unknown protein
  misc_feature (1)..(237): NCBI GI NO: 15221714 NR Description: unknown protein; protein id: At1g31440
  misc_feature (242)..(308): NCBI GI NO: 15221714 NR Description: unknown protein; protein id: At1g31440
  misc_feature (1)..(242): NCBI GI NO: 18418491 NR Description: putative protein; protein id: At4g34660
MVIDELEMQRHHQLDKLYRSTRSAKEFQRDIVKAAEAFTTIGLRHIEAGTKLSEDCCRYGNENSQNIDENILAKAAAIYGDARKHVDKEQEDFNKLLASQVLDPLRAMVAGSPLEDARHLAQRYSRMRQEAETHATEVSRRQARVREAPIPENVAKLQLAEAKMQELKANMAVLGKEATAALAAVESQQHRLTFQRLVAMVEGEKNYHLRIAAILSDIEADMVTEKQHKESAPPAIPTENGSEKTSYFLAEVIHPFSAASEKELDLDKGDYIVVRKVSQTGWAEGECKGKAGWFPMAYIEKRQRLPTTNFAAEVY

SEQ ID NO: 1345 - protein, 308 aa, Arabidopsis thaliana
  peptide (1)..(308): Ceres Seq. ID no. 12580280
  misc_feature (241)..(295): Pfam Name: Pfam Description:  SH3 domain
  misc_feature (1)..(308): NCBI GI NO: 22328762 NR Description: putative protein; protein id: At4g18060
  misc_feature (1)..(308): NCBI GI NO: 21928139 NR Description: AT4g18060/F15J5_30 [Arabidopsis thaliana]
  misc_feature (1)..(308): NCBI GI NO: 16974680 NR Description: SH3 domain-containing protein 3
  misc_feature (1)..(200): NCBI GI NO: 7485521 NR Description: hypothetical protein F15J5
  misc_feature (1)..(299): NCBI GI NO: 22093679 NR Description: putative SH3
  misc_feature (1)..(223): NCBI GI NO: 34902022 NR Description: unknown protein
  misc_feature (217)..(301): NCBI GI NO: 34902022 NR Description: unknown protein
  misc_feature (1)..(230): NCBI GI NO: 15221714 NR Description: unknown protein; protein id: At1g31440
  misc_feature (235)..(301): NCBI GI NO: 15221714 NR Description: unknown protein; protein id: At1g31440
  misc_feature (1)..(235): NCBI GI NO: 18418491 NR Description: putative protein; protein id: At4g34660
MQRHHQLDKLYRSTRSAKEFQRDIVKAAEAFTTIGLRHIEAGTKLSEDCCRYGNENSQNIDENILAKAAAIYGDARKHVDKEQEDFNKLLASQVLDPLRAMVAGSPLEDARHLAQRYSRMRQEAETHATEVSRRQARVREAPIPENVAKLQLAEAKMQELKANMAVLGKEATAALAAVESQQHRLTFQRLVAMVEGEKNYHLRIAAILSDIEADMVTEKQHKESAPPAIPTENGSEKTSYFLAEVIHPFSAASEKELDLDKGDYIVVRKVSQTGWAEGECKGKAGWFPMAYIEKRQRLPTTNFAAEVY

SEQ ID NO: 1346 - DNA, 1129 bp, Arabidopsis thaliana
  misc_feature (1)..(1129): Ceres Seq. ID no. 12337799
aaaagttgcttgctttcttcttcttctccgattcgagcttccttcctctcagcaaaaccttcaagtaaagagtggtgaatcggaaaatgtcgcagtcttccgtcgatataccgccaaaaggtgggtttagcttcgatctgtgcaaaaggaatgatatgctgacacagaagggtcttaaagcgccgtcgtttctcaagactggaacgactatcgttggattgatatttaaggatggtgtaatacttggggctgatacacgggcaactgaagggcctattgtggctgataagaactgtgagaagattcactacatggcaccaaacatttactgttgtggtgcaggaaccgctgctgacactgaagcagtaactgatatggtcagctcacagctgcggttgcatagataccagactggccgagattctcgagtcgttactgcattgacccttctcaaaaaacatcttttcagctaccaaggccatgtctcagctgctcttgtgcttggtggagttgatattaccgggcctcatcttcacacgatatacccacacggttctactgacactctaccatttgctacaatgggttctggttcccttgctgtcatgtcagtgtttgaagcaaagtataaagaaggtctaactagagatgaaggaatcaagttggttgctgaagccatatgctctggtatattcaacgaccttggtagtggtagcaatgtggatatctgtgtgatcactaaggggcacaaggaatacttgaggaattacatggaaccaaacccaagaacctatgttagcagcaaaggctattcattcaccaagaaaaccgaggttctactcaccaaaattacaccattattggagcgagtcgaaattgtagaagtggctggtgaagctatggaggaatgaatctcgtgtgagagacagatactaagagtgaaaccattgttctacctcacatgacagtcatgtttacattttctactttgttcaatatgaacgactaaaatcgaatcgtagttgcctccatttcgtctttaaatttggcttgaacttgtgattaatgattatggatgattcggttttgaaatttagctctcacataattttcaaaagagctctttctt

SEQ ID NO: 1347 - protein, 274 aa, Arabidopsis thaliana
  peptide (1)..(274): Ceres Seq. ID no. 12337800
  misc_feature (36)..(217): Pfam Name: Pfam Description:  Proteasome A-type and B-type
  misc_feature (1)..(274): NCBI GI NO: 20260224 NR Description: 20S proteasome beta subunit PBB2
  misc_feature (1)..(274): NCBI GI NO: 15237451 NR Description: 20S proteasome beta subunit B
  misc_feature (1)..(274): NCBI GI NO: 21593337 NR Description: 20S proteasome beta subunit PBB2
  misc_feature (1)..(274): NCBI GI NO: 18405364 NR Description: 20S proteasome beta subunit B
  misc_feature (1)..(274): NCBI GI NO: 2511578 NR Description: multicatalytic endopeptidase
  misc_feature (1)..(248): NCBI GI NO: 30688785 NR Description: 20S proteasome beta subunit B (PBB1)
  misc_feature (5)..(274): NCBI GI NO: 8671504 NR Description: beta 2 subunit of 20S proteasome
  misc_feature (57)..(274): NCBI GI NO: 2511576 NR Description: multicatalytic endopeptidase
  misc_feature (10)..(265): NCBI GI NO: 24664391 NR Description: Proteasome beta2 subunit CG3329-PA
  misc_feature (10)..(265): NCBI GI NO: 2582506 NR Description: 20S proteasome beta2 subunit
MSQSSVDIPPKGGFSFDLCKRNDMLTQKGLKAPSFLKTGTTIVGLIFKDGVILGADTRATEGPIVADKNCEKIHYMAPNIYCCGAGTAADTEAVTDMVSSQLRLHRYQTGRDSRVVTALTLLKKHLFSYQGHVSAALVLGGVDITGPHLHTIYPHGSTDTLPFATMGSGSLAVMSVFEAKYKEGLTRDEGIKLVAEAICSGIFNDLGSGSNVDICVITKGHKEYLRNYMEPNPRTYVSSKGYSFTKKTEVLLTKITPLLERVEIVEVAGEAMEE

SEQ ID NO: 1348 - protein, 251 aa, Arabidopsis thaliana
  peptide (1)..(251): Ceres Seq. ID no. 12337801
  misc_feature (13)..(194): Pfam Name: Pfam Description:  Proteasome A-type and B-type
  misc_feature (1)..(251): NCBI GI NO: 20260224 NR Description: 20S proteasome beta subunit PBB2
  misc_feature (1)..(251): NCBI GI NO: 15237451 NR Description: 20S proteasome beta subunit B
  misc_feature (1)..(251): NCBI GI NO: 21593337 NR Description: 20S proteasome beta subunit PBB2
  misc_feature (1)..(251): NCBI GI NO: 18405364 NR Description: 20S proteasome beta subunit B
  misc_feature (1)..(251): NCBI GI NO: 2511578 NR Description: multicatalytic endopeptidase
  misc_feature (1)..(225): NCBI GI NO: 30688785 NR Description: 20S proteasome beta subunit B (PBB1)
  misc_feature (1)..(251): NCBI GI NO: 8671504 NR Description: beta 2 subunit of 20S proteasome
  misc_feature (34)..(251): NCBI GI NO: 2511576 NR Description: multicatalytic endopeptidase
  misc_feature (1)..(242): NCBI GI NO: 24664391 NR Description: Proteasome beta2 subunit CG3329-PA
  misc_feature (1)..(242): NCBI GI NO: 2582506 NR Description: 20S proteasome beta2 subunit
MLTQKGLKAPSFLKTGTTIVGLIFKDGVILGADTRATEGPIVADKNCEKIHYMAPNIYCCGAGTAADTEAVTDMVSSQLRLHRYQTGRDSRVVTALTLLKKHLFSYQGHVSAALVLGGVDITGPHLHTIYPHGSTDTLPFATMGSGSLAVMSVFEAKYKEGLTRDEGIKLVAEAICSGIFNDLGSGSNVDICVITKGHKEYLRNYMEPNPRTYVSSKGYSFTKKTEVLLTKITPLLERVEIVEVAGEAMEE

SEQ ID NO: 1349 - protein, 199 aa, Arabidopsis thaliana
  peptide (1)..(199): Ceres Seq. ID no. 12337802
  misc_feature (1)..(142): Pfam Name: Pfam Description:  Proteasome A-type and B-type
  misc_feature (1)..(199): NCBI GI NO: 20260224 NR Description: 20S proteasome beta subunit PBB2
  misc_feature (1)..(199): NCBI GI NO: 15237451 NR Description: 20S proteasome beta subunit B
  misc_feature (1)..(199): NCBI GI NO: 21593337 NR Description: 20S proteasome beta subunit PBB2
  misc_feature (1)..(199): NCBI GI NO: 18405364 NR Description: 20S proteasome beta subunit B
  misc_feature (1)..(199): NCBI GI NO: 2511578 NR Description: multicatalytic endopeptidase
  misc_feature (1)..(173): NCBI GI NO: 30688785 NR Description: 20S proteasome beta subunit B (PBB1)
  misc_feature (1)..(199): NCBI GI NO: 8671504 NR Description: beta 2 subunit of 20S proteasome
  misc_feature (1)..(199): NCBI GI NO: 2511576 NR Description: multicatalytic endopeptidase
  misc_feature (1)..(190): NCBI GI NO: 24664391 NR Description: Proteasome beta2 subunit CG3329-PA
  misc_feature (1)..(190): NCBI GI NO: 2582506 NR Description: 20S proteasome beta2 subunit
MAPNIYCCGAGTAADTEAVTDMVSSQLRLHRYQTGRDSRVVTALTLLKKHLFSYQGHVSAALVLGGVDITGPHLHTIYPHGSTDTLPFATMGSGSLAVMSVFEAKYKEGLTRDEGIKLVAEAICSGIFNDLGSGSNVDICVITKGHKEYLRNYMEPNPRTYVSSKGYSFTKKTEVLLTKITPLLERVEIVEVAGEAMEE

SEQ ID NO: 1350 - DNA, 847 bp, Arabidopsis thaliana
  misc_feature (1)..(847): Ceres Seq. ID no. 12672940
aatttattctcaaaccttatgagtgagatctctcttaatcattctctctttcttctctcctctgtgatgtgaggtttcgaagatccttctctgattcctcatcaaactcagatcagtagcggacccaaataggatcaaagcaaacgaggtttcaatttagagttttttaaagctcaaatctcggttgcttcggttgaacttcttgatacactgtctcgttttgagttcttgttaggtcattcctttagagagatatatggcagaggtgaaggatcaattagagattaagttccggcttaacgatggttctgatatcggtcctaaattgtttcctgatgctactaccgttgctacattgaaagaaaccgttgttgctcagtggccaagagataaggagaacgggccaaagacagtgaaagatgttaaactgataagcgcgggtagaatattggagaacaacaaaacggttggagattgcaggagtcccgtcggcaatttctcaggtgctgtcaccacaatgcatgttataattcaacatcaagttactgaaaaagaaaagaagaagaagaagcctaaaggtgatctgaaacagaacaaatgtgtctgtttatgttttggagctcgttgttaacaattgtgcaagacaagtagagagagttaaaaaagcttgggagattcacattctgttcttgagccttcttcaataccttttgctcttgttccttgtaattcttttttctgacatgacatgacatgattggctttttgatcgcttgaggtttggtttctattgtatttcggattcgcaacaccgtggaaattattaggtaacaaacaaatttgcacg

SEQ ID NO: 1351 - protein, 124 aa, Arabidopsis thaliana
  peptide (1)..(124): Ceres Seq. ID no. 12672941
  misc_feature (8)..(93): Pfam Name: Pfam Description:  Ubiquitin family
  misc_feature (1)..(124): NCBI GI NO: 18417680 NR Description: expressed protein; protein id: At5g15460
  misc_feature (1)..(99): NCBI GI NO: 11358132 NR Description: hypothetical protein T20K14_70 - Arabidopsis thaliana
  misc_feature (1)..(117): NCBI GI NO: 15232032 NR Description: expressed protein; protein id: At3g01050.1
  misc_feature (5)..(117): NCBI GI NO: 21592966 NR Description: ubiquitin-fusion protein, putative
  misc_feature (4)..(117): NCBI GI NO: 4097587 NR Description: NTGP5 [Nicotiana tabacum]
  misc_feature (1)..(117): NCBI GI NO: 15219188 NR Description: expressed protein; protein id: At1g22050.1
  misc_feature (5)..(117): NCBI GI NO: 15218145 NR Description: expressed protein; protein id: At1g77870
  misc_feature (2)..(117): NCBI GI NO: 38347220 NR Description: OSJNBa0055C08.14
  misc_feature (5)..(117): NCBI GI NO: 15234839 NR Description: expressed protein; protein id: At4g24990
  misc_feature (1)..(100): NCBI GI NO: 25402954 NR Description: protein F2E2.12 [imported] - Arabidopsis thaliana
MAEVKDQLEIKFRLNDGSDIGPKLFPDATTVATLKETVVAQWPRDKENGPKTVKDVKLISAGRILENNKTVGDCRSPVGNFSGAVTTMHVIIQHQVTEKEKKKKKPKGDLKQNKCVCLCFGARC

SEQ ID NO: 1352 - DNA, 895 bp, Arabidopsis thaliana
  misc_feature (1)..(895): Ceres Seq. ID no. 12325422
gactctctttctcatttccacctgaggaaaaaagctttttcgaatctcgcttgctttttgtcgccatgagtctctttgggttaggaagaaatcagaagactttccgacctaagaagagtgcaccttctggaagcaagggtgcacagcttcgaaagcatatagatgccaccctaggaagtgggaacttgagagaagctgtaagacttcctccgggagaggatgcaaatgaatggcttgctgtaaacactgtggatttctttaatcaggtgaatttgctatatggcacccttaccgagttctgcacacctgataactgtcctacaatgactgctggcccaaagtacgagtatagatgggcagatggtgtacagatcaagaagcccatcgaggtttctgctccaaagtatgtcgagtacttgatggattggatcgagacccaactcgatgatgagactttatttcctcaaaggcttggagcaccatttcctcagaacttcaaagatgtggtgaaaacgatctttaaacggctattccgagtttatgctcacatataccactctcatttccagaaaatcgttagcctaaaagaagaagctcatctcaacacttgcttcaaacacttcatcctctttactcatgaatttggactgatagacaagaaagaactcgcgcctctacaagagctcatagaatctatcatttcaccttattgagcaaaagaccatttctgttttttttttttttcagattaaaaaccccaataaattaacggtaagaagttttatttttaattataaatctctcttgtttgttttcaagtttttttctttcttaaacctctgtaaaatttaaacatttactatgtaaaaaagaaatcgatcttgactagttcttt

SEQ ID NO: 1353 - protein, 236 aa, Arabidopsis thaliana
  peptide (1)..(236): Ceres Seq. ID no. 12325423
  misc_feature (50)..(234): Pfam Name: Pfam Description:  Mob1/phocein family
  misc_feature (22)..(236): NCBI GI NO: 15242430 NR Description: putative protein; protein id: At5g45550
  misc_feature (22)..(236): NCBI GI NO: 32470635 NR Description: putative Mob1/phocein family protein
  misc_feature (22)..(236): NCBI GI NO: 32470654 NR Description: unknown [Solanum bulbocastanum]
  misc_feature (22)..(236): NCBI GI NO: 26449776 NR Description: unknown protein [Arabidopsis thaliana]
  misc_feature (30)..(236): NCBI GI NO: 15234110 NR Description: putative protein; protein id: At4g19050.1
  misc_feature (22)..(233): NCBI GI NO: 19309913 NR Description: Mob1-like protein [Medicago sativa subsp. falcata]
  misc_feature (29)..(234): NCBI GI NO: 37534032 NR Description: putative F-box protein family
  misc_feature (44)..(233): NCBI GI NO: 10800806 NR Description: hypothetical protein [Cicer arietinum]
  misc_feature (24)..(234): NCBI GI NO: 28277885 NR Description: Similar to hypothetical protein LOC92597
  misc_feature (24)..(234): NCBI GI NO: 27735029 NR Description: hypothetical protein LOC92597 [Homo sapiens]
LSFSFPPEEKSFFESRLLFVAMSLFGLGRNQKTFRPKKSAPSGSKGAQLRKHIDATLGSGNLREAVRLPPGEDANEWLAVNTVDFFNQVNLLYGTLTEFCTPDNCPTMTAGPKYEYRWADGVQIKKPIEVSAPKYVEYLMDWIETQLDDETLFPQRLGAPFPQNFKDVVKTIFKRLFRVYAHIYHSHFQKIVSLKEEAHLNTCFKHFILFTHEFGLIDKKELAPLQELIESIISPY

SEQ ID NO: 1354 - protein, 215 aa, Arabidopsis thaliana
  peptide (1)..(215): Ceres Seq. ID no. 12325424
  misc_feature (29)..(213): Pfam Name: Pfam Description:  Mob1/phocein family
  misc_feature (1)..(215): NCBI GI NO: 15242430 NR Description: putative protein; protein id: At5g45550
  misc_feature (1)..(215): NCBI GI NO: 32470635 NR Description: putative Mob1/phocein family protein
  misc_feature (1)..(215): NCBI GI NO: 32470654 NR Description: unknown [Solanum bulbocastanum]
  misc_feature (1)..(215): NCBI GI NO: 26449776 NR Description: unknown protein [Arabidopsis thaliana]
  misc_feature (9)..(215): NCBI GI NO: 15234110 NR Description: putative protein; protein id: At4g19050.1
  misc_feature (1)..(212): NCBI GI NO: 19309913 NR Description: Mob1-like protein [Medicago sativa subsp. falcata]
  misc_feature (8)..(213): NCBI GI NO: 37534032 NR Description: putative F-box protein family
  misc_feature (23)..(212): NCBI GI NO: 10800806 NR Description: hypothetical protein [Cicer arietinum]
  misc_feature (3)..(213): NCBI GI NO: 28277885 NR Description: Similar to hypothetical protein LOC92597
  misc_feature (3)..(213): NCBI GI NO: 27735029 NR Description: hypothetical protein LOC92597 [Homo sapiens]
MSLFGLGRNQKTFRPKKSAPSGSKGAQLRKHIDATLGSGNLREAVRLPPGEDANEWLAVNTVDFFNQVNLLYGTLTEFCTPDNCPTMTAGPKYEYRWADGVQIKKPIEVSAPKYVEYLMDWIETQLDDETLFPQRLGAPFPQNFKDVVKTIFKRLFRVYAHIYHSHFQKIVSLKEEAHLNTCFKHFILFTHEFGLIDKKELAPLQELIESIISPY

SEQ ID NO: 1355 - protein, 129 aa, Arabidopsis thaliana
  peptide (1)..(129): Ceres Seq. ID no. 12325425
  misc_feature (1)..(127): Pfam Name: Pfam Description:  Mob1/phocein family
  misc_feature (1)..(129): NCBI GI NO: 15242430 NR Description: putative protein; protein id: At5g45550
  misc_feature (1)..(129): NCBI GI NO: 32470635 NR Description: putative Mob1/phocein family protein
  misc_feature (1)..(129): NCBI GI NO: 32470654 NR Description: unknown [Solanum bulbocastanum]
  misc_feature (1)..(129): NCBI GI NO: 26449776 NR Description: unknown protein [Arabidopsis thaliana]
  misc_feature (1)..(129): NCBI GI NO: 15234110 NR Description: putative protein; protein id: At4g19050.1
  misc_feature (1)..(126): NCBI GI NO: 19309913 NR Description: Mob1-like protein [Medicago sativa subsp. falcata]
  misc_feature (1)..(127): NCBI GI NO: 37534032 NR Description: putative F-box protein family
  misc_feature (1)..(126): NCBI GI NO: 10800806 NR Description: hypothetical protein [Cicer arietinum]
  misc_feature (1)..(127): NCBI GI NO: 28277885 NR Description: Similar to hypothetical protein LOC92597
  misc_feature (1)..(127): NCBI GI NO: 27735029 NR Description: hypothetical protein LOC92597 [Homo sapiens]
MTAGPKYEYRWADGVQIKKPIEVSAPKYVEYLMDWIETQLDDETLFPQRLGAPFPQNFKDVVKTIFKRLFRVYAHIYHSHFQKIVSLKEEAHLNTCFKHFILFTHEFGLIDKKELAPLQELIESIISPY

SEQ ID NO: 1356 - DNA, 722 bp, Arabidopsis thaliana
  misc_feature (1)..(722): Ceres Seq. ID no. 12332383
aacgtcatcattctgacttttctcaaagaagagaaatcaaatcaccaagtcatcggagcgatcacagagaagaagaaaaccatggcggaagaagagaaaagcgtgatgaagcaagtgatggtggcgattgatgaaagcgaatgtagtaaacgcgctcttcaatggacgctcgtgtatctcaaagatagcctcgccgattccgacatcatcctcttcactgctcaacctcatcttgatctcagctgcgtctatgcttcctcttatggcgccgctccgattgagcttataaactcattgcaagagagtcataagaacgctggattgaatcgtcttgatgaaggaaccaaaatttgtgctgagactggggttactccaagaaaggtgttggaatttggaaatcctaaagaagcgatatgtgaagctgctgagaagcttggtgttgatatgcttgtggttggaagccatggtaaaggagcattacaaaggactttccttggaagtgttagcaattactgtgttaacaatgctaagtgcccagttcttgtggtgagaacaaaagcttgaagacctcttctcatgaaagagttcgacaaccctggcttgatgtgtgtgtgttgtaaacatattgataataatgctctgcttggttactattgtttgaagaaactttgtgagtaaacataatttattttgtttgataatgaaagagcattgccgtgttc

SEQ ID NO: 1357 - protein, 187 aa, Arabidopsis thaliana
  peptide (1)..(187): Ceres Seq. ID no. 12332384
  misc_feature (28)..(187): NCBI GI NO: 18408994 NR Description: expressed protein; protein id: At1g68300
  misc_feature (36)..(184): NCBI GI NO: 34914610 NR Description: P0520B06.18
  misc_feature (39)..(186): NCBI GI NO: 30681321 NR Description: ER6 protein -related [Arabidopsis thaliana]
  misc_feature (20)..(184): NCBI GI NO: 30694811 NR Description: expressed protein [Arabidopsis thaliana]
  misc_feature (9)..(184): NCBI GI NO: 18399413 NR Description: ethylene-responsive protein, putative
  misc_feature (9)..(184): NCBI GI NO: 30681955 NR Description: ethylene-responsive protein -related
  misc_feature (20)..(184): NCBI GI NO: 30694813 NR Description: expressed protein [Arabidopsis thaliana]
  misc_feature (39)..(186): NCBI GI NO: 25402571 NR Description: hypothetical protein
  misc_feature (9)..(175): NCBI GI NO: 30681959 NR Description: ethylene-responsive protein -related
  misc_feature (162)..(184): NCBI GI NO: 30681959 NR Description: ethylene-responsive protein -related
NVIILTFLKEEKSNHQVIGAITEKKKTMAEEEKSVMKQVMVAIDESECSKRALQWTLVYLKDSLADSDIILFTAQPHLDLSCVYASSYGAAPIELINSLQESHKNAGLNRLDEGTKICAETGVTPRKVLEFGNPKEAICEAAEKLGVDMLVVGSHGKGALQRTFLGSVSNYCVNNAKCPVLVVRTKA

SEQ ID NO: 1358 - protein, 160 aa, Arabidopsis thaliana
  peptide (1)..(160): Ceres Seq. ID no. 12332385
  misc_feature (1)..(160): NCBI GI NO: 18408994 NR Description: expressed protein; protein id: At1g68300
  misc_feature (9)..(157): NCBI GI NO: 34914610 NR Description: P0520B06.18
  misc_feature (12)..(159): NCBI GI NO: 30681321 NR Description: ER6 protein -related [Arabidopsis thaliana]
  misc_feature (1)..(157): NCBI GI NO: 30694811 NR Description: expressed protein [Arabidopsis thaliana]
  misc_feature (1)..(157): NCBI GI NO: 18399413 NR Description: ethylene-responsive protein, putative
  misc_feature (1)..(157): NCBI GI NO: 30681955 NR Description: ethylene-responsive protein -related
  misc_feature (1)..(157): NCBI GI NO: 30694813 NR Description: expressed protein [Arabidopsis thaliana]
  misc_feature (12)..(159): NCBI GI NO: 25402571 NR Description: hypothetical protein
  misc_feature (1)..(148): NCBI GI NO: 30681959 NR Description: ethylene-responsive protein -related
  misc_feature (135)..(157): NCBI GI NO: 30681959 NR Description: ethylene-responsive protein -related
MAEEEKSVMKQVMVAIDESECSKRALQWTLVYLKDSLADSDIILFTAQPHLDLSCVYASSYGAAPIELINSLQESHKNAGLNRLDEGTKICAETGVTPRKVLEFGNPKEAICEAAEKLGVDMLVVGSHGKGALQRTFLGSVSNYCVNNAKCPVLVVRTKA

SEQ ID NO: 1359 - protein, 152 aa, Arabidopsis thaliana
  peptide (1)..(152): Ceres Seq. ID no. 12332386
  misc_feature (1)..(152): NCBI GI NO: 18408994 NR Description: expressed protein; protein id: At1g68300
  misc_feature (1)..(149): NCBI GI NO: 34914610 NR Description: P0520B06.18
  misc_feature (4)..(151): NCBI GI NO: 30681321 NR Description: ER6 protein -related [Arabidopsis thaliana]
  misc_feature (1)..(149): NCBI GI NO: 30694811 NR Description: expressed protein [Arabidopsis thaliana]
  misc_feature (1)..(149): NCBI GI NO: 18399413 NR Description: ethylene-responsive protein, putative
  misc_feature (1)..(149): NCBI GI NO: 30681955 NR Description: ethylene-responsive protein -related
  misc_feature (1)..(149): NCBI GI NO: 30694813 NR Description: expressed protein [Arabidopsis thaliana]
  misc_feature (4)..(151): NCBI GI NO: 25402571 NR Description: hypothetical protein
  misc_feature (1)..(140): NCBI GI NO: 30681959 NR Description: ethylene-responsive protein -related
  misc_feature (127)..(149): NCBI GI NO: 30681959 NR Description: ethylene-responsive protein -related
MKQVMVAIDESECSKRALQWTLVYLKDSLADSDIILFTAQPHLDLSCVYASSYGAAPIELINSLQESHKNAGLNRLDEGTKICAETGVTPRKVLEFGNPKEAICEAAEKLGVDMLVVGSHGKGALQRTFLGSVSNYCVNNAKCPVLVVRTKA

SEQ ID NO: 1360 - DNA, 1331 bp, Arabidopsis thaliana
  misc_feature (1)..(1331): Ceres Seq. ID no. 12330652
agcaccgtctccaatggcgggtttcagttctctaattcctagaacgcttctgaaacgcgccgttagtagcgcaacaagaaatctaacggcgccgttagcttctatttcagcagcaagaaatctcttcattggaggaggatgtgacgaaaattatggtgagccaggagtgttttctcattccaatggaataagaaagtacaccaccaccattggtaatactggctcactaactggtccttttcatcatcttctgggggtcaaccagacaaacaagcccgcctttttaagggtccaatctatgagctatcagtttgtcgctgattctcattcatctcctaaacgtattgtgaagaatgaggatgaggaagatttttctgattcatcaaagaagggaaacgctgaaaaccctaggaaacatcaaattggggagaacatacccaagaaggataaaataaagtttcttgtgaacactcttcttgatattgaagataataaagaggctgtttatggagctctggatgcttgggttgcttgggagcgcaatttccccattgcttccctcaaaatagtaatagctagtcttgaaaaggaacatcaatggcatcgaatggtccaggtgataaagtggatcctaagtaagggacaagggaacacgatggggacgtacggacagttgatacgggcgttagatatggatcgtagagcagaagaggctcatattatctggcgaaagaaagttgggaacgatctgcattctgtgccttggcaattatgcttacaaatgatgcgcatatatttccggaacaacatgttacaggaacttgttaagctattcaaggatctggagagttatgaccgtaagcctccggacaagcacattgtgcagaccgtggctgatgcttatgagcttttgggaatgcttgatgagaaagaacgggtagtgacgaagtatagccatcttttacttggtacaccatcggatgataaaccaagtagatcttcgaggaagaagaagaaaccagaactgaggattcctgaagcaaccacagtagatgcagcaaaagctgaattgcaagaagagctaaaagaaaatctggataatcaccaagaatcaaaagctgccactgagaaacaattcaaacatggagcgtaagttgtagtatttaatcgataaaagtgtcactgcacgagaaacatggactgtaaggatgtatttaattgagggattgttgacaatgctcacatcccttgggatttgtcgcaatggatggatatagagtttagggtttgagtgcggcactagtattactgatgataacaaaatcacattt

SEQ ID NO: 1361 - protein, 383 aa, Arabidopsis thaliana
  peptide (1)..(383): Ceres Seq. ID no. 12330653
  misc_feature (5)..(383): NCBI GI NO: 18390413 NR Description: expressed protein; protein id: At1g04590
  misc_feature (5)..(383): NCBI GI NO: 30678929 NR Description: expressed protein [Arabidopsis thaliana]
  misc_feature (158)..(383): NCBI GI NO: 25406795 NR Description: hypothetical protein
  misc_feature (5)..(158): NCBI GI NO: 25406795 NR Description: hypothetical protein
  misc_feature (93)..(317): NCBI GI NO: 18415213 NR Description: putative protein; protein id: At4g18975.1
  misc_feature (99)..(317): NCBI GI NO: 18415645 NR Description: putative protein; protein id: At4g21190
  misc_feature (154)..(347): NCBI GI NO: 7485419 NR Description: hypothetical protein F13C5
  misc_feature (153)..(374): NCBI GI NO: 34909686 NR Description: B1131G08.1
  misc_feature (165)..(317): NCBI GI NO: 7486589 NR Description: hypothetical protein F7J7
  misc_feature (128)..(317): NCBI GI NO: 34393638 NR Description: pentatricopeptide
APSPMAGFSSLIPRTLLKRAVSSATRNLTAPLASISAARNLFIGGGCDENYGEPGVFSHSNGIRKYTTTIGNTGSLTGPFHHLLGVNQTNKPAFLRVQSMSYQFVADSHSSPKRIVKNEDEEDFSDSSKKGNAENPRKHQIGENIPKKDKIKFLVNTLLDIEDNKEAVYGALDAWVAWERNFPIASLKIVIASLEKEHQWHRMVQVIKWILSKGQGNTMGTYGQLIRALDMDRRAEEAHIIWRKKVGNDLHSVPWQLCLQMMRIYFRNNMLQELVKLFKDLESYDRKPPDKHIVQTVADAYELLGMLDEKERVVTKYSHLLLGTPSDDKPSRSSRKKKKPELRIPEATTVDAAKAELQEELKENLDNHQESKAATEKQFKHGA

SEQ ID NO: 1362 - protein, 379 aa, Arabidopsis thaliana
  peptide (1)..(379): Ceres Seq. ID no. 12330654
  misc_feature (1)..(379): NCBI GI NO: 18390413 NR Description: expressed protein; protein id: At1g04590
  misc_feature (1)..(379): NCBI GI NO: 30678929 NR Description: expressed protein [Arabidopsis thaliana]
  misc_feature (154)..(379): NCBI GI NO: 25406795 NR Description: hypothetical protein
  misc_feature (1)..(154): NCBI GI NO: 25406795 NR Description: hypothetical protein
  misc_feature (89)..(313): NCBI GI NO: 18415213 NR Description: putative protein; protein id: At4g18975.1
  misc_feature (95)..(313): NCBI GI NO: 18415645 NR Description: putative protein; protein id: At4g21190
  misc_feature (150)..(343): NCBI GI NO: 7485419 NR Description: hypothetical protein F13C5
  misc_feature (149)..(370): NCBI GI NO: 34909686 NR Description: B1131G08.1
  misc_feature (161)..(313): NCBI GI NO: 7486589 NR Description: hypothetical protein F7J7
  misc_feature (124)..(313): NCBI GI NO: 34393638 NR Description: pentatricopeptide
MAGFSSLIPRTLLKRAVSSATRNLTAPLASISAARNLFIGGGCDENYGEPGVFSHSNGIRKYTTTIGNTGSLTGPFHHLLGVNQTNKPAFLRVQSMSYQFVADSHSSPKRIVKNEDEEDFSDSSKKGNAENPRKHQIGENIPKKDKIKFLVNTLLDIEDNKEAVYGALDAWVAWERNFPIASLKIVIASLEKEHQWHRMVQVIKWILSKGQGNTMGTYGQLIRALDMDRRAEEAHIIWRKKVGNDLHSVPWQLCLQMMRIYFRNNMLQELVKLFKDLESYDRKPPDKHIVQTVADAYELLGMLDEKERVVTKYSHLLLGTPSDDKPSRSSRKKKKPELRIPEATTVDAAKAELQEELKENLDNHQESKAATEKQFKHGA

SEQ ID NO: 1363 - protein, 284 aa, Arabidopsis thaliana
  peptide (1)..(284): Ceres Seq. ID no. 12330655
  misc_feature (1)..(284): NCBI GI NO: 18390413 NR Description: expressed protein; protein id: At1g04590
  misc_feature (1)..(284): NCBI GI NO: 30678929 NR Description: expressed protein [Arabidopsis thaliana]
  misc_feature (59)..(284): NCBI GI NO: 25406795 NR Description: hypothetical protein
  misc_feature (1)..(59): NCBI GI NO: 25406795 NR Description: hypothetical protein
  misc_feature (1)..(218): NCBI GI NO: 18415213 NR Description: putative protein; protein id: At4g18975.1
  misc_feature (1)..(218): NCBI GI NO: 18415645 NR Description: putative protein; protein id: At4g21190
  misc_feature (55)..(248): NCBI GI NO: 7485419 NR Description: hypothetical protein F13C5
  misc_feature (54)..(275): NCBI GI NO: 34909686 NR Description: B1131G08.1
  misc_feature (66)..(218): NCBI GI NO: 7486589 NR Description: hypothetical protein F7J7
  misc_feature (29)..(218): NCBI GI NO: 34393638 NR Description: pentatricopeptide
MSYQFVADSHSSPKRIVKNEDEEDFSDSSKKGNAENPRKHQIGENIPKKDKIKFLVNTLLDIEDNKEAVYGALDAWVAWERNFPIASLKIVIASLEKEHQWHRMVQVIKWILSKGQGNTMGTYGQLIRALDMDRRAEEAHIIWRKKVGNDLHSVPWQLCLQMMRIYFRNNMLQELVKLFKDLESYDRKPPDKHIVQTVADAYELLGMLDEKERVVTKYSHLLLGTPSDDKPSRSSRKKKKPELRIPEATTVDAAKAELQEELKENLDNHQESKAATEKQFKHGA

SEQ ID NO: 1364 - DNA, 710 bp, Arabidopsis thaliana
  misc_feature (1)..(710): Ceres Seq. ID no. 12323075
agaccaaaaaagcggttggtgtaagatcccaaactcacagattcccaaataatagtaatactcttcctcttctcaactctcaccagtcaccagcagatcatcggagatgggcggagacggaaaagttttcaccttgtccgaggtttctcagcacagtagcgccaaggattgttggatcgtcatcgacggcaaggtttatgatgtgacaaagttcttggatgatcatcctggtggtgatgaggttatcttgacttctacagggaaagatgcgaccgatgatttcgaggatgtgggacatagttcgactgcgaaagccatgctagatgagtactatgtgggtgatattgacacagctactgtgccggttaaagctaagtttgtgcctcctacgtcgacgaaagccgtggctactcaggataagagctcggattttgttattaagctccttcagttccttgttccacttctaatcttaggcttggctttcggcattcggtactacactaagaccaaggctccttcttcttgaaagattgaattgtggcctaagtgaattgcttgtgtacgacgtggttaaactctgtctctacctctgtttgtcttgtaagacatcattatattctctattccaatcaactgatagacctttgatttttaagccatctacctttgttgtcttatatcaatcaaatccatttacaatatcactc

SEQ ID NO: 1365 - protein, 140 aa, Arabidopsis thaliana
  peptide (1)..(140): Ceres Seq. ID no. 12323076
  misc_feature (7)..(81): Pfam Name: Pfam Description:  Cytochrome b5-like Heme/Steroid binding domain
  misc_feature (1)..(140): NCBI GI NO: 15239718 NR Description: cytochrome b5 (dbj|BAA74840
  misc_feature (1)..(134): NCBI GI NO: 1076621 NR Description: cytochrome b5 - common tobacco
  misc_feature (1)..(134): NCBI GI NO: 1345882 NR Description: CYTOCHROME B5
  misc_feature (6)..(137): NCBI GI NO: 2647949 NR Description: cytochrome b5 [Olea europaea]
  misc_feature (1)..(137): NCBI GI NO: 1345925 NR Description: Cytochrome b5, seed isoform
  misc_feature (5)..(137): NCBI GI NO: 12229735 NR Description: Cytochrome b5
  misc_feature (1)..(135): NCBI GI NO: 15225731 NR Description: putative cytochrome b5; protein id: At2g32720.1
  misc_feature (1)..(137): NCBI GI NO: 14719320 NR Description: cytochrome B5 [Oryza sativa]
  misc_feature (1)..(137): NCBI GI NO: 1345881 NR Description: Cytochrome b5
  misc_feature (1)..(139): NCBI GI NO: 12230015 NR Description: Cytochrome b5 outer mitochondrial membrane isoformprecursor
MGGDGKVFTLSEVSQHSSAKDCWIVIDGKVYDVTKFLDDHPGGDEVILTSTGKDATDDFEDVGHSSTAKAMLDEYYVGDIDTATVPVKAKFVPPTSTKAVATQDKSSDFVIKLLQFLVPLLILGLAFGIRYYTKTKAPSS

SEQ ID NO: 1366 - protein, 70 aa, Arabidopsis thaliana
  peptide (1)..(70): Ceres Seq. ID no. 12323077
  misc_feature (1)..(70): NCBI GI NO: 15239718 NR Description: cytochrome b5 (dbj|BAA74840
  misc_feature (1)..(64): NCBI GI NO: 1076621 NR Description: cytochrome b5 - common tobacco
  misc_feature (1)..(64): NCBI GI NO: 1345882 NR Description: CYTOCHROME B5
  misc_feature (1)..(67): NCBI GI NO: 2647949 NR Description: cytochrome b5 [Olea europaea]
  misc_feature (1)..(67): NCBI GI NO: 1345925 NR Description: Cytochrome b5, seed isoform
  misc_feature (1)..(67): NCBI GI NO: 12229735 NR Description: Cytochrome b5
  misc_feature (1)..(65): NCBI GI NO: 15225731 NR Description: putative cytochrome b5; protein id: At2g32720.1
  misc_feature (1)..(67): NCBI GI NO: 14719320 NR Description: cytochrome B5 [Oryza sativa]
  misc_feature (1)..(67): NCBI GI NO: 1345881 NR Description: Cytochrome b5
  misc_feature (1)..(69): NCBI GI NO: 12230015 NR Description: Cytochrome b5 outer mitochondrial membrane isoformprecursor
MLDEYYVGDIDTATVPVKAKFVPPTSTKAVATQDKSSDFVIKLLQFLVPLLILGLAFGIRYYTKTKAPSS

SEQ ID NO: 1367 - DNA, 625 bp, Arabidopsis thaliana
  misc_feature (1)..(625): Ceres Seq. ID no. 12340167
attactcactcatacgctctctcgtcaaaccaaaaaaaaaaacctaaaagaaacttcgaaatgaaaggcggcgaatccaaagctgaagcaacgagcactgatcagagactcaaaaccagaggtagaaaggctgggaagaagacgaagaaggatccaaatcaacctaagagacctccaagtgctttcttcgtcttccttgaggatttccggaaagagtttaacctagcgaatcctaataacaaatccgtcgctactgttggtaaggctgctggagctagatggaagtcaatgactgatgaagataaagctccttacgtcgccaaggctgagagcagaaagactgaatatattaagaatgtgcaacagtacaacttgaaactggctagtggaaccaatagagaagaggatgactctgacaaatctaagtctgaggtggatgaagcagtaagcgaagaggaggcagaagacgacgattgaagcatctaggtcttgctattgacttgactcagatttgagaatgtaaacttgcttaggtttatgaccaaaaactttttaaatactcttatttatgctttgtgtttgtgatatttgaacctcatttgctacatcaatgttgttttaggcc

SEQ ID NO: 1368 - protein, 158 aa, Arabidopsis thaliana
  peptide (1)..(158): Ceres Seq. ID no. 12340168
  misc_feature (55)..(124): Pfam Name: high mobility group Pfam Description: HMG
  misc_feature (21)..(158): NCBI GI NO: 15227862 NR Description: putative HMG protein; protein id: At2g17560
  misc_feature (21)..(158): NCBI GI NO: 21592453 NR Description: putative HMG protein [Arabidopsis thaliana]
  misc_feature (21)..(158): NCBI GI NO: 11346367 NR Description: high mobility group protein HMG-gamma
  misc_feature (21)..(158): NCBI GI NO: 13877775 NR Description: putative HMG protein [Arabidopsis thaliana]
  misc_feature (21)..(147): NCBI GI NO: 15237040 NR Description: HMG delta protein; protein id: At4g35570
  misc_feature (21)..(158): NCBI GI NO: 123379 NR Description: HMG1/2-LIKE PROTEIN (SB11 PROTEIN)
  misc_feature (21)..(158): NCBI GI NO: 18394898 NR Description: Expressed protein; protein id: At1g20693
  misc_feature (21)..(158): NCBI GI NO: 1052956 NR Description: high mobility group protein 2 HMG2 [Ipomoea nil]
  misc_feature (21)..(158): NCBI GI NO: 7446212 NR Description: high mobility group protein - potato
  misc_feature (21)..(158): NCBI GI NO: 541968 NR Description: high mobility group protein HMG-1 - garden pea
ITHSYALSSNQKKKPKRNFEMKGGESKAEATSTDQRLKTRGRKAGKKTKKDPNQPKRPPSAFFVFLEDFRKEFNLANPNNKSVATVGKAAGARWKSMTDEDKAPYVAKAESRKTEYIKNVQQYNLKLASGTNREEDDSDKSKSEVDEAVSEEEAEDDD

SEQ ID NO: 1369 - protein, 138 aa, Arabidopsis thaliana
  peptide (1)..(138): Ceres Seq. ID no. 12340169
  misc_feature (35)..(104): Pfam Name: high mobility group Pfam Description: HMG
  misc_feature (1)..(138): NCBI GI NO: 15227862 NR Description: putative HMG protein; protein id: At2g17560
  misc_feature (1)..(138): NCBI GI NO: 21592453 NR Description: putative HMG protein [Arabidopsis thaliana]
  misc_feature (1)..(138): NCBI GI NO: 11346367 NR Description: high mobility group protein HMG-gamma
  misc_feature (1)..(138): NCBI GI NO: 13877775 NR Description: putative HMG protein [Arabidopsis thaliana]
  misc_feature (1)..(127): NCBI GI NO: 15237040 NR Description: HMG delta protein; protein id: At4g35570
  misc_feature (1)..(138): NCBI GI NO: 123379 NR Description: HMG1/2-LIKE PROTEIN (SB11 PROTEIN)
  misc_feature (1)..(138): NCBI GI NO: 18394898 NR Description: Expressed protein; protein id: At1g20693
  misc_feature (1)..(138): NCBI GI NO: 1052956 NR Description: high mobility group protein 2 HMG2 [Ipomoea nil]
  misc_feature (1)..(138): NCBI GI NO: 7446212 NR Description: high mobility group protein - potato
  misc_feature (1)..(138): NCBI GI NO: 541968 NR Description: high mobility group protein HMG-1 - garden pea
MKGGESKAEATSTDQRLKTRGRKAGKKTKKDPNQPKRPPSAFFVFLEDFRKEFNLANPNNKSVATVGKAAGARWKSMTDEDKAPYVAKAESRKTEYIKNVQQYNLKLASGTNREEDDSDKSKSEVDEAVSEEEAEDDD

SEQ ID NO: 1370 - DNA, 1726 bp, Arabidopsis thaliana
  misc_feature (1)..(1726): Ceres Seq. ID no. 13494641
acaagaagaatattcacagagaagagagagcgataataatggcgtttaagggtttcgcgtgtttttcgattcttttgttgttgtctctattcgtttcctctatacgaagcgaggagacgaaggaatttgtcttgactctcgatcactctaacttcaccgaaaccatctccaagcacgatttcatcgtcgtcgagttctacgccccttggtgtggtcactgccagaagcttgctcctgagtacgagaaggctgcatcagagttgagtagtcataaccctcctcttgctctcgccaagatcgatgctagtgaagaagcaaacaaagaatttgctaatgagtacaagattcagggtttccccactcttaagattttgagaaatggagggaagtcggttcaagattacaacggacctcgtgaagctgagggtattgtcacttatttgaagaagcaaagtggtcctgcttctgttgaaattaagtcagctgattctgccactgaggttgttggtgaaaagaatgttgttgctgttggagtgttccctaaattatccggggatgagtttgattctttcatggcccttgctgagaaattgcgtgctgactatgatttcgcacacactttggatgctaagtttcttcctcgtggagagtctgtggaaggacctgcagtgaggctgttcaagccttttgatgaattgtttgttgactccaaggacttcaatggggaagctctagagaaatttgtcaaagaatcaagtatcccacttgtcaccgtctttgacagtgatccaaacaaccacccttatgttgccaaattctttgaaagccctgccactaaggcgatgatgttcgttaacttcactggagcaacagctgaagctctaaaatcaaagtaccgtgaagtagctacatccaacaaagatcaaagtcttgccttccttgttggtgatgcagagagcagccaaggcgctttccagtactttggactcgaagagagccaagttcccctcatcatcatccagaccccagataacaagaagtatttgaaagtcaacgttgaggttgaccagattgaatcatggttcaaggacttccaggacggaaaagttgctgtccacaaaaaatcccaacctattccagctgagaacaacgaacctgtgaaggttgttgttgccgagagccttgacgacatagttttcaagtctggaaagaatgtcttgattgagttctatgcaccatggtgtggacattgtcaaaaacttgctccaatcttggacgaagtggctttgtcattccagaacgacccaagtgtgatcatagcaaaattggacgcaaccgcaaatgatatcccaagtgataccttcgatgtgaaaggattcccgaccatttacttcaggtcagcgagcggaaatgttgtagtgtacgaaggagacaggacaaaggaagacttcataaacttcgttgagaagaacagtgagaagaagccaacttctcatggagaagagtctaccaagagtgaggaacctaagaagaccgaggaaacggccgcaaaggacgagctgtagaaatctcatgagttttgtttcggaatttgagtaggagcgtttctcttcttcaccatatccaacagaatcttcttttttctttagcagttttacagttttatcttttttgctctcttgttcgaacccaaaattatccccattaataaaaagttaaacctaat

SEQ ID NO: 1371 - protein, 520 aa, Arabidopsis thaliana
  peptide (1)..(520): Ceres Seq. ID no. 13494642
  misc_feature (40)..(369): Pfam Name: Pfam Description:  Calsequestrin
  misc_feature (13)..(520): NCBI GI NO: 15223975 NR Description: protein disulfide isomerase, putative
  misc_feature (13)..(520): NCBI GI NO: 15219086 NR Description: protein disulfide isomerase, putative
  misc_feature (13)..(494): NCBI GI NO: 30687521 NR Description: protein disulfide isomerase, putative
  misc_feature (16)..(520): NCBI GI NO: 266743 NR Description: Protein disulfide isomerase precursor (PDI)
  misc_feature (16)..(520): NCBI GI NO: 99992 NR Description: protein disulfide-isomerase (EC 5
  misc_feature (20)..(515): NCBI GI NO: 11133818 NR Description: Protein disulfide isomerase precursor (PDI)
  misc_feature (14)..(493): NCBI GI NO: 11133775 NR Description: Protein disulfide isomerase precursor (PDI)
  misc_feature (13)..(520): NCBI GI NO: 1709619 NR Description: Protein disulfide isomerase precursor (PDI)
  misc_feature (19)..(520): NCBI GI NO: 13925728 NR Description: protein disulfide isomerase 3 precursor
  misc_feature (22)..(520): NCBI GI NO: 12056115 NR Description: protein disulfide isomerase
KKNIHREERAIIMAFKGFACFSILLLLSLFVSSIRSEETKEFVLTLDHSNFTETISKHDFIVVEFYAPWCGHCQKLAPEYEKAASELSSHNPPLALAKIDASEEANKEFANEYKIQGFPTLKILRNGGKSVQDYNGPREAEGIVTYLKKQSGPASVEIKSADSATEVVGEKNVVAVGVFPKLSGDEFDSFMALAEKLRADYDFAHTLDAKFLPRGESVEGPAVRLFKPFDELFVDSKDFNGEALEKFVKESSIPLVTVFDSDPNNHPYVAKFFESPATKAMMFVNFTGATAEALKSKYREVATSNKDQSLAFLVGDAESSQGAFQYFGLEESQVPLIIIQTPDNKKYLKVNVEVDQIESWFKDFQDGKVAVHKKSQPIPAENNEPVKVVVAESLDDIVFKSGKNVLIEFYAPWCGHCQKLAPILDEVALSFQNDPSVIIAKLDATANDIPSDTFDVKGFPTIYFRSASGNVVVYEGDRTKEDFINFVEKNSEKKPTSHGEESTKSEEPKKTEETAAKDEL

SEQ ID NO: 1372 - protein, 508 aa, Arabidopsis thaliana
  peptide (1)..(508): Ceres Seq. ID no. 13494643
  misc_feature (28)..(357): Pfam Name: Pfam Description:  Calsequestrin
  misc_feature (1)..(508): NCBI GI NO: 15223975 NR Description: protein disulfide isomerase, putative
  misc_feature (1)..(508): NCBI GI NO: 15219086 NR Description: protein disulfide isomerase, putative
  misc_feature (1)..(482): NCBI GI NO: 30687521 NR Description: protein disulfide isomerase, putative
  misc_feature (4)..(508): NCBI GI NO: 266743 NR Description: Protein disulfide isomerase precursor (PDI)
  misc_feature (4)..(508): NCBI GI NO: 99992 NR Description: protein disulfide-isomerase (EC 5
  misc_feature (8)..(503): NCBI GI NO: 11133818 NR Description: Protein disulfide isomerase precursor (PDI)
  misc_feature (2)..(481): NCBI GI NO: 11133775 NR Description: Protein disulfide isomerase precursor (PDI)
  misc_feature (1)..(508): NCBI GI NO: 1709619 NR Description: Protein disulfide isomerase precursor (PDI)
  misc_feature (7)..(508): NCBI GI NO: 13925728 NR Description: protein disulfide isomerase 3 precursor
  misc_feature (10)..(508): NCBI GI NO: 12056115 NR Description: protein disulfide isomerase
MAFKGFACFSILLLLSLFVSSIRSEETKEFVLTLDHSNFTETISKHDFIVVEFYAPWCGHCQKLAPEYEKAASELSSHNPPLALAKIDASEEANKEFANEYKIQGFPTLKILRNGGKSVQDYNGPREAEGIVTYLKKQSGPASVEIKSADSATEVVGEKNVVAVGVFPKLSGDEFDSFMALAEKLRADYDFAHTLDAKFLPRGESVEGPAVRLFKPFDELFVDSKDFNGEALEKFVKESSIPLVTVFDSDPNNHPYVAKFFESPATKAMMFVNFTGATAEALKSKYREVATSNKDQSLAFLVGDAESSQGAFQYFGLEESQVPLIIIQTPDNKKYLKVNVEVDQIESWFKDFQDGKVAVHKKSQPIPAENNEPVKVVVAESLDDIVFKSGKNVLIEFYAPWCGHCQKLAPILDEVALSFQNDPSVIIAKLDATANDIPSDTFDVKGFPTIYFRSASGNVVVYEGDRTKEDFINFVEKNSEKKPTSHGEESTKSEEPKKTEETAAKDEL

SEQ ID NO: 1373 - protein, 330 aa, Arabidopsis thaliana
  peptide (1)..(330): Ceres Seq. ID no. 13494644
  misc_feature (1)..(179): Pfam Name: Pfam Description:  Calsequestrin
  misc_feature (1)..(330): NCBI GI NO: 15223975 NR Description: protein disulfide isomerase, putative
  misc_feature (1)..(330): NCBI GI NO: 15219086 NR Description: protein disulfide isomerase, putative
  misc_feature (1)..(304): NCBI GI NO: 30687521 NR Description: protein disulfide isomerase, putative
  misc_feature (1)..(330): NCBI GI NO: 266743 NR Description: Protein disulfide isomerase precursor (PDI)
  misc_feature (1)..(330): NCBI GI NO: 99992 NR Description: protein disulfide-isomerase (EC 5
  misc_feature (1)..(325): NCBI GI NO: 11133818 NR Description: Protein disulfide isomerase precursor (PDI)
  misc_feature (1)..(303): NCBI GI NO: 11133775 NR Description: Protein disulfide isomerase precursor (PDI)
  misc_feature (1)..(330): NCBI GI NO: 1709619 NR Description: Protein disulfide isomerase precursor (PDI)
  misc_feature (1)..(330): NCBI GI NO: 13925728 NR Description: protein disulfide isomerase 3 precursor
  misc_feature (1)..(330): NCBI GI NO: 12056115 NR Description: protein disulfide isomerase
MALAEKLRADYDFAHTLDAKFLPRGESVEGPAVRLFKPFDELFVDSKDFNGEALEKFVKESSIPLVTVFDSDPNNHPYVAKFFESPATKAMMFVNFTGATAEALKSKYREVATSNKDQSLAFLVGDAESSQGAFQYFGLEESQVPLIIIQTPDNKKYLKVNVEVDQIESWFKDFQDGKVAVHKKSQPIPAENNEPVKVVVAESLDDIVFKSGKNVLIEFYAPWCGHCQKLAPILDEVALSFQNDPSVIIAKLDATANDIPSDTFDVKGFPTIYFRSASGNVVVYEGDRTKEDFINFVEKNSEKKPTSHGEESTKSEEPKKTEETAAKDEL

SEQ ID NO: 1374 - DNA, 1435 bp, Arabidopsis thaliana
  misc_feature (1)..(1435): Ceres Seq. ID no. 13500060
gccctttcattattatgtcaacaaccctcctctattgaagatttcttcaatcatcttctccacaacaaaaaaataaccctaatttacacagaaaatatgtggggaattggaggaaattactactggcgaaagaaaaacaacaacggaggagaaagcgaagcgatcgttgtggtattcgcttggatgtctagcgaagaacgcaatctaaagaaccatgtcgatctctattcttctcttctttgggattctctcgtttgccattctcaatttctcaacatgtttcttccagataaagctgcagatttagcttctaatgttgtttctgaacttgtcaaggagctcaaagcaaagccagttcctttagtgtttgcttctttctctggtggtcctaatgcttgtatgtataaagttcttcaaatacttgaaggaacatgcgaaacgggactaaatccggatgattgtagattggttagaaactgcatctcagggtttatttatgactcatgtcctgtggatttcactagcgacttgggagctcgattagcggttcatccaactacgcttaaaatgtctagtccacctaaaccgtttgtatgggcagcgaatggtattgcttcgagtctcgattatgtttttctcaacaggtttgaatcacagcgagccgagtactggcagactctttactctactataatcatgagagtaccttatctcattctatgctctgaaaacgatgaccttgctccttatcaaactatacacaatttcgctacacgtctccaagaactaggaggaaatgtaaaacttgtaaaatggaatgattcccctcattgtggtcattatcgttataaccaggtcgactataaagctgctgtatctgagttcttgtcaaaagcagcgtcggtttattcgcagaagacgagaagtcttgacagagaagctatgaaaggaacatgtcatgatgagataacagagccaattcagagcttggggcaatcaacctctggtcttaaccgaagcttcaacggaactccacttgtcacaaccgatcatttcttcgtacctagcaccgtaggttactacgtgggcagagacggcggatatgtgcaagatgaacacaaacaagatttgatttgtttgtccaatactcaaaccaatgaatcggttaagcccaatggagttctaggccaaatcttatttgatgtttatattccgaagaatgttgaggattgggatataaagctatcagaaaccgggcggtctaggcggagaccggggaagagatttatacgtagatcgagattgtaacatctgagttatatattatatataccatgagtacccatttgttttcttcagatactgttgcagaggtattccatttggttttccctcgcaaagattaataaattaataaaataagatcttttttgct

SEQ ID NO: 1375 - protein, 435 aa, Arabidopsis thaliana
  peptide (1)..(435): Ceres Seq. ID no. 13500061
  misc_feature (128)..(411): Pfam Name: DUF829 Pfam Description: Eukaryotic protein of unknown function
  misc_feature (33)..(435): NCBI GI NO: 15241450 NR Description: expressed protein [Arabidopsis thaliana]
  misc_feature (37)..(416): NCBI GI NO: 18397898 NR Description: expressed protein [Arabidopsis thaliana]
  misc_feature (37)..(416): NCBI GI NO: 25411656 NR Description: hypothetical protein At2g15690
ALSLLCQQPSSIEDFFNHLLHNKKITLIYTENMWGIGGNYYWRKKNNNGGESEAIVVVFAWMSSEERNLKNHVDLYSSLLWDSLVCHSQFLNMFLPDKAADLASNVVSELVKELKAKPVPLVFASFSGGPNACMYKVLQILEGTCETGLNPDDCRLVRNCISGFIYDSCPVDFTSDLGARLAVHPTTLKMSSPPKPFVWAANGIASSLDYVFLNRFESQRAEYWQTLYSTIIMRVPYLILCSENDDLAPYQTIHNFATRLQELGGNVKLVKWNDSPHCGHYRYNQVDYKAAVSEFLSKAASVYSQKTRSLDREAMKGTCHDEITEPIQSLGQSTSGLNRSFNGTPLVTTDHFFVPSTVGYYVGRDGGYVQDEHKQDLICLSNTQTNESVKPNGVLGQILFDVYIPKNVEDWDIKLSETGRSRRRPGKRFIRRSRL

SEQ ID NO: 1376 - protein, 403 aa, Arabidopsis thaliana
  peptide (1)..(403): Ceres Seq. ID no. 13500062
  misc_feature (96)..(379): Pfam Name: DUF829 Pfam Description: Eukaryotic protein of unknown function
  misc_feature (1)..(403): NCBI GI NO: 15241450 NR Description: expressed protein [Arabidopsis thaliana]
  misc_feature (5)..(384): NCBI GI NO: 18397898 NR Description: expressed protein [Arabidopsis thaliana]
  misc_feature (5)..(384): NCBI GI NO: 25411656 NR Description: hypothetical protein At2g15690
MWGIGGNYYWRKKNNNGGESEAIVVVFAWMSSEERNLKNHVDLYSSLLWDSLVCHSQFLNMFLPDKAADLASNVVSELVKELKAKPVPLVFASFSGGPNACMYKVLQILEGTCETGLNPDDCRLVRNCISGFIYDSCPVDFTSDLGARLAVHPTTLKMSSPPKPFVWAANGIASSLDYVFLNRFESQRAEYWQTLYSTIIMRVPYLILCSENDDLAPYQTIHNFATRLQELGGNVKLVKWNDSPHCGHYRYNQVDYKAAVSEFLSKAASVYSQKTRSLDREAMKGTCHDEITEPIQSLGQSTSGLNRSFNGTPLVTTDHFFVPSTVGYYVGRDGGYVQDEHKQDLICLSNTQTNESVKPNGVLGQILFDVYIPKNVEDWDIKLSETGRSRRRPGKRFIRRSRL

SEQ ID NO: 1377 - protein, 374 aa, Arabidopsis thaliana
  peptide (1)..(374): Ceres Seq. ID no. 13500063
  misc_feature (67)..(350): Pfam Name: DUF829 Pfam Description: Eukaryotic protein of unknown function
  misc_feature (1)..(374): NCBI GI NO: 15241450 NR Description: expressed protein [Arabidopsis thaliana]
  misc_feature (1)..(355): NCBI GI NO: 18397898 NR Description: expressed protein [Arabidopsis thaliana]
  misc_feature (1)..(355): NCBI GI NO: 25411656 NR Description: hypothetical protein At2g15690
MSSEERNLKNHVDLYSSLLWDSLVCHSQFLNMFLPDKAADLASNVVSELVKELKAKPVPLVFASFSGGPNACMYKVLQILEGTCETGLNPDDCRLVRNCISGFIYDSCPVDFTSDLGARLAVHPTTLKMSSPPKPFVWAANGIASSLDYVFLNRFESQRAEYWQTLYSTIIMRVPYLILCSENDDLAPYQTIHNFATRLQELGGNVKLVKWNDSPHCGHYRYNQVDYKAAVSEFLSKAASVYSQKTRSLDREAMKGTCHDEITEPIQSLGQSTSGLNRSFNGTPLVTTDHFFVPSTVGYYVGRDGGYVQDEHKQDLICLSNTQTNESVKPNGVLGQILFDVYIPKNVEDWDIKLSETGRSRRRPGKRFIRRSRL

SEQ ID NO: 1378 - DNA, 1172 bp, Arabidopsis thaliana
  misc_feature (1)..(1172): Ceres Seq. ID no. 13497451
gtcttcaacgttcggctaatccttggtccgtgctaagatcttagatcgatttctaaagtcttcgtcttcttcttcttctgataactagatttttcaatcttctgaagctttaattttttcatagccatggctaatcgttatgatccaaatcctttcgctgaggaagaagaagtcaatcctttcgctaatgctagaggagttccacctgcgtcgaattcgagactttcgcctttgcctccagagcctgttggtttcgattatggtcgaaccgtagacattcctcttgacagagctggtacacaggatttgaagaagaaagagaaggaactccaagccaaagaagctgagctaaaacgacgagagcaggacctcaaacggaaagaagatgctgctgcacgagctggaatcgttatcgaagtgaaaaactggccgcctttcttcccgcttatccaccatgatattgcaaatgaaattccggttcatctccaaagactacagtatgttacctttgcaacgtatttggggttggttctttgtcttttctggaatatcatcgccgttactacagcttggatcaaaggagaaggagtgacgatatggcttcttgccttaatttacttcatagcgggtgttccaggaggctatgtgttatggtatcgaccactctaccgtgccttcagaactgatagtgcattgagctttggatggtttttcttgttctatatgctccacattgctttctgcgtctttgctgcagttgctccacctgtcgtcttcaaaggaaaatctcttgctgggatcttacctgcaatagatgtcttaagcggtcaagcaattgttgggatattctacttcattgggtttgcatttttctgcctcgaatcagtggttagcatctgggttatacagcaagtgtatatgtacttccgaggcagcgggaaacaagatcaaatgagacgggaagcagcgagaggagccttgagagccgctgtttgagagttctccttgtaacattctggtttgtgtatgcactgtttcttttttcagattttcttgaagtctctctctctctctctctctctgctctataaacaaaaaaaaaaaaatttaatttttcctttgtacctttatgtcatgtaaatttgtttgttcaaaaatcagagttcagattc

SEQ ID NO: 1379 - protein, 289 aa, Arabidopsis thaliana
  peptide (1)..(289): Ceres Seq. ID no. 13497452
  misc_feature (97)..(271): Pfam Name: Pfam Description:  SCAMP family
  misc_feature (1)..(289): NCBI GI NO: 15219893 NR Description: secretory carrier membrane protein
  misc_feature (1)..(289): NCBI GI NO: 15220305 NR Description: secretory carrier membrane protein -related
  misc_feature (3)..(289): NCBI GI NO: 15226410 NR Description: secretory carrier-associated membrane protein -related
  misc_feature (1)..(288): NCBI GI NO: 7109232 NR Description: secretory carrier membrane protein [Oryza sativa]
  misc_feature (1)..(289): NCBI GI NO: 3941289 NR Description: similarity to SCAMP37 [Pisum sativum]
  misc_feature (1)..(289): NCBI GI NO: 25402653 NR Description: hypothetical protein
  misc_feature (1)..(136): NCBI GI NO: 25404319 NR Description: hypothetical protein F11P17.4
  misc_feature (201)..(261): NCBI GI NO: 25404319 NR Description: hypothetical protein F11P17.4
  misc_feature (4)..(289): NCBI GI NO: 18379111 NR Description: expressed protein [Arabidopsis thaliana]
  misc_feature (21)..(288): NCBI GI NO: 34899754 NR Description: putative secretory carrier membrane protein
MANRYDPNPFAEEEEVNPFANARGVPPASNSRLSPLPPEPVGFDYGRTVDIPLDRAGTQDLKKKEKELQAKEAELKRREQDLKRKEDAAARAGIVIEVKNWPPFFPLIHHDIANEIPVHLQRLQYVTFATYLGLVLCLFWNIIAVTTAWIKGEGVTIWLLALIYFIAGVPGGYVLWYRPLYRAFRTDSALSFGWFFLFYMLHIAFCVFAAVAPPVVFKGKSLAGILPAIDVLSGQAIVGIFYFIGFAFFCLESVVSIWVIQQVYMYFRGSGKQDQMRREAARGALRAAV

SEQ ID NO: 1380 - DNA, 1232 bp, Arabidopsis thaliana
  misc_feature (1)..(1232): Ceres Seq. ID no. 13504878
atgttgtcttcaacctcacccacactttcttcggtctcatccttttataaaatccccatttcctctaacgatttttcgcctctctctctctctctctctctctctctctttcttctatcttctccgtcatcgttctctctctctcctctcccggagatttttactcaggcgttcttctgtggatcagaggtgaaaaagatgaatcattgcaaccttcagcagaacgccttcatgtctcgtgaggagatgatgggatttgaccgtaaggatcttgttgtttgtcctaagcctcgacgtgttggtttactcgccaacaacgttattcgtcctcttagattacatatgagtcaagctgcagccgacttgtgtgattctaaagctggtgctgagcttttggaaatcattcgtagaaaggaggataatggaacaatagggcagttactatcatcatccccaccgtattttcccggttcaccaccgagtagagcggcgaacccattagcccaagatgctcgttttcgagatgagaaactcaatccaatctcaccaaactctcctttccttcagccatattcggcaaccgggtttccatctccatcttcttcctcatcatcgtcgtcttcccgtggttgtgttagaatgaaatttggactcaactcgcctgcagttagagtagaaggatttgattgcttgaaccgtgaccgtcaaaactcgagcatccctgccatggcttagtagacaaacaacaaaaaaacaagtgtacatagagattccggaatcgttcgttcgccaatgcctaacagaggaggatttgattactactgctgcaactattactactaccatttttgaaagtaaatgaatatgtttttgtttttcatcttctcctaagagagagagagagggaagaggaaggaggaagatgaagatcagttaccgtcgccggtcaccgtttaactgttttattcaggttagtgtttgtatataaagatgcagtatttaaaagaagagtcgaatctatgtattcgtttggtgtttttctgggtcgggcggatctttagtactgtttcatatataactaagagggaagattagaagatgaagaagctgtaaaattttcttgggaagaaaactctggtttctatcttctcgttgtaatatagataatcaacttggatttatcttctttcagattcaccattgtatatagtaatgtttatttttcttggtgc

SEQ ID NO: 1381 - protein, 244 aa, Arabidopsis thaliana
  peptide (1)..(244): Ceres Seq. ID no. 13504879
  misc_feature (1)..(244): NCBI GI NO: 30685676 NR Description: expressed protein [Arabidopsis thaliana]
  misc_feature (67)..(244): NCBI GI NO: 11762168 NR Description: AT5g16110 [Arabidopsis thaliana]
  misc_feature (67)..(244): NCBI GI NO: 18409044 NR Description: expressed protein [Arabidopsis thaliana]
  misc_feature (67)..(244): NCBI GI NO: 18396232 NR Description: expressed protein [Arabidopsis thaliana]
  misc_feature (67)..(244): NCBI GI NO: 15222278 NR Description: expressed protein [Arabidopsis thaliana]
MLSSTSPTLSSVSSFYKIPISSNDFSPLSLSLSLSLFLLSSPSSFSLSPLPEIFTQAFFCGSEVKKMNHCNLQQNAFMSREEMMGFDRKDLVVCPKPRRVGLLANNVIRPLRLHMSQAAADLCDSKAGAELLEIIRRKEDNGTIGQLLSSSPPYFPGSPPSRAANPLAQDARFRDEKLNPISPNSPFLQPYSATGFPSPSSSSSSSSSRGCVRMKFGLNSPAVRVEGFDCLNRDRQNSSIPAMA

SEQ ID NO: 1382 - protein, 178 aa, Arabidopsis thaliana
  peptide (1)..(178): Ceres Seq. ID no. 13504880
  misc_feature (1)..(178): NCBI GI NO: 30685676 NR Description: expressed protein [Arabidopsis thaliana]
  misc_feature (1)..(178): NCBI GI NO: 11762168 NR Description: AT5g16110 [Arabidopsis thaliana]
  misc_feature (1)..(178): NCBI GI NO: 18409044 NR Description: expressed protein [Arabidopsis thaliana]
  misc_feature (1)..(178): NCBI GI NO: 18396232 NR Description: expressed protein [Arabidopsis thaliana]
  misc_feature (1)..(178): NCBI GI NO: 15222278 NR Description: expressed protein [Arabidopsis thaliana]
MNHCNLQQNAFMSREEMMGFDRKDLVVCPKPRRVGLLANNVIRPLRLHMSQAAADLCDSKAGAELLEIIRRKEDNGTIGQLLSSSPPYFPGSPPSRAANPLAQDARFRDEKLNPISPNSPFLQPYSATGFPSPSSSSSSSSSRGCVRMKFGLNSPAVRVEGFDCLNRDRQNSSIPAMA

SEQ ID NO: 1383 - protein, 167 aa, Arabidopsis thaliana
  peptide (1)..(167): Ceres Seq. ID no. 13504881
  misc_feature (1)..(167): NCBI GI NO: 30685676 NR Description: expressed protein [Arabidopsis thaliana]
  misc_feature (1)..(167): NCBI GI NO: 11762168 NR Description: AT5g16110 [Arabidopsis thaliana]
  misc_feature (1)..(167): NCBI GI NO: 18409044 NR Description: expressed protein [Arabidopsis thaliana]
  misc_feature (1)..(167): NCBI GI NO: 18396232 NR Description: expressed protein [Arabidopsis thaliana]
  misc_feature (1)..(167): NCBI GI NO: 15222278 NR Description: expressed protein [Arabidopsis thaliana]
MSREEMMGFDRKDLVVCPKPRRVGLLANNVIRPLRLHMSQAAADLCDSKAGAELLEIIRRKEDNGTIGQLLSSSPPYFPGSPPSRAANPLAQDARFRDEKLNPISPNSPFLQPYSATGFPSPSSSSSSSSSRGCVRMKFGLNSPAVRVEGFDCLNRDRQNSSIPAMA

SEQ ID NO: 1384 - DNA, 1549 bp, Arabidopsis thaliana
  misc_feature (1)..(1549): Ceres Seq. ID no. 12321430
atatataagctccaggtcttgtacatcttcatcatctgatctcggggaagctccgatctgagtttttttttagcaatggcgaaaatgattcctagcctcgtctctctaattcttatcggtcttgttgcgatcgcctccgccgcagttattttcgaggagcgctttgatgatggctgggagaacagatgggttaaatctgagtggaagaaggatgataacactgctggggagtggaagcacactgcgggaaattggtctggtgacgctaacgataaaggtatccagaccagtgaagactacagattctacgccatttcagctgagttccctgaattcagtaacaaggacaagaccttagtcttccaattctcagtcaagcacgagcaaaagcttgactgcggtggtggctacatgaagctactaagtggtgatgttgaccaaaagaaatttggtggagacacaccatacagtatcatgtttggtcctgatatctgtggctacagcacaaagaaagtgcatgctatccttacctataatgaagccaaccacctgatcaagaaagatgttccatgtgaaactgaccagctcacccatgtgtacacatttatcctccgcccagatgctacttacagcattctcatcgacaatgttgagaaacaaactggtagcctttactctgactgggatcttctcccacccaagaagatcaaggaccccagcgccaagaagcctgaggactgggacgaacaagaatacatttctgaccctgaagacaagaaacctgacggttacgatgatatccctaaggagatcccagacaccgactcaaagaagcctgaggactgggatgatgaagaagatggtgagtggactgccccaacaatccccaaccctgagtacatgggtgaatggaagcctaagcaaatcaagaaccccaactacaagggcaagtgggaggctccattgattgacaaccctgacttcaaggatgacccagagctctacgtcttccccaagctgaaatatgttggactcgaattgtggcaggtgaaatcaggatcattgttcgacaatgtcttgatctgcgatgacccagactatgccaagaagttggcagatgaaacatggggaaagctcaaggatgcggagaaagcagctttcgatgaggctgagaagaagaatgaggaagaggaatccaaggacgcacctgcggaatctgatgctgaagacgaaccagaggatgatgaaggaggagatgattccgattctgaatctaaggccgaggagaccaaatcagtagatagcgaggaaacctctgagaaagacgccaccgctcatgatgagctataggtgaaaggttgaagatttgaagaccaaagttttcagtctctttattgttttatcgttttcttttgaagtattttagcatctagtttgtcggagatagaaacaagttttagcaaaactaaaagggggatacaatgtctgtcagatgctcattttagactttaaaaaaccatgaagaagttttgcagttgcttctctttcg

SEQ ID NO: 1385 - protein, 424 aa, Arabidopsis thaliana
  peptide (1)..(424): Ceres Seq. ID no. 12321431
  misc_feature (24)..(336): Pfam Name: Pfam Description:  Calreticulin family
  misc_feature (1)..(424): NCBI GI NO: 15217459 NR Description: putative calcium-binding protein, calreticulin
  misc_feature (1)..(424): NCBI GI NO: 21555174 NR Description: putative calcium-binding protein, calreticulin
  misc_feature (1)..(424): NCBI GI NO: 12643243 NR Description: CALRETICULIN 2 PRECURSOR
  misc_feature (1)..(421): NCBI GI NO: 25295763 NR Description: hypothetical protein
  misc_feature (18)..(424): NCBI GI NO: 1009712 NR Description: calreticulin
  misc_feature (1)..(424): NCBI GI NO: 15223517 NR Description: calreticulin (crt1); protein id: At1g56340
  misc_feature (1)..(415): NCBI GI NO: 24417462 NR Description: unknown [Arabidopsis thaliana]
  misc_feature (88)..(424): NCBI GI NO: 7441500 NR Description: probable calreticulin - rape
  misc_feature (1)..(424): NCBI GI NO: 11131904 NR Description: Calreticulin precursor
  misc_feature (6)..(424): NCBI GI NO: 11131745 NR Description: Calreticulin precursor
MAKMIPSLVSLILIGLVAIASAAVIFEERFDDGWENRWVKSEWKKDDNTAGEWKHTAGNWSGDANDKGIQTSEDYRFYAISAEFPEFSNKDKTLVFQFSVKHEQKLDCGGGYMKLLSGDVDQKKFGGDTPYSIMFGPDICGYSTKKVHAILTYNEANHLIKKDVPCETDQLTHVYTFILRPDATYSILIDNVEKQTGSLYSDWDLLPPKKIKDPSAKKPEDWDEQEYISDPEDKKPDGYDDIPKEIPDTDSKKPEDWDDEEDGEWTAPTIPNPEYMGEWKPKQIKNPNYKGKWEAPLIDNPDFKDDPELYVFPKLKYVGLELWQVKSGSLFDNVLICDDPDYAKKLADETWGKLKDAEKAAFDEAEKKNEEEESKDAPAESDAEDEPEDDEGGDDSDSESKAEETKSVDSEETSEKDATAHDEL

SEQ ID NO: 1386 - protein, 421 aa, Arabidopsis thaliana
  peptide (1)..(421): Ceres Seq. ID no. 12321432
  misc_feature (21)..(333): Pfam Name: Pfam Description:  Calreticulin family
  misc_feature (1)..(421): NCBI GI NO: 15217459 NR Description: putative calcium-binding protein, calreticulin
  misc_feature (1)..(421): NCBI GI NO: 21555174 NR Description: putative calcium-binding protein, calreticulin
  misc_feature (1)..(421): NCBI GI NO: 12643243 NR Description: CALRETICULIN 2 PRECURSOR
  misc_feature (1)..(418): NCBI GI NO: 25295763 NR Description: hypothetical protein
  misc_feature (15)..(421): NCBI GI NO: 1009712 NR Description: calreticulin
  misc_feature (1)..(421): NCBI GI NO: 15223517 NR Description: calreticulin (crt1); protein id: At1g56340
  misc_feature (1)..(412): NCBI GI NO: 24417462 NR Description: unknown [Arabidopsis thaliana]
  misc_feature (85)..(421): NCBI GI NO: 7441500 NR Description: probable calreticulin - rape
  misc_feature (1)..(421): NCBI GI NO: 11131904 NR Description: Calreticulin precursor
  misc_feature (3)..(421): NCBI GI NO: 11131745 NR Description: Calreticulin precursor
MIPSLVSLILIGLVAIASAAVIFEERFDDGWENRWVKSEWKKDDNTAGEWKHTAGNWSGDANDKGIQTSEDYRFYAISAEFPEFSNKDKTLVFQFSVKHEQKLDCGGGYMKLLSGDVDQKKFGGDTPYSIMFGPDICGYSTKKVHAILTYNEANHLIKKDVPCETDQLTHVYTFILRPDATYSILIDNVEKQTGSLYSDWDLLPPKKIKDPSAKKPEDWDEQEYISDPEDKKPDGYDDIPKEIPDTDSKKPEDWDDEEDGEWTAPTIPNPEYMGEWKPKQIKNPNYKGKWEAPLIDNPDFKDDPELYVFPKLKYVGLELWQVKSGSLFDNVLICDDPDYAKKLADETWGKLKDAEKAAFDEAEKKNEEEESKDAPAESDAEDEPEDDEGGDDSDSESKAEETKSVDSEETSEKDATAHDEL

SEQ ID NO: 1387 - protein, 312 aa, Arabidopsis thaliana
  peptide (1)..(312): Ceres Seq. ID no. 12321433
  misc_feature (1)..(224): Pfam Name: Pfam Description:  Calreticulin family
  misc_feature (1)..(312): NCBI GI NO: 15217459 NR Description: putative calcium-binding protein, calreticulin
  misc_feature (1)..(312): NCBI GI NO: 21555174 NR Description: putative calcium-binding protein, calreticulin
  misc_feature (1)..(312): NCBI GI NO: 12643243 NR Description: CALRETICULIN 2 PRECURSOR
  misc_feature (1)..(309): NCBI GI NO: 25295763 NR Description: hypothetical protein
  misc_feature (1)..(312): NCBI GI NO: 1009712 NR Description: calreticulin
  misc_feature (1)..(312): NCBI GI NO: 15223517 NR Description: calreticulin (crt1); protein id: At1g56340
  misc_feature (1)..(303): NCBI GI NO: 24417462 NR Description: unknown [Arabidopsis thaliana]
  misc_feature (1)..(312): NCBI GI NO: 7441500 NR Description: probable calreticulin - rape
  misc_feature (1)..(312): NCBI GI NO: 11131904 NR Description: Calreticulin precursor
  misc_feature (1)..(312): NCBI GI NO: 11131745 NR Description: Calreticulin precursor
MKLLSGDVDQKKFGGDTPYSIMFGPDICGYSTKKVHAILTYNEANHLIKKDVPCETDQLTHVYTFILRPDATYSILIDNVEKQTGSLYSDWDLLPPKKIKDPSAKKPEDWDEQEYISDPEDKKPDGYDDIPKEIPDTDSKKPEDWDDEEDGEWTAPTIPNPEYMGEWKPKQIKNPNYKGKWEAPLIDNPDFKDDPELYVFPKLKYVGLELWQVKSGSLFDNVLICDDPDYAKKLADETWGKLKDAEKAAFDEAEKKNEEEESKDAPAESDAEDEPEDDEGGDDSDSESKAEETKSVDSEETSEKDATAHDEL

SEQ ID NO: 1388 - DNA, 1193 bp, Arabidopsis thaliana
  misc_feature (1)..(1193): Ceres Seq. ID no. 12321426
acacttcactccaacgtgaaacctgcaaactgaacttatctcttcatattttctttagcttctcttaattttacacttagggttttcaaaccagtagagagagagagaagtgtgtaagagcgatgatgcagactccgtacactacttcaacgcaggggcaatattgtcattcttgtggaatgttccaccaccatagccaaagctgctgctacaacaacaacaacaactccaacgccggttcttactcgatggtcttctccatgcaaaacggtggcgttttcgagcagaacggtgaggactatcatcactcttcctccctcgttgactgcactctctctcttggaactccttctacgaggctttgtgaggaagatgagaaacgtagacgctctacttcatctggtgcttcttcttgcatctccaacttttgggacttgattcacaccaaaaacaacaactccaaaacggcaccgtacaataacgttccttctttctccgctaacaagccaagtcgcggttgttccggtggtggtgatggcggaggaggcggtggcggaggtgactctcttctcgctagacgctgtgccaactgtgacactacttctactccactatggaggaatggtcctagaggccctaagtccctatgcaacgcatgcggcattcgtttcaagaaggaagagagaagaactactgcggcttcaggaaacaccgtcgtcggagctgcaccggttcaaaccgaccagtacgggcatcacaactctggctacaataattaccatgctgccactaataacaacaataataatggtactccgtgggctcatcaccactcgacgcagagggttccgtgtaattatccggcaaatgagatcaggttcatggatgattacggcagtggagtagcaaacaacgttgaatccgacggtgctcacggcggtgttccgttcctttcttggaggcttaatgtagcggatagggcaagtcttgtccatgactttaccagatgaaaggagaatagaaaacgacgttagattctcttaaaatttccatgtggtttaattatgtctaattaaaaaaaaaccaagaaaatatttctgaaaaaaaatagaagtgtatatcgagagacgatgttgatgtttattgatagtgacggtctaacttatggtttatctataaagtaccgttctggc

SEQ ID NO: 1389 - protein, 295 aa, Arabidopsis thaliana
  peptide (1)..(295): Ceres Seq. ID no. 12321427
  misc_feature (2)..(295): NCBI GI NO: 21555178 NR Description: transcription factor-like protein
  misc_feature (1)..(295): NCBI GI NO: 18409199 NR Description: GATA zinc finger protein; protein id: At3g50870
  misc_feature (2)..(295): NCBI GI NO: 7488381 NR Description: transcription factor homolog F18B3
  misc_feature (137)..(294): NCBI GI NO: 15234463 NR Description: GATA zinc finger protein; protein id: At4g36620.1
  misc_feature (43)..(127): NCBI GI NO: 15234463 NR Description: GATA zinc finger protein; protein id: At4g36620.1
  misc_feature (144)..(253): NCBI GI NO: 15224164 NR Description: GATA zinc finger protein; protein id: At2g18380.1
  misc_feature (35)..(118): NCBI GI NO: 15224164 NR Description: GATA zinc finger protein; protein id: At2g18380.1
  misc_feature (122)..(194): NCBI GI NO: 34912080 NR Description: P0671D01.19
  misc_feature (23)..(173): NCBI GI NO: 5091599 NR Description: 10A19I.2 [Oryza sativa]
  misc_feature (173)..(202): NCBI GI NO: 5091599 NR Description: 10A19I.2 [Oryza sativa]
MMQTPYTTSTQGQYCHSCGMFHHHSQSCCYNNNNNSNAGSYSMVFSMQNGGVFEQNGEDYHHSSSLVDCTLSLGTPSTRLCEEDEKRRRSTSSGASSCISNFWDLIHTKNNNSKTAPYNNVPSFSANKPSRGCSGGGDGGGGGGGGDSLLARRCANCDTTSTPLWRNGPRGPKSLCNACGIRFKKEERRTTAASGNTVVGAAPVQTDQYGHHNSGYNNYHAATNNNNNNGTPWAHHHSTQRVPCNYPANEIRFMDDYGSGVANNVESDGAHGGVPFLSWRLNVADRASLVHDFTR

SEQ ID NO: 1390 - protein, 294 aa, Arabidopsis thaliana
  peptide (1)..(294): Ceres Seq. ID no. 12321428
  misc_feature (1)..(294): NCBI GI NO: 21555178 NR Description: transcription factor-like protein
  misc_feature (1)..(294): NCBI GI NO: 18409199 NR Description: GATA zinc finger protein; protein id: At3g50870
  misc_feature (1)..(294): NCBI GI NO: 7488381 NR Description: transcription factor homolog F18B3
  misc_feature (136)..(293): NCBI GI NO: 15234463 NR Description: GATA zinc finger protein; protein id: At4g36620.1
  misc_feature (42)..(126): NCBI GI NO: 15234463 NR Description: GATA zinc finger protein; protein id: At4g36620.1
  misc_feature (143)..(252): NCBI GI NO: 15224164 NR Description: GATA zinc finger protein; protein id: At2g18380.1
  misc_feature (34)..(117): NCBI GI NO: 15224164 NR Description: GATA zinc finger protein; protein id: At2g18380.1
  misc_feature (121)..(193): NCBI GI NO: 34912080 NR Description: P0671D01.19
  misc_feature (22)..(172): NCBI GI NO: 5091599 NR Description: 10A19I.2 [Oryza sativa]
  misc_feature (172)..(201): NCBI GI NO: 5091599 NR Description: 10A19I.2 [Oryza sativa]
MQTPYTTSTQGQYCHSCGMFHHHSQSCCYNNNNNSNAGSYSMVFSMQNGGVFEQNGEDYHHSSSLVDCTLSLGTPSTRLCEEDEKRRRSTSSGASSCISNFWDLIHTKNNNSKTAPYNNVPSFSANKPSRGCSGGGDGGGGGGGGDSLLARRCANCDTTSTPLWRNGPRGPKSLCNACGIRFKKEERRTTAASGNTVVGAAPVQTDQYGHHNSGYNNYHAATNNNNNNGTPWAHHHSTQRVPCNYPANEIRFMDDYGSGVANNVESDGAHGGVPFLSWRLNVADRASLVHDFTR

SEQ ID NO: 1391 - protein, 276 aa, Arabidopsis thaliana
  peptide (1)..(276): Ceres Seq. ID no. 12321429
  misc_feature (1)..(276): NCBI GI NO: 21555178 NR Description: transcription factor-like protein
  misc_feature (1)..(276): NCBI GI NO: 18409199 NR Description: GATA zinc finger protein; protein id: At3g50870
  misc_feature (1)..(276): NCBI GI NO: 7488381 NR Description: transcription factor homolog F18B3
  misc_feature (118)..(275): NCBI GI NO: 15234463 NR Description: GATA zinc finger protein; protein id: At4g36620.1
  misc_feature (24)..(108): NCBI GI NO: 15234463 NR Description: GATA zinc finger protein; protein id: At4g36620.1
  misc_feature (125)..(234): NCBI GI NO: 15224164 NR Description: GATA zinc finger protein; protein id: At2g18380.1
  misc_feature (16)..(99): NCBI GI NO: 15224164 NR Description: GATA zinc finger protein; protein id: At2g18380.1
  misc_feature (103)..(175): NCBI GI NO: 34912080 NR Description: P0671D01.19
  misc_feature (4)..(154): NCBI GI NO: 5091599 NR Description: 10A19I.2 [Oryza sativa]
  misc_feature (154)..(183): NCBI GI NO: 5091599 NR Description: 10A19I.2 [Oryza sativa]
MFHHHSQSCCYNNNNNSNAGSYSMVFSMQNGGVFEQNGEDYHHSSSLVDCTLSLGTPSTRLCEEDEKRRRSTSSGASSCISNFWDLIHTKNNNSKTAPYNNVPSFSANKPSRGCSGGGDGGGGGGGGDSLLARRCANCDTTSTPLWRNGPRGPKSLCNACGIRFKKEERRTTAASGNTVVGAAPVQTDQYGHHNSGYNNYHAATNNNNNNGTPWAHHHSTQRVPCNYPANEIRFMDDYGSGVANNVESDGAHGGVPFLSWRLNVADRASLVHDFTR

SEQ ID NO: 1392 - DNA, 1046 bp, Arabidopsis thaliana
  misc_feature (1)..(1046): Ceres Seq. ID no. 12322806
acataaaacaaaaggtacagtatataccataaatctccgagattcttttgatgtatctgtccatttcattattacacaaactaggaaactgatatctctctattcacattcctctgattctatttctctttatatatattcacccattaaccatctcaatcttataaccctcaaaatcacaatcttctcttacaaaaaactttgaaagatgaagattcttctagcatcattgtgtttgatcagtcttctcgtaatcttgccttctgtcttctctgcttcttcttcctctgaagattttgatttcttctacttcgtccaacaatggccaggatcatactgtgacacacagaagaagtgttgttatccaaattcaggcaaaccagctgctgattttggcattcatggtctttggcctaactacaaagatggaacttatccatctaactgtgatgcctctaaaccattcgatagctcaacgatatcagatcttctcacttcaatgaagaagagctggccaacactggcttgcccaagcggttcaggtgaagcgttttgggagcacgaatgggagaagcatggtacttgctctgaatcggttatcgatcaacatgaatatttccaaaccgctcttaaccttaaacagaaaaccaatctccttggagctctaaccaaagccgggattaatccggatggaaaatcttactctttggagagcataagagattcgataaaagagtcaattggtttcactccttgggttgagtgtaacagagatggttctggtaatagccaattgtaccaagtctatctttgtgttgaccggtctggttccggtttaatcgaatgtccggttttcccacatgggaaatgtggagctgagatcgaattcccttctttttagtttccaatttctaaattcagtctcttgaaccggcatcgatcttttgttcatggagattggtttggtcaaaaagaagatttaatgtaataaaaatttatgggatattggataatgatatagttcaatttcaataatattctacgtt

SEQ ID NO: 1393 - protein, 230 aa, Arabidopsis thaliana
  peptide (1)..(230): Ceres Seq. ID no. 12322807
  misc_feature (30)..(219): Pfam Name: Pfam Description:  Ribonuclease T2 family
  misc_feature (1)..(230): NCBI GI NO: 15227068 NR Description: ribonuclease, RNS1; protein id: At2g02990
  misc_feature (1)..(230): NCBI GI NO: 21555182 NR Description: ribonuclease, RNS1 [Arabidopsis thaliana]
  misc_feature (10)..(230): NCBI GI NO: 3860325 NR Description: ribonuclease T2 [Cicer arietinum]
  misc_feature (7)..(230): NCBI GI NO: 9081845 NR Description: S-like ribonuclease [Prunus dulcis]
  misc_feature (6)..(230): NCBI GI NO: 1710615 NR Description: Extracellular ribonuclease LE precursor (RNase LE)
  misc_feature (10)..(230): NCBI GI NO: 532754 NR Description: RNase NE [Nicotiana alata]
  misc_feature (10)..(230): NCBI GI NO: 2148018 NR Description: ribonuclease II (EC 3
  misc_feature (24)..(230): NCBI GI NO: 10120506 NR Description: Chain A, Crystal Structure Of Rnase Le
  misc_feature (10)..(230): NCBI GI NO: 31621002 NR Description: ribonuclease NW [Nicotiana glutinosa]
  misc_feature (14)..(230): NCBI GI NO: 7435266 NR Description: ribonuclease M5 (EC 3
MKILLASLCLISLLVILPSVFSASSSSEDFDFFYFVQQWPGSYCDTQKKCCYPNSGKPAADFGIHGLWPNYKDGTYPSNCDASKPFDSSTISDLLTSMKKSWPTLACPSGSGEAFWEHEWEKHGTCSESVIDQHEYFQTALNLKQKTNLLGALTKAGINPDGKSYSLESIRDSIKESIGFTPWVECNRDGSGNSQLYQVYLCVDRSGSGLIECPVFPHGKCGAEIEFPSF

SEQ ID NO: 1394 - protein, 133 aa, Arabidopsis thaliana
  peptide (1)..(133): Ceres Seq. ID no. 12322808
  misc_feature (1)..(122): Pfam Name: Pfam Description:  Ribonuclease T2 family
  misc_feature (1)..(133): NCBI GI NO: 15227068 NR Description: ribonuclease, RNS1; protein id: At2g02990
  misc_feature (1)..(133): NCBI GI NO: 21555182 NR Description: ribonuclease, RNS1 [Arabidopsis thaliana]
  misc_feature (1)..(133): NCBI GI NO: 3860325 NR Description: ribonuclease T2 [Cicer arietinum]
  misc_feature (1)..(133): NCBI GI NO: 9081845 NR Description: S-like ribonuclease [Prunus dulcis]
  misc_feature (1)..(133): NCBI GI NO: 1710615 NR Description: Extracellular ribonuclease LE precursor (RNase LE)
  misc_feature (1)..(133): NCBI GI NO: 532754 NR Description: RNase NE [Nicotiana alata]
  misc_feature (1)..(133): NCBI GI NO: 2148018 NR Description: ribonuclease II (EC 3
  misc_feature (1)..(133): NCBI GI NO: 10120506 NR Description: Chain A, Crystal Structure Of Rnase Le
  misc_feature (1)..(133): NCBI GI NO: 31621002 NR Description: ribonuclease NW [Nicotiana glutinosa]
  misc_feature (1)..(133): NCBI GI NO: 7435266 NR Description: ribonuclease M5 (EC 3
MKKSWPTLACPSGSGEAFWEHEWEKHGTCSESVIDQHEYFQTALNLKQKTNLLGALTKAGINPDGKSYSLESIRDSIKESIGFTPWVECNRDGSGNSQLYQVYLCVDRSGSGLIECPVFPHGKCGAEIEFPSF

SEQ ID NO: 1395 - DNA, 1070 bp, Arabidopsis thaliana
  misc_feature (1)..(1070): Ceres Seq. ID no. 12338220
acatttttcacgtctccgacaacttcttcttctccaacccaaattcctctcttctcaacctcgtcctctccgttctcctcctccaacatttctccgatcattgatgggttcgtcttcttctttctcctcttcttcctcgaagcttctctttcgtcaactctttgagaacgaatcttccacctttacttatcttctcgccgacgtttctcatcctgataaacctgctttgttgattgatccggtggacaagactgtggatagagacttgaaactgattgatgagttaggattaaagcttatctatgctatgaacactcatgttcatgctgatcatgtcactggtactggacttcttaagacgaagctcccgggtgtgaaatccgttatttcgaaagcaagtggttccaaagctgatttgtttcttgaacctggtgacaaagtatctattggtgatatataccttgaggttcgtgctacacctggacacactacaggatgtgttacatatgtgactggtgaaggagctgatcagccccaaccaagaatggcttttaccggggatgctgtactcatccgtggttgtgggaggactgactttcagggaggaagctcagatcaactctacgagtctgtacattcacagatattttcattgccaaaggacacattgatctatccagctcacgactacaaaggtttcgaggtaagtacagttggagaagagatgcaacacaacccgcgtctaactaaagataaagaaacattcaaaaccattatgtcaaatctgaatctgtcgtatccgaagatgattgatgttgcagtaccagcaaatatggtctgtgggttacaagatgtgccttctcaagccaactaaaaaaaactcttacatataatgtttgtctttttatcgatgtcattctatatttaccaaagccaataaaaactcttgagagtaatttctacaataagatttgcttccgttgtagataagttcattagaaaattgtgtaaattagattgaacatgtggaatttgttatgaagatgaagacagtatttgcgtgttcgact

SEQ ID NO: 1396 - protein, 290 aa, Arabidopsis thaliana
  peptide (1)..(290): Ceres Seq. ID no. 12338221
  misc_feature (59)..(228): Pfam Name: Pfam Description:  Metallo-beta-lactamase superfamily
  misc_feature (1)..(290): NCBI GI NO: 25405648 NR Description: probable glyoxalase II, 78941-80643
  misc_feature (1)..(235): NCBI GI NO: 8671869 NR Description: Contains similarity to an unknown glyoxalase II fromArabidopsis thaliana gb|U74610 and
  misc_feature (234)..(290): NCBI GI NO: 8671869 NR Description: Contains similarity to an unknown glyoxalase II fromArabidopsis thaliana gb|U74610 and
  misc_feature (35)..(290): NCBI GI NO: 1644427 NR Description: glyoxalase II [Arabidopsis thaliana]
  misc_feature (35)..(290): NCBI GI NO: 18404530 NR Description: glyoxalase II, putative
  misc_feature (28)..(286): NCBI GI NO: 34910930 NR Description: putative glyoxalase II
  misc_feature (32)..(284): NCBI GI NO: 27371293 NR Description: Similar to RIKEN cDNA 0610025L15 gene
  misc_feature (39)..(287): NCBI GI NO: 12963539 NR Description: HSCO protein [Mus musculus]
  misc_feature (31)..(283): NCBI GI NO: 14198377 NR Description: Similar to RIKEN cDNA 0610025L15 gene
  misc_feature (39)..(287): NCBI GI NO: 27676450 NR Description: similar to HSCO protein
HFSRLRQLLLLQPKFLSSQPRPLRSPPPTFLRSLMGSSSSFSSSSSKLLFRQLFENESSTFTYLLADVSHPDKPALLIDPVDKTVDRDLKLIDELGLKLIYAMNTHVHADHVTGTGLLKTKLPGVKSVISKASGSKADLFLEPGDKVSIGDIYLEVRATPGHTTGCVTYVTGEGADQPQPRMAFTGDAVLIRGCGRTDFQGGSSDQLYESVHSQIFSLPKDTLIYPAHDYKGFEVSTVGEEMQHNPRLTKDKETFKTIMSNLNLSYPKMIDVAVPANMVCGLQDVPSQAN

SEQ ID NO: 1397 - protein, 256 aa, Arabidopsis thaliana
  peptide (1)..(256): Ceres Seq. ID no. 12338222
  misc_feature (25)..(194): Pfam Name: Pfam Description:  Metallo-beta-lactamase superfamily
  misc_feature (1)..(256): NCBI GI NO: 25405648 NR Description: probable glyoxalase II, 78941-80643
  misc_feature (1)..(201): NCBI GI NO: 8671869 NR Description: Contains similarity to an unknown glyoxalase II fromArabidopsis thaliana gb|U74610 and
  misc_feature (200)..(256): NCBI GI NO: 8671869 NR Description: Contains similarity to an unknown glyoxalase II fromArabidopsis thaliana gb|U74610 and
  misc_feature (1)..(256): NCBI GI NO: 1644427 NR Description: glyoxalase II [Arabidopsis thaliana]
  misc_feature (1)..(256): NCBI GI NO: 18404530 NR Description: glyoxalase II, putative
  misc_feature (1)..(252): NCBI GI NO: 34910930 NR Description: putative glyoxalase II
  misc_feature (1)..(250): NCBI GI NO: 27371293 NR Description: Similar to RIKEN cDNA 0610025L15 gene
  misc_feature (5)..(253): NCBI GI NO: 12963539 NR Description: HSCO protein [Mus musculus]
  misc_feature (1)..(249): NCBI GI NO: 14198377 NR Description: Similar to RIKEN cDNA 0610025L15 gene
  misc_feature (5)..(253): NCBI GI NO: 27676450 NR Description: similar to HSCO protein
MGSSSSFSSSSSKLLFRQLFENESSTFTYLLADVSHPDKPALLIDPVDKTVDRDLKLIDELGLKLIYAMNTHVHADHVTGTGLLKTKLPGVKSVISKASGSKADLFLEPGDKVSIGDIYLEVRATPGHTTGCVTYVTGEGADQPQPRMAFTGDAVLIRGCGRTDFQGGSSDQLYESVHSQIFSLPKDTLIYPAHDYKGFEVSTVGEEMQHNPRLTKDKETFKTIMSNLNLSYPKMIDVAVPANMVCGLQDVPSQAN

SEQ ID NO: 1398 - protein, 188 aa, Arabidopsis thaliana
  peptide (1)..(188): Ceres Seq. ID no. 12338223
  misc_feature (1)..(126): Pfam Name: Pfam Description:  Metallo-beta-lactamase superfamily
  misc_feature (1)..(188): NCBI GI NO: 25405648 NR Description: probable glyoxalase II, 78941-80643
  misc_feature (1)..(133): NCBI GI NO: 8671869 NR Description: Contains similarity to an unknown glyoxalase II fromArabidopsis thaliana gb|U74610 and
  misc_feature (132)..(188): NCBI GI NO: 8671869 NR Description: Contains similarity to an unknown glyoxalase II fromArabidopsis thaliana gb|U74610 and
  misc_feature (1)..(188): NCBI GI NO: 1644427 NR Description: glyoxalase II [Arabidopsis thaliana]
  misc_feature (1)..(188): NCBI GI NO: 18404530 NR Description: glyoxalase II, putative
  misc_feature (1)..(184): NCBI GI NO: 34910930 NR Description: putative glyoxalase II
  misc_feature (1)..(182): NCBI GI NO: 27371293 NR Description: Similar to RIKEN cDNA 0610025L15 gene
  misc_feature (1)..(185): NCBI GI NO: 12963539 NR Description: HSCO protein [Mus musculus]
  misc_feature (1)..(181): NCBI GI NO: 14198377 NR Description: Similar to RIKEN cDNA 0610025L15 gene
  misc_feature (1)..(185): NCBI GI NO: 27676450 NR Description: similar to HSCO protein
MNTHVHADHVTGTGLLKTKLPGVKSVISKASGSKADLFLEPGDKVSIGDIYLEVRATPGHTTGCVTYVTGEGADQPQPRMAFTGDAVLIRGCGRTDFQGGSSDQLYESVHSQIFSLPKDTLIYPAHDYKGFEVSTVGEEMQHNPRLTKDKETFKTIMSNLNLSYPKMIDVAVPANMVCGLQDVPSQAN

SEQ ID NO: 1399 - DNA, 2009 bp, Arabidopsis thaliana
  misc_feature (1)..(2009): Ceres Seq. ID no. 13645749
aatgtcattttctttttgagtaaagaaactttcttcttttgcaacttgaaaattttcgatttcgagagcgaaggaagagagagagagagggagagatcaaaaaaatttgtgaaaaaagagatttattttagggttttgttgattttctttgttcattttgccgtcgtctctttctctttctcttgtgaagaaaaagaagaaaaatgaaacttctgggtttggtcttcttgctgtttaatctgtttatgttttcgttttctcggaaacttttaaccgagagtggtggtggtctccacgacgaagctgctctgttgaagttgaagagtagtttcttggatccaaatggagttctgtctagctgggtttccgacagctcatcaaaccattgttcttggtacggtgtctcttgcaactctgattcgagagtcgtttctttaattctcagaggctgtgatgagcttgaaggtagtggtgttcttcatctcccagatttgtcttcttgttcttcaagtaaaagaagacttggtggtgtaatctctcctgttgttggagatttgtctgaaattagggttttatctctgtcttttaatgatcttagaggtgagattccaaaggagatttgggggttggagaaattagagattcttgatcttaaaggtaacaactttatcggtggaattagggttgttgataatgttgttcttaggaaacttatgagttttgaggatgaagatgaaattggtccaagctcagctgatgatgattctcctggtaaatctggattgtatccgattgagatagcttctattgtgtcagcttcagtgattgtctttgtgcttcttgttcttgtgatcttgttcatctacacgaggaaatggaaacgaaactctcaggttcaggtagatgagatcaaggagattaaagtgtttgttgacattggtattcctctgacgtatgagatcattgttagagctactggttactttagtaactctaactgtatcggtcacggcggtttcggttcgacttataaagcagaggtgtctccaacgaatgtgtttgctgttaaaagactctctgttgggaggtttcaaggtgatcaacagtttcatgctgagatctctgctcttgagatggttaggcatccgaatcttgttatgttaatcggttaccatgcgagcgaaaccgagatgtttcttatttacaactacttatctggaggaaaccttcaagatttcattaaagagagatcgaaagctgctattgagtggaaggtacttcacaagattgctcttgatgtagcgcgtgctctctcctatcttcacgaacagtgttctcctaaagtcttgcatagagatatcaaaccgagtaacatactcttggacaacaactacaacgcttatctatctgatttcggactctcgaaactcttgggaacttcgcagtctcatgtcacaactggtgtggctggaacattcggatatgtagctccagagtacgcaatgacatgccgagtctcggagaaagcagatgtttacagctatgggatagtcctcttggagctgatatcggacaaacgagctctggatccttctttctcatcgcatgagaacgggttcaacattgtctcgtgggctcatatgatgttgagtcaaggcaaagcgaaagaagtcttcaccacaggactatgggagactggtcctccagacgatttggtcgaggttctgcatttggcactcaaatgcaccgtcgatagcctctcgataaggccgacaatgaaacaagctgtaagactgctgaaacgaatccagccttctagattgtgatacaaagctagaagaaaggtgtttttagaggatttgtacagcagcaaacaagtgcctagccattagaatctttctcaagtctgttttttatattttcagtgctagggaggtttttcatatgcatcatcaaaatgttattctcagtctactctcttgaaaactgatataaatgatgtttctttc

SEQ ID NO: 1400 - protein, 540 aa, Arabidopsis thaliana
  peptide (1)..(540): Ceres Seq. ID no. 13645750
  misc_feature (1)..(540): NCBI GI NO: 6730642 NR Description: F4N2.23 [Arabidopsis thaliana]
  misc_feature (1)..(540): NCBI GI NO: 15222260 NR Description: receptor protein kinase -related
  misc_feature (92)..(537): NCBI GI NO: 6041804 NR Description: putative protein kinase [Arabidopsis thaliana]
  misc_feature (92)..(537): NCBI GI NO: 30678490 NR Description: leucine-rich repeat transmembrane protein kinase
  misc_feature (77)..(537): NCBI GI NO: 34394917 NR Description: putative receptor-like protein kinase
  misc_feature (58)..(532): NCBI GI NO: 21326117 NR Description: putative protein kinase [Sorghum bicolor]
  misc_feature (92)..(495): NCBI GI NO: 26449973 NR Description: putative protein kinase [Arabidopsis thaliana]
  misc_feature (254)..(535): NCBI GI NO: 23304947 NR Description: extra sporogenous cells [Arabidopsis thaliana]
  misc_feature (6)..(174): NCBI GI NO: 23304947 NR Description: extra sporogenous cells [Arabidopsis thaliana]
  misc_feature (254)..(535): NCBI GI NO: 15240747 NR Description: receptor-related protein kinase-like protein
MKLLGLVFLLFNLFMFSFSRKLLTESGGGLHDEAALLKLKSSFLDPNGVLSSWVSDSSSNHCSWYGVSCNSDSRVVSLILRGCDELEGSGVLHLPDLSSCSSSKRRLGGVISPVVGDLSEIRVLSLSFNDLRGEIPKEIWGLEKLEILDLKGNNFIGGIRVVDNVVLRKLMSFEDEDEIGPSSADDDSPGKSGLYPIEIASIVSASVIVFVLLVLVILFIYTRKWKRNSQVQVDEIKEIKVFVDIGIPLTYEIIVRATGYFSNSNCIGHGGFGSTYKAEVSPTNVFAVKRLSVGRFQGDQQFHAEISALEMVRHPNLVMLIGYHASETEMFLIYNYLSGGNLQDFIKERSKAAIEWKVLHKIALDVARALSYLHEQCSPKVLHRDIKPSNILLDNNYNAYLSDFGLSKLLGTSQSHVTTGVAGTFGYVAPEYAMTCRVSEKADVYSYGIVLLELISDKRALDPSFSSHENGFNIVSWAHMMLSQGKAKEVFTTGLWETGPPDDLVEVLHLALKCTVDSLSIRPTMKQAVRLLKRIQPSRL

SEQ ID NO: 1401 - protein, 526 aa, Arabidopsis thaliana
  peptide (1)..(526): Ceres Seq. ID no. 13645751
  misc_feature (1)..(526): NCBI GI NO: 6730642 NR Description: F4N2.23 [Arabidopsis thaliana]
  misc_feature (1)..(526): NCBI GI NO: 15222260 NR Description: receptor protein kinase -related
  misc_feature (78)..(523): NCBI GI NO: 6041804 NR Description: putative protein kinase [Arabidopsis thaliana]
  misc_feature (78)..(523): NCBI GI NO: 30678490 NR Description: leucine-rich repeat transmembrane protein kinase
  misc_feature (63)..(523): NCBI GI NO: 34394917 NR Description: putative receptor-like protein kinase
  misc_feature (44)..(518): NCBI GI NO: 21326117 NR Description: putative protein kinase [Sorghum bicolor]
  misc_feature (78)..(481): NCBI GI NO: 26449973 NR Description: putative protein kinase [Arabidopsis thaliana]
  misc_feature (240)..(521): NCBI GI NO: 23304947 NR Description: extra sporogenous cells [Arabidopsis thaliana]
  misc_feature (1)..(160): NCBI GI NO: 23304947 NR Description: extra sporogenous cells [Arabidopsis thaliana]
  misc_feature (240)..(521): NCBI GI NO: 15240747 NR Description: receptor-related protein kinase-like protein
MFSFSRKLLTESGGGLHDEAALLKLKSSFLDPNGVLSSWVSDSSSNHCSWYGVSCNSDSRVVSLILRGCDELEGSGVLHLPDLSSCSSSKRRLGGVISPVVGDLSEIRVLSLSFNDLRGEIPKEIWGLEKLEILDLKGNNFIGGIRVVDNVVLRKLMSFEDEDEIGPSSADDDSPGKSGLYPIEIASIVSASVIVFVLLVLVILFIYTRKWKRNSQVQVDEIKEIKVFVDIGIPLTYEIIVRATGYFSNSNCIGHGGFGSTYKAEVSPTNVFAVKRLSVGRFQGDQQFHAEISALEMVRHPNLVMLIGYHASETEMFLIYNYLSGGNLQDFIKERSKAAIEWKVLHKIALDVARALSYLHEQCSPKVLHRDIKPSNILLDNNYNAYLSDFGLSKLLGTSQSHVTTGVAGTFGYVAPEYAMTCRVSEKADVYSYGIVLLELISDKRALDPSFSSHENGFNIVSWAHMMLSQGKAKEVFTTGLWETGPPDDLVEVLHLALKCTVDSLSIRPTMKQAVRLLKRIQPSRL

SEQ ID NO: 1402 - protein, 370 aa, Arabidopsis thaliana
  peptide (1)..(370): Ceres Seq. ID no. 13645752
  misc_feature (1)..(370): NCBI GI NO: 6730642 NR Description: F4N2.23 [Arabidopsis thaliana]
  misc_feature (1)..(370): NCBI GI NO: 15222260 NR Description: receptor protein kinase -related
  misc_feature (1)..(367): NCBI GI NO: 6041804 NR Description: putative protein kinase [Arabidopsis thaliana]
  misc_feature (1)..(367): NCBI GI NO: 30678490 NR Description: leucine-rich repeat transmembrane protein kinase
  misc_feature (1)..(367): NCBI GI NO: 34394917 NR Description: putative receptor-like protein kinase
  misc_feature (1)..(362): NCBI GI NO: 21326117 NR Description: putative protein kinase [Sorghum bicolor]
  misc_feature (1)..(325): NCBI GI NO: 26449973 NR Description: putative protein kinase [Arabidopsis thaliana]
  misc_feature (84)..(365): NCBI GI NO: 23304947 NR Description: extra sporogenous cells [Arabidopsis thaliana]
  misc_feature (84)..(365): NCBI GI NO: 15240747 NR Description: receptor-related protein kinase-like protein
  misc_feature (1)..(363): NCBI GI NO: 25404291 NR Description: probable Serine/Threonine protein kinase F8A5.31
MSFEDEDEIGPSSADDDSPGKSGLYPIEIASIVSASVIVFVLLVLVILFIYTRKWKRNSQVQVDEIKEIKVFVDIGIPLTYEIIVRATGYFSNSNCIGHGGFGSTYKAEVSPTNVFAVKRLSVGRFQGDQQFHAEISALEMVRHPNLVMLIGYHASETEMFLIYNYLSGGNLQDFIKERSKAAIEWKVLHKIALDVARALSYLHEQCSPKVLHRDIKPSNILLDNNYNAYLSDFGLSKLLGTSQSHVTTGVAGTFGYVAPEYAMTCRVSEKADVYSYGIVLLELISDKRALDPSFSSHENGFNIVSWAHMMLSQGKAKEVFTTGLWETGPPDDLVEVLHLALKCTVDSLSIRPTMKQAVRLLKRIQPSRL

SEQ ID NO: 1403 - DNA, 719 bp, Arabidopsis thaliana
  misc_feature (1)..(719): Ceres Seq. ID no. 12332348
aaacaacaggtcagagaataaatagaaaaaccaaaaccctttagcgtctcccaaatcctctcaatcctctgctgctcaatctctcatcatcggcatcgctctctctaaaaatgtctcagatggatcccgacgctgtatctaaggccttcgtcgaacattactattccaccttcgacaccaaccgtgtcggtctcgctggtctctatcaggaagcttctatgctcaccttcgaaggtcaaaagatccaaggagtccagagcatcgtcgctaagctcacctctcttcctttccagcagtgcaagcatcacatctccaccgttgattgtcagccttctggtcctgcttccggtatgctcgttttcgtttccggtaatctccagctcgccggagaagaacacgctctcaagttcagccagatgtttcatttgatgccgacgccacaaggaagcttttacgtgttcaacgatatattcaggttgaactatgcctgaacagaaatcagattgttgttagcatacatcattgttgcatttctatactatttgagcaaatccttctatcaatttttctcgtctttttcttgttattcctagatgatttaccttgggaacagaggaatattgtctctcatcatgtatttggtttggattgtttgttcatttgtcattacaatctattgactttataagacaatttgaatggtcatttggctcttgtcc

SEQ ID NO: 1404 - protein, 126 aa, Arabidopsis thaliana
  peptide (1)..(126): Ceres Seq. ID no. 12332349
  misc_feature (9)..(123): Pfam Name: NTF2 Pfam Description: Nuclear transport factor 2
  misc_feature (1)..(126): NCBI GI NO: 15217779 NR Description: nuclear transport factor 2, putative
  misc_feature (4)..(126): NCBI GI NO: 21555203 NR Description: nuclear transport factor 2, putative
  misc_feature (4)..(126): NCBI GI NO: 15223491 NR Description: putative nuclear transport factor
  misc_feature (4)..(125): NCBI GI NO: 15214179 NR Description: Nuclear transport factor 2 (NTF-2)
  misc_feature (7)..(125): NCBI GI NO: 34908774 NR Description: putative Nuclear transport factor 2
  misc_feature (7)..(126): NCBI GI NO: 25402667 NR Description: protein T23J18.22
  misc_feature (5)..(125): NCBI GI NO: 14700035 NR Description: nuclear transport factor 2 [Aspergillus nidulans]
  misc_feature (5)..(125): NCBI GI NO: 19114665 NR Description: nuclear transport factor, NTF2 homolog
  misc_feature (4)..(126): NCBI GI NO: 15214172 NR Description: Nuclear transport factor 2 (NTF-2)
  misc_feature (4)..(126): NCBI GI NO: 6320846 NR Description: May coordinate the Ran-dependent
MSQMDPDAVSKAFVEHYYSTFDTNRVGLAGLYQEASMLTFEGQKIQGVQSIVAKLTSLPFQQCKHHISTVDCQPSGPASGMLVFVSGNLQLAGEEHALKFSQMFHLMPTPQGSFYVFNDIFRLNYA

SEQ ID NO: 1405 - protein, 123 aa, Arabidopsis thaliana
  peptide (1)..(123): Ceres Seq. ID no. 12332350
  misc_feature (6)..(120): Pfam Name: NTF2 Pfam Description: Nuclear transport factor 2
  misc_feature (1)..(123): NCBI GI NO: 15217779 NR Description: nuclear transport factor 2, putative
  misc_feature (1)..(123): NCBI GI NO: 21555203 NR Description: nuclear transport factor 2, putative
  misc_feature (1)..(123): NCBI GI NO: 15223491 NR Description: putative nuclear transport factor
  misc_feature (1)..(122): NCBI GI NO: 15214179 NR Description: Nuclear transport factor 2 (NTF-2)
  misc_feature (4)..(122): NCBI GI NO: 34908774 NR Description: putative Nuclear transport factor 2
  misc_feature (4)..(123): NCBI GI NO: 25402667 NR Description: protein T23J18.22
  misc_feature (2)..(122): NCBI GI NO: 14700035 NR Description: nuclear transport factor 2 [Aspergillus nidulans]
  misc_feature (2)..(122): NCBI GI NO: 19114665 NR Description: nuclear transport factor, NTF2 homolog
  misc_feature (1)..(123): NCBI GI NO: 15214172 NR Description: Nuclear transport factor 2 (NTF-2)
  misc_feature (1)..(123): NCBI GI NO: 6320846 NR Description: May coordinate the Ran-dependent
MDPDAVSKAFVEHYYSTFDTNRVGLAGLYQEASMLTFEGQKIQGVQSIVAKLTSLPFQQCKHHISTVDCQPSGPASGMLVFVSGNLQLAGEEHALKFSQMFHLMPTPQGSFYVFNDIFRLNYA

SEQ ID NO: 1406 - protein, 90 aa, Arabidopsis thaliana
  peptide (1)..(90): Ceres Seq. ID no. 12332351
  misc_feature (1)..(87): Pfam Name: NTF2 Pfam Description: Nuclear transport factor 2
  misc_feature (1)..(90): NCBI GI NO: 15217779 NR Description: nuclear transport factor 2, putative
  misc_feature (1)..(90): NCBI GI NO: 21555203 NR Description: nuclear transport factor 2, putative
  misc_feature (1)..(90): NCBI GI NO: 15223491 NR Description: putative nuclear transport factor
  misc_feature (1)..(89): NCBI GI NO: 15214179 NR Description: Nuclear transport factor 2 (NTF-2)
  misc_feature (1)..(89): NCBI GI NO: 34908774 NR Description: putative Nuclear transport factor 2
  misc_feature (1)..(90): NCBI GI NO: 25402667 NR Description: protein T23J18.22
  misc_feature (1)..(89): NCBI GI NO: 14700035 NR Description: nuclear transport factor 2 [Aspergillus nidulans]
  misc_feature (1)..(89): NCBI GI NO: 19114665 NR Description: nuclear transport factor, NTF2 homolog
  misc_feature (1)..(90): NCBI GI NO: 15214172 NR Description: Nuclear transport factor 2 (NTF-2)
  misc_feature (1)..(90): NCBI GI NO: 6320846 NR Description: May coordinate the Ran-dependent
MLTFEGQKIQGVQSIVAKLTSLPFQQCKHHISTVDCQPSGPASGMLVFVSGNLQLAGEEHALKFSQMFHLMPTPQGSFYVFNDIFRLNYA

SEQ ID NO: 1407 - DNA, 1071 bp, Arabidopsis thaliana
  misc_feature (1)..(1071): Ceres Seq. ID no. 12333126
aacaccactaataaactcaacatggctagatccttgttgctctcgctaaccctcacattcctcttcgccggaattgtctcagctcgtgactggaacatcctgagccagctcaaaggaaccacaaccaccacgaagactagccaaaccggcgtcacatctttgaaagctcccaacctaaacggatactgtgagagctggagagtcaacgtggagcttaacaacataagggactttaaggtggttccacaggaatgtgtatggttcgtccaaaagtacatgacctcatctcaatacgaagatgacgtggagagagccgtcgatgaagccatcctctacctcggaaaaacttgttgcgagaagaagacatgcgatggcatggatgcttggatctttgacattgatgacactcttctctcaaccattccttaccacaagagcaacggttgtttcggtggtgagcaactgaacacgaccaagttcgaggaatggcaaaattcgggcaaggcaccagcggttccacacatggtgaagttgtaccatgagatcagagagagaggtttcaagatctttttgatctcttctcgtaaagagtatctcagatctgccaccgtcgaaaatcttattgaagccggttaccacagctggtctaacctccttctgaggggagaagatgatgaaaagaagagtgtgagccaatacaaagcagatttgaggacatggcttacaagtcttgggtacagagtttggggagtgatgggtgcacaatggaacagcttctctggttgtccagttcccaagagaaccttcaagctccctaactccatctactatgtcgcctgattaaatcttatttactaacaaaacaataagatcagagtttcattctgattcttgagtcttttttttctctctccctcttttcatttctggtttatataaccaattcaaatgcttatgatccatgcatgaaccatgatcatctttgtgtttttttttccttctgtattaccattttgggcctttgtgaaattgattttgggcttttgttatataatctcctctttctctttc

SEQ ID NO: 1408 - protein, 279 aa, Arabidopsis thaliana
  peptide (1)..(279): Ceres Seq. ID no. 12333127
  misc_feature (47)..(279): Pfam Name: Acid phosphatase Pfam Description: HAD superfamily, subfamily IIIB
  misc_feature (8)..(279): NCBI GI NO: 15240067 NR Description: vegetative storage protein-like
  misc_feature (8)..(279): NCBI GI NO: 21555213 NR Description: vegetative storage protein-like
  misc_feature (8)..(279): NCBI GI NO: 18379219 NR Description: expressed protein; protein id: At1g04040
  misc_feature (58)..(278): NCBI GI NO: 15234949 NR Description: acid phosphatase - like protein
  misc_feature (63)..(278): NCBI GI NO: 130718 NR Description: Acid phosphatase precursor 1
  misc_feature (63)..(278): NCBI GI NO: 445113 NR Description: acid phosphatase 1
  misc_feature (47)..(279): NCBI GI NO: 15233526 NR Description: acid phosphatase-like protein
  misc_feature (58)..(278): NCBI GI NO: 15241412 NR Description: acid phosphatase; protein id: At5g51260.1
  misc_feature (54)..(278): NCBI GI NO: 15233504 NR Description: acid phosphatase-like protein
  misc_feature (62)..(278): NCBI GI NO: 15224907 NR Description: putative acid phosphatase; protein id: At2g38600.1
NTTNKLNMARSLLLSLTLTFLFAGIVSARDWNILSQLKGTTTTTKTSQTGVTSLKAPNLNGYCESWRVNVELNNIRDFKVVPQECVWFVQKYMTSSQYEDDVERAVDEAILYLGKTCCEKKTCDGMDAWIFDIDDTLLSTIPYHKSNGCFGGEQLNTTKFEEWQNSGKAPAVPHMVKLYHEIRERGFKIFLISSRKEYLRSATVENLIEAGYHSWSNLLLRGEDDEKKSVSQYKADLRTWLTSLGYRVWGVMGAQWNSFSGCPVPKRTFKLPNSIYYVA

SEQ ID NO: 1409 - protein, 272 aa, Arabidopsis thaliana
  peptide (1)..(272): Ceres Seq. ID no. 12333128
  misc_feature (40)..(272): Pfam Name: Acid phosphatase Pfam Description: HAD superfamily, subfamily IIIB
  misc_feature (1)..(272): NCBI GI NO: 15240067 NR Description: vegetative storage protein-like
  misc_feature (1)..(272): NCBI GI NO: 21555213 NR Description: vegetative storage protein-like
  misc_feature (1)..(272): NCBI GI NO: 18379219 NR Description: expressed protein; protein id: At1g04040
  misc_feature (51)..(271): NCBI GI NO: 15234949 NR Description: acid phosphatase - like protein
  misc_feature (56)..(271): NCBI GI NO: 130718 NR Description: Acid phosphatase precursor 1
  misc_feature (56)..(271): NCBI GI NO: 445113 NR Description: acid phosphatase 1
  misc_feature (40)..(272): NCBI GI NO: 15233526 NR Description: acid phosphatase-like protein
  misc_feature (51)..(271): NCBI GI NO: 15241412 NR Description: acid phosphatase; protein id: At5g51260.1
  misc_feature (47)..(271): NCBI GI NO: 15233504 NR Description: acid phosphatase-like protein
  misc_feature (55)..(271): NCBI GI NO: 15224907 NR Description: putative acid phosphatase; protein id: At2g38600.1
MARSLLLSLTLTFLFAGIVSARDWNILSQLKGTTTTTKTSQTGVTSLKAPNLNGYCESWRVNVELNNIRDFKVVPQECVWFVQKYMTSSQYEDDVERAVDEAILYLGKTCCEKKTCDGMDAWIFDIDDTLLSTIPYHKSNGCFGGEQLNTTKFEEWQNSGKAPAVPHMVKLYHEIRERGFKIFLISSRKEYLRSATVENLIEAGYHSWSNLLLRGEDDEKKSVSQYKADLRTWLTSLGYRVWGVMGAQWNSFSGCPVPKRTFKLPNSIYYVA

SEQ ID NO: 1410 - protein, 187 aa, Arabidopsis thaliana
  peptide (1)..(187): Ceres Seq. ID no. 12333129
  misc_feature (1)..(187): Pfam Name: Acid phosphatase Pfam Description: HAD superfamily, subfamily IIIB
  misc_feature (1)..(187): NCBI GI NO: 15240067 NR Description: vegetative storage protein-like
  misc_feature (1)..(187): NCBI GI NO: 21555213 NR Description: vegetative storage protein-like
  misc_feature (1)..(187): NCBI GI NO: 18379219 NR Description: expressed protein; protein id: At1g04040
  misc_feature (1)..(186): NCBI GI NO: 15234949 NR Description: acid phosphatase - like protein
  misc_feature (1)..(186): NCBI GI NO: 130718 NR Description: Acid phosphatase precursor 1
  misc_feature (1)..(186): NCBI GI NO: 445113 NR Description: acid phosphatase 1
  misc_feature (1)..(187): NCBI GI NO: 15233526 NR Description: acid phosphatase-like protein
  misc_feature (1)..(186): NCBI GI NO: 15241412 NR Description: acid phosphatase; protein id: At5g51260.1
  misc_feature (1)..(186): NCBI GI NO: 15233504 NR Description: acid phosphatase-like protein
  misc_feature (1)..(186): NCBI GI NO: 15224907 NR Description: putative acid phosphatase; protein id: At2g38600.1
MTSSQYEDDVERAVDEAILYLGKTCCEKKTCDGMDAWIFDIDDTLLSTIPYHKSNGCFGGEQLNTTKFEEWQNSGKAPAVPHMVKLYHEIRERGFKIFLISSRKEYLRSATVENLIEAGYHSWSNLLLRGEDDEKKSVSQYKADLRTWLTSLGYRVWGVMGAQWNSFSGCPVPKRTFKLPNSIYYVA

SEQ ID NO: 1411 - DNA, 1270 bp, Arabidopsis thaliana
  misc_feature (1)..(1270): Ceres Seq. ID no. 13489040
ctctctcgctttctctctataaaaagctcctctttcttcaccataactcttcaaactttactttcttacagaacaagaacataaatatcttaaactcatgtctgaatgtggatgtttttcggcaacaactatgttgagaatttgtgtagtattgataatatgtttgcatatgtgttgtgcctcgagtgattgtacaagtcacgatgatcctgtgtctcaagacgaagcagagaaagcgacgaagctaaagcttggttcgatagctttacttcttgtagccggaggagtcggcgtgagtctaccgttgatcgggaaaaggattccggcgttacaaccggaaaatgatatcttcttcatggtgaaagcttttgctgcaggagtgatcctctgcacaggtttcgttcatatcttaccagacgcgttcgagagattgagctctccatgtcttgaggacactacagctgggaagttcccgtttgctggttttgtagcgatgctgtcggcgatggggactcttatgatcgacacattcgcgacagggtattacaagaggcaacattttagcaataaccatgggagcaagcaagtgaacgtagtagtagatgaagaagagcatgcgggtcatgttcacattcacacgcacgctagtcacggacacacacatggttcgaccgagttgatcagaagacgtatagtgtcgcaggtgcttgagattgggatagttgtgcattcggttattatagggatatcacttggagcttcacagagcatagacaccataaagccactcatggctgcactatctttccatcagttctttgaaggtcttggcctcggtggatgcatctccctggcggatatgaagtcgaaatcgacagtgctaatggcgacatttttctcggtgacggcgccacttgggataggaatagggttggggatgtcaagtggtttaggctacaggaaagagagcaaagaggcaataatggtggaaggaatgttgaatgctgcatctgctgggatactcatatacatgtcacttgttgatcttcttgctactgattttatgaatccaagattgcaatccaatctctggcttcacttggctgcttatctctctctcgtcctaggcgcaggttccatgtctctcctcgccatctgggcctgattcttgatctgaaactaacaaacaaacaaaccaaatgccgctctttttctcgaatctgtaatggtgtttctaatctcagaatcaatactattctatcttgaacac

SEQ ID NO: 1412 - protein, 355 aa, Arabidopsis thaliana
  peptide (1)..(355): Ceres Seq. ID no. 13489041
  misc_feature (48)..(352): Pfam Name: Pfam Description:  ZIP Zinc transporter
  misc_feature (1)..(355): NCBI GI NO: 15230588 NR Description: zinc transporter (ZIP1) [Arabidopsis thaliana]
  misc_feature (15)..(355): NCBI GI NO: 15418778 NR Description: zinc transporter protein ZIP1 [Glycine max]
  misc_feature (173)..(355): NCBI GI NO: 40888860 NR Description: TPA: putative ZIP-like protein
  misc_feature (12)..(190): NCBI GI NO: 40888860 NR Description: TPA: putative ZIP-like protein
  misc_feature (171)..(355): NCBI GI NO: 40888854 NR Description: TPA: putative ZIP-like protein
  misc_feature (8)..(190): NCBI GI NO: 40888854 NR Description: TPA: putative ZIP-like protein
  misc_feature (171)..(355): NCBI GI NO: 32816615 NR Description: putative zinc transporter
  misc_feature (10)..(190): NCBI GI NO: 32816615 NR Description: putative zinc transporter
  misc_feature (8)..(355): NCBI GI NO: 32966053 NR Description: iron transporter Fe2
  misc_feature (8)..(355): NCBI GI NO: 34900456 NR Description: putative zinc transporter protein ZIP1
MSECGCFSATTMLRICVVLIICLHMCCASSDCTSHDDPVSQDEAEKATKLKLGSIALLLVAGGVGVSLPLIGKRIPALQPENDIFFMVKAFAAGVILCTGFVHILPDAFERLSSPCLEDTTAGKFPFAGFVAMLSAMGTLMIDTFATGYYKRQHFSNNHGSKQVNVVVDEEEHAGHVHIHTHASHGHTHGSTELIRRRIVSQVLEIGIVVHSVIIGISLGASQSIDTIKPLMAALSFHQFFEGLGLGGCISLADMKSKSTVLMATFFSVTAPLGIGIGLGMSSGLGYRKESKEAIMVEGMLNAASAGILIYMSLVDLLATDFMNPRLQSNLWLHLAAYLSLVLGAGSMSLLAIWA

SEQ ID NO: 1413 - protein, 344 aa, Arabidopsis thaliana
  peptide (1)..(344): Ceres Seq. ID no. 13489042
  misc_feature (37)..(341): Pfam Name: Pfam Description:  ZIP Zinc transporter
  misc_feature (1)..(344): NCBI GI NO: 15230588 NR Description: zinc transporter (ZIP1) [Arabidopsis thaliana]
  misc_feature (4)..(344): NCBI GI NO: 15418778 NR Description: zinc transporter protein ZIP1 [Glycine max]
  misc_feature (162)..(344): NCBI GI NO: 40888860 NR Description: TPA: putative ZIP-like protein
  misc_feature (1)..(179): NCBI GI NO: 40888860 NR Description: TPA: putative ZIP-like protein
  misc_feature (160)..(344): NCBI GI NO: 40888854 NR Description: TPA: putative ZIP-like protein
  misc_feature (1)..(179): NCBI GI NO: 40888854 NR Description: TPA: putative ZIP-like protein
  misc_feature (160)..(344): NCBI GI NO: 32816615 NR Description: putative zinc transporter
  misc_feature (1)..(179): NCBI GI NO: 32816615 NR Description: putative zinc transporter
  misc_feature (1)..(344): NCBI GI NO: 32966053 NR Description: iron transporter Fe2
  misc_feature (1)..(344): NCBI GI NO: 34900456 NR Description: putative zinc transporter protein ZIP1
MLRICVVLIICLHMCCASSDCTSHDDPVSQDEAEKATKLKLGSIALLLVAGGVGVSLPLIGKRIPALQPENDIFFMVKAFAAGVILCTGFVHILPDAFERLSSPCLEDTTAGKFPFAGFVAMLSAMGTLMIDTFATGYYKRQHFSNNHGSKQVNVVVDEEEHAGHVHIHTHASHGHTHGSTELIRRRIVSQVLEIGIVVHSVIIGISLGASQSIDTIKPLMAALSFHQFFEGLGLGGCISLADMKSKSTVLMATFFSVTAPLGIGIGLGMSSGLGYRKESKEAIMVEGMLNAASAGILIYMSLVDLLATDFMNPRLQSNLWLHLAAYLSLVLGAGSMSLLAIWA

SEQ ID NO: 1414 - protein, 331 aa, Arabidopsis thaliana
  peptide (1)..(331): Ceres Seq. ID no. 13489043
  misc_feature (24)..(328): Pfam Name: Pfam Description:  ZIP Zinc transporter
  misc_feature (1)..(331): NCBI GI NO: 15230588 NR Description: zinc transporter (ZIP1) [Arabidopsis thaliana]
  misc_feature (1)..(331): NCBI GI NO: 15418778 NR Description: zinc transporter protein ZIP1 [Glycine max]
  misc_feature (149)..(331): NCBI GI NO: 40888860 NR Description: TPA: putative ZIP-like protein
  misc_feature (1)..(166): NCBI GI NO: 40888860 NR Description: TPA: putative ZIP-like protein
  misc_feature (147)..(331): NCBI GI NO: 40888854 NR Description: TPA: putative ZIP-like protein
  misc_feature (1)..(166): NCBI GI NO: 40888854 NR Description: TPA: putative ZIP-like protein
  misc_feature (147)..(331): NCBI GI NO: 32816615 NR Description: putative zinc transporter
  misc_feature (1)..(166): NCBI GI NO: 32816615 NR Description: putative zinc transporter
  misc_feature (1)..(331): NCBI GI NO: 32966053 NR Description: iron transporter Fe2
  misc_feature (1)..(331): NCBI GI NO: 34900456 NR Description: putative zinc transporter protein ZIP1
MCCASSDCTSHDDPVSQDEAEKATKLKLGSIALLLVAGGVGVSLPLIGKRIPALQPENDIFFMVKAFAAGVILCTGFVHILPDAFERLSSPCLEDTTAGKFPFAGFVAMLSAMGTLMIDTFATGYYKRQHFSNNHGSKQVNVVVDEEEHAGHVHIHTHASHGHTHGSTELIRRRIVSQVLEIGIVVHSVIIGISLGASQSIDTIKPLMAALSFHQFFEGLGLGGCISLADMKSKSTVLMATFFSVTAPLGIGIGLGMSSGLGYRKESKEAIMVEGMLNAASAGILIYMSLVDLLATDFMNPRLQSNLWLHLAAYLSLVLGAGSMSLLAIWA

SEQ ID NO: 1415 - DNA, 1156 bp, Arabidopsis thaliana
  misc_feature (1)..(1156): Ceres Seq. ID no. 12330381
atttttcgtcaaaagaatcagtaaaaactaaacattttgactatatcctacttgaatcaattcttcggctgattttgaagttttgtgacattcagatattctagggttttgtggtaaatggaatcgaatcacgaaggcaacgcgatacaagtgattgaccaagtaacaaccatgacccatctgtctgacccgaatccgaaaaccaaaccgggtatgatgctcatgaaacaagaagacgggtatttgcagccggtgaagactaaaccggctccgaagagaccgacttctaaagaccgtcacacgaaagtagaaggacgaggtcggaggatccgaatgccggcgggttgcgctgctcgggtctttcaattgacccgtgaacttggtcacaaatccgacggagaaacgatacggtggttattggaacgagctgaaccggcgataattgaagcaaccggaaccggaactgtaccggctattgctgtatcggttaacggaactttaaaaatcccgacgagctctccagtgttgaatgacggcggccgtgacggtgacggtgacctaatgaagaaacggaggaagagaaactgtacgagcgatttcgtagacgttaatgacagctgtcatagctccgttacttctgggttagctccgataacggcgtcaaactacggcgttaatatcctgaacgttaatacacaggggtttgtgccgttttggcctatgggtatgggtactgcgtatgttactggtgggccggatcaaatgggccaaatgtgggctattcctaccgttgctacagctccgtttctcaatgttggtgctagaccggtgtctagttatgtctcaaacgcttcagacgctgaggcggagatggaaacgagcggtggcggaacgacgcaaccgctgagggatttttcgttggagatttatgataagagagagcttcagtttttgggtggctcagggaactcatctccgtcttcatgtcatgagacttaaggaattttaactcttagttctagtttctttttagtttttagtaagtttgattcctgatttaggttaagtaagatttgtaaaagaattgggagcacaatttcaattttatgtttctgtcaaacattttggtaattaatgaaactatcctatcattttt

SEQ ID NO: 1416 - protein, 293 aa, Arabidopsis thaliana
  peptide (1)..(293): Ceres Seq. ID no. 12330382
  misc_feature (46)..(252): Pfam Name: Pfam Description:  TCP family transcription factor
  misc_feature (1)..(293): NCBI GI NO: 15242216 NR Description: putative protein; protein id: At5g51910
  misc_feature (34)..(293): NCBI GI NO: 21592496 NR Description: unknown [Arabidopsis thaliana]
  misc_feature (27)..(235): NCBI GI NO: 15225538 NR Description: putative PCF2-like DNA binding protein
  misc_feature (49)..(238): NCBI GI NO: 7489534 NR Description: probable DNA binding protein PCF2 - rice
  misc_feature (11)..(134): NCBI GI NO: 11357581 NR Description: hypothetical protein F1P2
  misc_feature (11)..(134): NCBI GI NO: 22331641 NR Description: putative protein; protein id: At3g47620
  misc_feature (49)..(134): NCBI GI NO: 18409345 NR Description: expressed protein; protein id: At1g69690
  misc_feature (43)..(134): NCBI GI NO: 5731257 NR Description: auxin-induced basic helix-loop-helix transcription factor
  misc_feature (49)..(148): NCBI GI NO: 15218305 NR Description: unknown protein; protein id: At1g72010
  misc_feature (52)..(123): NCBI GI NO: 15232059 NR Description: unknown protein; protein id: At3g27010.1
MESNHEGNAIQVIDQVTTMTHLSDPNPKTKPGMMLMKQEDGYLQPVKTKPAPKRPTSKDRHTKVEGRGRRIRMPAGCAARVFQLTRELGHKSDGETIRWLLERAEPAIIEATGTGTVPAIAVSVNGTLKIPTSSPVLNDGGRDGDGDLMKKRRKRNCTSDFVDVNDSCHSSVTSGLAPITASNYGVNILNVNTQGFVPFWPMGMGTAYVTGGPDQMGQMWAIPTVATAPFLNVGARPVSSYVSNASDAEAEMETSGGGTTQPLRDFSLEIYDKRELQFLGGSGNSSPSSCHET

SEQ ID NO: 1417 - protein, 275 aa, Arabidopsis thaliana
  peptide (1)..(275): Ceres Seq. ID no. 12330383
  misc_feature (28)..(234): Pfam Name: Pfam Description:  TCP family transcription factor
  misc_feature (1)..(275): NCBI GI NO: 15242216 NR Description: putative protein; protein id: At5g51910
  misc_feature (16)..(275): NCBI GI NO: 21592496 NR Description: unknown [Arabidopsis thaliana]
  misc_feature (9)..(217): NCBI GI NO: 15225538 NR Description: putative PCF2-like DNA binding protein
  misc_feature (31)..(220): NCBI GI NO: 7489534 NR Description: probable DNA binding protein PCF2 - rice
  misc_feature (1)..(116): NCBI GI NO: 11357581 NR Description: hypothetical protein F1P2
  misc_feature (1)..(116): NCBI GI NO: 22331641 NR Description: putative protein; protein id: At3g47620
  misc_feature (31)..(116): NCBI GI NO: 18409345 NR Description: expressed protein; protein id: At1g69690
  misc_feature (25)..(116): NCBI GI NO: 5731257 NR Description: auxin-induced basic helix-loop-helix transcription factor
  misc_feature (31)..(130): NCBI GI NO: 15218305 NR Description: unknown protein; protein id: At1g72010
  misc_feature (34)..(105): NCBI GI NO: 15232059 NR Description: unknown protein; protein id: At3g27010.1
MTHLSDPNPKTKPGMMLMKQEDGYLQPVKTKPAPKRPTSKDRHTKVEGRGRRIRMPAGCAARVFQLTRELGHKSDGETIRWLLERAEPAIIEATGTGTVPAIAVSVNGTLKIPTSSPVLNDGGRDGDGDLMKKRRKRNCTSDFVDVNDSCHSSVTSGLAPITASNYGVNILNVNTQGFVPFWPMGMGTAYVTGGPDQMGQMWAIPTVATAPFLNVGARPVSSYVSNASDAEAEMETSGGGTTQPLRDFSLEIYDKRELQFLGGSGNSSPSSCHET

SEQ ID NO: 1418 - protein, 261 aa, Arabidopsis thaliana
  peptide (1)..(261): Ceres Seq. ID no. 12330384
  misc_feature (14)..(220): Pfam Name: Pfam Description:  TCP family transcription factor
  misc_feature (1)..(261): NCBI GI NO: 15242216 NR Description: putative protein; protein id: At5g51910
  misc_feature (2)..(261): NCBI GI NO: 21592496 NR Description: unknown [Arabidopsis thaliana]
  misc_feature (1)..(203): NCBI GI NO: 15225538 NR Description: putative PCF2-like DNA binding protein
  misc_feature (17)..(206): NCBI GI NO: 7489534 NR Description: probable DNA binding protein PCF2 - rice
  misc_feature (1)..(102): NCBI GI NO: 11357581 NR Description: hypothetical protein F1P2
  misc_feature (1)..(102): NCBI GI NO: 22331641 NR Description: putative protein; protein id: At3g47620
  misc_feature (17)..(102): NCBI GI NO: 18409345 NR Description: expressed protein; protein id: At1g69690
  misc_feature (11)..(102): NCBI GI NO: 5731257 NR Description: auxin-induced basic helix-loop-helix transcription factor
  misc_feature (17)..(116): NCBI GI NO: 15218305 NR Description: unknown protein; protein id: At1g72010
  misc_feature (20)..(91): NCBI GI NO: 15232059 NR Description: unknown protein; protein id: At3g27010.1
MMLMKQEDGYLQPVKTKPAPKRPTSKDRHTKVEGRGRRIRMPAGCAARVFQLTRELGHKSDGETIRWLLERAEPAIIEATGTGTVPAIAVSVNGTLKIPTSSPVLNDGGRDGDGDLMKKRRKRNCTSDFVDVNDSCHSSVTSGLAPITASNYGVNILNVNTQGFVPFWPMGMGTAYVTGGPDQMGQMWAIPTVATAPFLNVGARPVSSYVSNASDAEAEMETSGGGTTQPLRDFSLEIYDKRELQFLGGSGNSSPSSCHET

SEQ ID NO: 1419 - DNA, 751 bp, Arabidopsis thaliana
  misc_feature (1)..(751): Ceres Seq. ID no. 12395378
  misc_feature (732)..(732): n is a, c, t, g, unknown, or other
agatttttgttttgtttttaatcgggaaagatgaaggcggagacgatgacgctgcttctggtgaatctagccggaataatggaaagagccgatgaatctctgcttccaggtgtatacaaagaggtcggtttagctcttcataccgatccaaccggactcgggtcattaacgttgctacgatccatggttcaagccgcttgctatcccttagctgcttacatggccattagacataaccgagctcacgttatagctctgggtgcatttctctggtccgctgctactttccttgtcgctttctcttccactttcttccaggtagcagtgtctagagctctgaatggaattggtcttgctcttgtggctccagctattcagtctctcgttgctgactcaactgatgatgctaaccgtggtactgcttttggatggttacaattaacagcaaatattggttcgattttaggcgggctttgctctgttttaatagctccattaacctttatgggcatacctggttggagagttgctttctatatcgtaggtgtgatcagtgttattgttggtgtgctagttagagttttcgccaatgatccacattttgtgaaggatggtgttgatgtttcgaatcaaccaggttcgaggaaacctttttgtacagaggtgaaggatttggtccgggaagctgatactgtcataaagattcggtcttttcagatcattgtagctcanggagtgacaggatcgtttc

SEQ ID NO: 1420 - protein, 240 aa, Arabidopsis thaliana
  peptide (1)..(240): Ceres Seq. ID no. 12395379
  misc_feature (7)..(239): Pfam Name: and other Pfam Description: Sugar
  misc_feature (1)..(239): NCBI GI NO: 15218229 NR Description: putative transporter; protein id: At1g78130.1
  misc_feature (1)..(239): NCBI GI NO: 15238089 NR Description: putative protein; protein id: At5g10190
  misc_feature (1)..(239): NCBI GI NO: 15234530 NR Description: putative protein; protein id: At4g36790.1
  misc_feature (96)..(239): NCBI GI NO: 11358310 NR Description: hypothetical protein T31P16
  misc_feature (1)..(145): NCBI GI NO: 11358310 NR Description: hypothetical protein T31P16
  misc_feature (16)..(238): NCBI GI NO: 15224194 NR Description: hypothetical protein; protein id: At2g18590.1
  misc_feature (7)..(193): NCBI GI NO: 7494336 NR Description: membrane transporter PFB0275w - malaria parasite
  misc_feature (7)..(193): NCBI GI NO: 23593282 NR Description: hypothetical protein, conserved
  misc_feature (7)..(193): NCBI GI NO: 23480447 NR Description: major facilitator superfamily protein
  misc_feature (8)..(189): NCBI GI NO: 22987977 NR Description: hypothetical protein [Burkholderia fungorum]
  misc_feature (234)..(234): Xaa is any aa, unknown or other
MKAETMTLLLVNLAGIMERADESLLPGVYKEVGLALHTDPTGLGSLTLLRSMVQAACYPLAAYMAIRHNRAHVIALGAFLWSAATFLVAFSSTFFQVAVSRALNGIGLALVAPAIQSLVADSTDDANRGTAFGWLQLTANIGSILGGLCSVLIAPLTFMGIPGWRVAFYIVGVISVIVGVLVRVFANDPHFVKDGVDVSNQPGSRKPFCTEVKDLVREADTVIKIRSFQIIVAXGVTGSF

SEQ ID NO: 1421 - protein, 235 aa, Arabidopsis thaliana
  peptide (1)..(235): Ceres Seq. ID no. 12395380
  misc_feature (2)..(234): Pfam Name: and other Pfam Description: Sugar
  misc_feature (1)..(234): NCBI GI NO: 15218229 NR Description: putative transporter; protein id: At1g78130.1
  misc_feature (1)..(234): NCBI GI NO: 15238089 NR Description: putative protein; protein id: At5g10190
  misc_feature (1)..(234): NCBI GI NO: 15234530 NR Description: putative protein; protein id: At4g36790.1
  misc_feature (91)..(234): NCBI GI NO: 11358310 NR Description: hypothetical protein T31P16
  misc_feature (1)..(140): NCBI GI NO: 11358310 NR Description: hypothetical protein T31P16
  misc_feature (11)..(233): NCBI GI NO: 15224194 NR Description: hypothetical protein; protein id: At2g18590.1
  misc_feature (2)..(188): NCBI GI NO: 7494336 NR Description: membrane transporter PFB0275w - malaria parasite
  misc_feature (2)..(188): NCBI GI NO: 23593282 NR Description: hypothetical protein, conserved
  misc_feature (2)..(188): NCBI GI NO: 23480447 NR Description: major facilitator superfamily protein
  misc_feature (3)..(184): NCBI GI NO: 22987977 NR Description: hypothetical protein [Burkholderia fungorum]
  misc_feature (229)..(229): Xaa is any aa, unknown or other
MTLLLVNLAGIMERADESLLPGVYKEVGLALHTDPTGLGSLTLLRSMVQAACYPLAAYMAIRHNRAHVIALGAFLWSAATFLVAFSSTFFQVAVSRALNGIGLALVAPAIQSLVADSTDDANRGTAFGWLQLTANIGSILGGLCSVLIAPLTFMGIPGWRVAFYIVGVISVIVGVLVRVFANDPHFVKDGVDVSNQPGSRKPFCTEVKDLVREADTVIKIRSFQIIVAXGVTGSF

SEQ ID NO: 1422 - protein, 224 aa, Arabidopsis thaliana
  peptide (1)..(224): Ceres Seq. ID no. 12395381
  misc_feature (1)..(223): Pfam Name: and other Pfam Description: Sugar
  misc_feature (1)..(223): NCBI GI NO: 15218229 NR Description: putative transporter; protein id: At1g78130.1
  misc_feature (1)..(223): NCBI GI NO: 15238089 NR Description: putative protein; protein id: At5g10190
  misc_feature (1)..(223): NCBI GI NO: 15234530 NR Description: putative protein; protein id: At4g36790.1
  misc_feature (80)..(223): NCBI GI NO: 11358310 NR Description: hypothetical protein T31P16
  misc_feature (1)..(129): NCBI GI NO: 11358310 NR Description: hypothetical protein T31P16
  misc_feature (1)..(222): NCBI GI NO: 15224194 NR Description: hypothetical protein; protein id: At2g18590.1
  misc_feature (1)..(177): NCBI GI NO: 7494336 NR Description: membrane transporter PFB0275w - malaria parasite
  misc_feature (1)..(177): NCBI GI NO: 23593282 NR Description: hypothetical protein, conserved
  misc_feature (1)..(177): NCBI GI NO: 23480447 NR Description: major facilitator superfamily protein
  misc_feature (1)..(173): NCBI GI NO: 22987977 NR Description: hypothetical protein [Burkholderia fungorum]
  misc_feature (218)..(218): Xaa is any aa, unknown or other
MERADESLLPGVYKEVGLALHTDPTGLGSLTLLRSMVQAACYPLAAYMAIRHNRAHVIALGAFLWSAATFLVAFSSTFFQVAVSRALNGIGLALVAPAIQSLVADSTDDANRGTAFGWLQLTANIGSILGGLCSVLIAPLTFMGIPGWRVAFYIVGVISVIVGVLVRVFANDPHFVKDGVDVSNQPGSRKPFCTEVKDLVREADTVIKIRSFQIIVAXGVTGSF

SEQ ID NO: 1423 - DNA, 1855 bp, Arabidopsis thaliana
  misc_feature (1)..(1855): Ceres Seq. ID no. 13575995
ggaagaacaaacactgaaacaaaagagaaaaatcccaaagctagaaaccctaatcccaaacgaatcaatggagcgagacgaagaagcgagtggaccgatgatggagatgtgcactaacggcggcgaagagacgtctaatcgaagacctatcataagtggcgaaccgctcgacatcgaggcctacgcggctctctacaaaggtcgcacgaagatcatgcggcttctcttcatcgctaaccactgcggaggaaaccacgcgcttcagtttgacgcgttgaggatggcttacgatgagatcaaaaagggtgagaatacgcagttgttcagagaagtggtcaataagattggcaacaggcttggggaaaagtatgggatggatcttgcttggtgtgaggccgtcgatcgtcgtgctgaacagaagaaagtaaagctggagaatgagctcagttcttatcggacaaatttgatcaaggaaagcatcagaatgggttacaatgactttggagatttctattacgcatgtggtatgctcggagatgctttcaagaactatatccgaacacgcgactactgcactacgacaaagcacatcattcacatgtgtatgaatgcgattcttgtcagcatcgaaatgggtcagtttactcatgttacaagctatgtgaacaaggcagagcagaatcctgaaacccttgaacctatggttaatgcaaaactgcgatgtgcatctggattggctcatttggagttgaagaagtacaagctagctgctcgtaagttcttagatgttaacccagaacttggaaattcctataatgaagtcattgctcctcaagatattgccacctatggtggactctgtgccctggcaagctttgatcgatcagaattgaagcaaaaagtcattgacaatatcaacttccggaatttcttggagctagtgcctgatgtgagggaacttatcaacgatttctattcaagccgctatgcttcctgcctggaatatcttgcaagtctcaaatcgaatctgctgctggacatccatcttcatgatcacgttgacacactatatgatcagataaggaagaaggcactgatccagtacacattgccatttgtctctgttgatttgagcaggatggccgatgcattcaagactagcgtctctggtctagagaaagaacttgaagccttgatcacagacaaccagattcaggcaaggattgattcacacaacaaaatcctctatgcaagacacgcggatcagaggaatgcaactttccaaaaggtacttcagatgggaaacgaattcgatagagatgtcagggcgatgctgttaagagccaacctcctgaaacatgagtatcatgccagatcggcaaggaaactttgatgacatctgctttgctaaactgagaggaatattcaagggtgttttttcaagattcgaaccaaacgagaaattgggcaagattacttttttgtaagaaccaagtgtttcaatgagtcgatgacatttagagtaagtaaaggttttattctaagatggacagtccattattaatcaactattgaatgatattgccttttaaatgagtcttaggtagcatcgcaataactccatgtttactcaaaactcacaaaccatgaagttaagaatccgccaaatttggaagatgggccaactctaaatttactcaccccaatactccatttattttgggttgcattgatgaaagtaatttgtataattgataggttgtgtatcaaaaaccggatctcattatttgtgatctttgcattagttatttttggagactaataaccatctttctaaactgtgagtaatacaaat

SEQ ID NO: 1424 - protein, 463 aa, Arabidopsis thaliana
  peptide (1)..(463): Ceres Seq. ID no. 13575996
  misc_feature (315)..(419): Pfam Name: Pfam Description:  PCI domain
  misc_feature (23)..(463): NCBI GI NO: 18411857 NR Description: COP9 complex subunit, FUS6 [Arabidopsis thaliana]
  misc_feature (23)..(463): NCBI GI NO: 432446 NR Description: FUS6
  misc_feature (23)..(463): NCBI GI NO: 26450149 NR Description: putative FUSCA protein FUS6 [Arabidopsis thaliana]
  misc_feature (23)..(463): NCBI GI NO: 11282867 NR Description: FUSCA PROTEIN FUS6 - Arabidopsis thaliana
  misc_feature (23)..(462): NCBI GI NO: 7208213 NR Description: constitutive photomorphogenic 11
  misc_feature (23)..(462): NCBI GI NO: 10443485 NR Description: rCOP11 protein [Oryza sativa]
  misc_feature (96)..(459): NCBI GI NO: 21703742 NR Description: G protein pathway suppressor 1 [Mus musculus]
  misc_feature (96)..(459): NCBI GI NO: 5713317 NR Description: G protein pathway suppressor 1
  misc_feature (96)..(459): NCBI GI NO: 20981690 NR Description: COP9 signalosome complex subunit 1
  misc_feature (96)..(459): NCBI GI NO: 7512468 NR Description: fusca protein homolog Gps1 - human
EEQTLKQKRKIPKLETLIPNESMERDEEASGPMMEMCTNGGEETSNRRPIISGEPLDIEAYAALYKGRTKIMRLLFIANHCGGNHALQFDALRMAYDEIKKGENTQLFREVVNKIGNRLGEKYGMDLAWCEAVDRRAEQKKVKLENELSSYRTNLIKESIRMGYNDFGDFYYACGMLGDAFKNYIRTRDYCTTTKHIIHMCMNAILVSIEMGQFTHVTSYVNKAEQNPETLEPMVNAKLRCASGLAHLELKKYKLAARKFLDVNPELGNSYNEVIAPQDIATYGGLCALASFDRSELKQKVIDNINFRNFLELVPDVRELINDFYSSRYASCLEYLASLKSNLLLDIHLHDHVDTLYDQIRKKALIQYTLPFVSVDLSRMADAFKTSVSGLEKELEALITDNQIQARIDSHNKILYARHADQRNATFQKVLQMGNEFDRDVRAMLLRANLLKHEYHARSARKL

SEQ ID NO: 1425 - protein, 441 aa, Arabidopsis thaliana
  peptide (1)..(441): Ceres Seq. ID no. 13575997
  misc_feature (293)..(397): Pfam Name: Pfam Description:  PCI domain
  misc_feature (1)..(441): NCBI GI NO: 18411857 NR Description: COP9 complex subunit, FUS6 [Arabidopsis thaliana]
  misc_feature (1)..(441): NCBI GI NO: 432446 NR Description: FUS6
  misc_feature (1)..(441): NCBI GI NO: 26450149 NR Description: putative FUSCA protein FUS6 [Arabidopsis thaliana]
  misc_feature (1)..(441): NCBI GI NO: 11282867 NR Description: FUSCA PROTEIN FUS6 - Arabidopsis thaliana
  misc_feature (1)..(440): NCBI GI NO: 7208213 NR Description: constitutive photomorphogenic 11
  misc_feature (1)..(440): NCBI GI NO: 10443485 NR Description: rCOP11 protein [Oryza sativa]
  misc_feature (74)..(437): NCBI GI NO: 21703742 NR Description: G protein pathway suppressor 1 [Mus musculus]
  misc_feature (74)..(437): NCBI GI NO: 5713317 NR Description: G protein pathway suppressor 1
  misc_feature (74)..(437): NCBI GI NO: 7512468 NR Description: fusca protein homolog Gps1 - human
  misc_feature (74)..(437): NCBI GI NO: 20981690 NR Description: COP9 signalosome complex subunit 1
MERDEEASGPMMEMCTNGGEETSNRRPIISGEPLDIEAYAALYKGRTKIMRLLFIANHCGGNHALQFDALRMAYDEIKKGENTQLFREVVNKIGNRLGEKYGMDLAWCEAVDRRAEQKKVKLENELSSYRTNLIKESIRMGYNDFGDFYYACGMLGDAFKNYIRTRDYCTTTKHIIHMCMNAILVSIEMGQFTHVTSYVNKAEQNPETLEPMVNAKLRCASGLAHLELKKYKLAARKFLDVNPELGNSYNEVIAPQDIATYGGLCALASFDRSELKQKVIDNINFRNFLELVPDVRELINDFYSSRYASCLEYLASLKSNLLLDIHLHDHVDTLYDQIRKKALIQYTLPFVSVDLSRMADAFKTSVSGLEKELEALITDNQIQARIDSHNKILYARHADQRNATFQKVLQMGNEFDRDVRAMLLRANLLKHEYHARSARKL

SEQ ID NO: 1426 - protein, 431 aa, Arabidopsis thaliana
  peptide (1)..(431): Ceres Seq. ID no. 13575998
  misc_feature (283)..(387): Pfam Name: Pfam Description:  PCI domain
  misc_feature (1)..(431): NCBI GI NO: 18411857 NR Description: COP9 complex subunit, FUS6 [Arabidopsis thaliana]
  misc_feature (1)..(431): NCBI GI NO: 432446 NR Description: FUS6
  misc_feature (1)..(431): NCBI GI NO: 26450149 NR Description: putative FUSCA protein FUS6 [Arabidopsis thaliana]
  misc_feature (1)..(431): NCBI GI NO: 11282867 NR Description: FUSCA PROTEIN FUS6 - Arabidopsis thaliana
  misc_feature (1)..(430): NCBI GI NO: 7208213 NR Description: constitutive photomorphogenic 11
  misc_feature (1)..(430): NCBI GI NO: 10443485 NR Description: rCOP11 protein [Oryza sativa]
  misc_feature (64)..(427): NCBI GI NO: 21703742 NR Description: G protein pathway suppressor 1 [Mus musculus]
  misc_feature (64)..(427): NCBI GI NO: 5713317 NR Description: G protein pathway suppressor 1
  misc_feature (64)..(427): NCBI GI NO: 7512468 NR Description: fusca protein homolog Gps1 - human
  misc_feature (64)..(427): NCBI GI NO: 20981690 NR Description: COP9 signalosome complex subunit 1
MMEMCTNGGEETSNRRPIISGEPLDIEAYAALYKGRTKIMRLLFIANHCGGNHALQFDALRMAYDEIKKGENTQLFREVVNKIGNRLGEKYGMDLAWCEAVDRRAEQKKVKLENELSSYRTNLIKESIRMGYNDFGDFYYACGMLGDAFKNYIRTRDYCTTTKHIIHMCMNAILVSIEMGQFTHVTSYVNKAEQNPETLEPMVNAKLRCASGLAHLELKKYKLAARKFLDVNPELGNSYNEVIAPQDIATYGGLCALASFDRSELKQKVIDNINFRNFLELVPDVRELINDFYSSRYASCLEYLASLKSNLLLDIHLHDHVDTLYDQIRKKALIQYTLPFVSVDLSRMADAFKTSVSGLEKELEALITDNQIQARIDSHNKILYARHADQRNATFQKVLQMGNEFDRDVRAMLLRANLLKHEYHARSARKL

SEQ ID NO: 1427 - DNA, 1102 bp, Arabidopsis thaliana
  misc_feature (1)..(1102): Ceres Seq. ID no. 13489044
aaaagaagagatggagaaaagggaagatggagggatcttgacatatgatggtagatatgttatgtacaatgtactcggtaacattttcgagctatcttcaaaatacatccctcctattgaacccatcggccgaggtgcttatggtattgtctgctgtgctacaaactcagagacaaatgaagaggttgctataaagaagatagcaaacgcgtttgacaacagagttgatgctaaaagaactctccgagagatcaagctcctttcccacatggatcatgacaatgttatcaaaattaaagatataattgagctaccagagaaagaaaggttcgaagatgtatatattgtttatgagttgatggatacagatttgcaccagatcattagatccactcaaactctaactgatgaccattgtcagtacttcctttaccaaattttgagaggccttaagtacatacactctgcaaatgttcttcaccgcgatctgaaaccgagcaacttggttctgaatacgaactgtgacctgaaaatctgtgattttgggctagcaagaacgtcgaatgagacagagataatgactgagtatgttgtgacgagatggtaccgtgcacctgaattgcttctcaacagctctgaatacacaggagctattgacatttggtctgttggttgcattttcatggagatacttagaagagagacgcttttccctggtaaagattacgttcagcagctgaaacttattactgagctcttagggtcaccagatgactcggatctcgacttcttgagaagcgataatgcgcggaagtacgtaaaacaactcccacatgttcaaaaacaatcattcagagaaaagtttccaaacatttccccaatggctctagatcttgctgaaaagatgctagttttcgatccttcaaagcgcatcacagtggatgaagcattgaagcagccgtacttggcaagtctccatgagatcaacgaagaaccaacatgtcctactcctttcagctttgactttgaggagacagccttagatgaacaagacatcaaggagcttgtctggagagagtctttacacttcaagaatatgtaa

SEQ ID NO: 1428 - protein, 366 aa, Arabidopsis thaliana
  peptide (1)..(366): Ceres Seq. ID no. 13489045
  misc_feature (36)..(322): Pfam Name: Pfam Description:  Protein kinase domain
  misc_feature (4)..(366): NCBI GI NO: 15223026 NR Description: mitogen-activated protein kinase
  misc_feature (3)..(363): NCBI GI NO: 4456682 NR Description: MAP kinase [Medicago sativa]
  misc_feature (2)..(363): NCBI GI NO: 2499616 NR Description: MITOGEN-ACTIVATED PROTEIN KINASE HOMOLOG NTF6
  misc_feature (2)..(363): NCBI GI NO: 12718824 NR Description: NRK1 MAPK [Nicotiana tabacum]
  misc_feature (2)..(363): NCBI GI NO: 21165529 NR Description: mitogen-activated protein kinase
  misc_feature (7)..(363): NCBI GI NO: 21165527 NR Description: mitogen-activated protein kinase
  misc_feature (11)..(363): NCBI GI NO: 25052804 NR Description: mitogen-activated protein kinase 4
  misc_feature (12)..(363): NCBI GI NO: 27312014 NR Description: mitogen-activated protein kinase
  misc_feature (11)..(363): NCBI GI NO: 15234152 NR Description: mitogen-activated protein kinase
  misc_feature (14)..(363): NCBI GI NO: 25387109 NR Description: probable mitogen-activated protein kinase
KEEMEKREDGGILTYDGRYVMYNVLGNIFELSSKYIPPIEPIGRGAYGIVCCATNSETNEEVAIKKIANAFDNRVDAKRTLREIKLLSHMDHDNVIKIKDIIELPEKERFEDVYIVYELMDTDLHQIIRSTQTLTDDHCQYFLYQILRGLKYIHSANVLHRDLKPSNLVLNTNCDLKICDFGLARTSNETEIMTEYVVTRWYRAPELLLNSSEYTGAIDIWSVGCIFMEILRRETLFPGKDYVQQLKLITELLGSPDDSDLDFLRSDNARKYVKQLPHVQKQSFREKFPNISPMALDLAEKMLVFDPSKRITVDEALKQPYLASLHEINEEPTCPTPFSFDFEETALDEQDIKELVWRESLHFKNM

SEQ ID NO: 1429 - protein, 363 aa, Arabidopsis thaliana
  peptide (1)..(363): Ceres Seq. ID no. 13489046
  misc_feature (33)..(319): Pfam Name: Pfam Description:  Protein kinase domain
  misc_feature (1)..(363): NCBI GI NO: 15223026 NR Description: mitogen-activated protein kinase
  misc_feature (1)..(360): NCBI GI NO: 4456682 NR Description: MAP kinase [Medicago sativa]
  misc_feature (1)..(360): NCBI GI NO: 2499616 NR Description: MITOGEN-ACTIVATED PROTEIN KINASE HOMOLOG NTF6
  misc_feature (1)..(360): NCBI GI NO: 12718824 NR Description: NRK1 MAPK [Nicotiana tabacum]
  misc_feature (1)..(360): NCBI GI NO: 21165529 NR Description: mitogen-activated protein kinase
  misc_feature (4)..(360): NCBI GI NO: 21165527 NR Description: mitogen-activated protein kinase
  misc_feature (8)..(360): NCBI GI NO: 25052804 NR Description: mitogen-activated protein kinase 4
  misc_feature (9)..(360): NCBI GI NO: 27312014 NR Description: mitogen-activated protein kinase
  misc_feature (8)..(360): NCBI GI NO: 15234152 NR Description: mitogen-activated protein kinase
  misc_feature (11)..(360): NCBI GI NO: 25387109 NR Description: probable mitogen-activated protein kinase
MEKREDGGILTYDGRYVMYNVLGNIFELSSKYIPPIEPIGRGAYGIVCCATNSETNEEVAIKKIANAFDNRVDAKRTLREIKLLSHMDHDNVIKIKDIIELPEKERFEDVYIVYELMDTDLHQIIRSTQTLTDDHCQYFLYQILRGLKYIHSANVLHRDLKPSNLVLNTNCDLKICDFGLARTSNETEIMTEYVVTRWYRAPELLLNSSEYTGAIDIWSVGCIFMEILRRETLFPGKDYVQQLKLITELLGSPDDSDLDFLRSDNARKYVKQLPHVQKQSFREKFPNISPMALDLAEKMLVFDPSKRITVDEALKQPYLASLHEINEEPTCPTPFSFDFEETALDEQDIKELVWRESLHFKNM

SEQ ID NO: 1430 - protein, 346 aa, Arabidopsis thaliana
  peptide (1)..(346): Ceres Seq. ID no. 13489047
  misc_feature (16)..(302): Pfam Name: Pfam Description:  Protein kinase domain
  misc_feature (1)..(346): NCBI GI NO: 15223026 NR Description: mitogen-activated protein kinase
  misc_feature (1)..(343): NCBI GI NO: 4456682 NR Description: MAP kinase [Medicago sativa]
  misc_feature (1)..(343): NCBI GI NO: 2499616 NR Description: MITOGEN-ACTIVATED PROTEIN KINASE HOMOLOG NTF6
  misc_feature (1)..(343): NCBI GI NO: 12718824 NR Description: NRK1 MAPK [Nicotiana tabacum]
  misc_feature (1)..(343): NCBI GI NO: 21165529 NR Description: mitogen-activated protein kinase
  misc_feature (1)..(343): NCBI GI NO: 21165527 NR Description: mitogen-activated protein kinase
  misc_feature (1)..(343): NCBI GI NO: 25052804 NR Description: mitogen-activated protein kinase 4
  misc_feature (1)..(343): NCBI GI NO: 27312014 NR Description: mitogen-activated protein kinase
  misc_feature (1)..(343): NCBI GI NO: 15234152 NR Description: mitogen-activated protein kinase
  misc_feature (1)..(343): NCBI GI NO: 25387109 NR Description: probable mitogen-activated protein kinase
MYNVLGNIFELSSKYIPPIEPIGRGAYGIVCCATNSETNEEVAIKKIANAFDNRVDAKRTLREIKLLSHMDHDNVIKIKDIIELPEKERFEDVYIVYELMDTDLHQIIRSTQTLTDDHCQYFLYQILRGLKYIHSANVLHRDLKPSNLVLNTNCDLKICDFGLARTSNETEIMTEYVVTRWYRAPELLLNSSEYTGAIDIWSVGCIFMEILRRETLFPGKDYVQQLKLITELLGSPDDSDLDFLRSDNARKYVKQLPHVQKQSFREKFPNISPMALDLAEKMLVFDPSKRITVDEALKQPYLASLHEINEEPTCPTPFSFDFEETALDEQDIKELVWRESLHFKNM

SEQ ID NO: 1431 - DNA, 1481 bp, Arabidopsis thaliana
  misc_feature (1)..(1481): Ceres Seq. ID no. 13646085
atctccaccttctatttattccgccaaaagcctttacggttactacaagccatccaacaatgtcttcttcttcttccgtaagaatctctctctccttcattttcttggctctgctaatctcaccggctgtgtcacaaacatgtaagtcacagactttttccggcgataaaacttaccctcactgccttgacctccctcaactcaaagccttccttcattattcctatgatgcctctaacacaactctggccgtcgtcttctctgctccgccggcaaagcctggcggatggatcgcgtgggcgattaatccaaaggctaccggtatggtcggatctcaaacccttgtcgcttacaaggatccaggtaatggtgttgccgtggtgaagacgctaaacattagctcctatagctcgctgattccgtcgaagctggcgtttgatgtttgggatatgaaagccgaggaggcggcgagagatggaggaagtttgagaatctttgctagggttaaggttccggctgatttggtggcaaagggaaaggttaatcaggtttggcaagttggtcctgaattaggtcctggtggaatgattgggaggcacgctttcgactcggcgaatctcgcttctatgagctctcttgatttaaaaggtgacaacagcggtggcacaatctctggaggcgacgaggtaaatgccaagatcaagaacagaaatattcatgggatattaaacgcagtgagttggggaattttgtttccgataggagcaataatagccaggtacatgagagtatttgactcggccgatccggcctggttttacctccacgtttcttgtcaattctctgcttatgtcatcggtgttgccggttgggctaccggacttaagctcggtaacgagtccgagggtattcgcttctccgcccaccgtaacatcggcattgccctcttcacccttgccaccattcagatgtttgcgatgttgttgcggcctaagaaagatcacaagtacagattctattggaatatctaccaccatggagtcggttatgcgatcctcacccttgggatcattaatgtcttcaaaggtctcaacatcttgaaaccacaagacacgtacaagacggcttacattgcagtgattgccgttcttggaggcattgctttgctcttagaagccatcacttgggtcgttgtactcaagagaaaatcaaacaactcaatgaagcctcttaggacctaagccaacaaagatctggtcaacttattaaaggttcatctgcagttgttgttattaatttattatgagctcttgtattattaatgtttatagaacaagggtgtcacatgtattattgttctcttgttttgtagctttttggttttgtttgttgagtatttcttgggttatgaattcttgtaggggatgaatgtttttgaaatagttcttattttactttgaatcaatgagttttttcagttc

SEQ ID NO: 1432 - protein, 412 aa, Arabidopsis thaliana
  peptide (1)..(412): Ceres Seq. ID no. 13646086
  misc_feature (108)..(246): Pfam Name: DUF568 Pfam Description: Protein of unknown function
  misc_feature (20)..(412): NCBI GI NO: 18404500 NR Description: auxin-induced protein family
  misc_feature (23)..(411): NCBI GI NO: 15235545 NR Description: auxin-induced protein, putative
  misc_feature (23)..(411): NCBI GI NO: 21593814 NR Description: unknown [Arabidopsis thaliana]
  misc_feature (20)..(408): NCBI GI NO: 15238124 NR Description: auxin-induced protein, putative
  misc_feature (33)..(409): NCBI GI NO: 24414270 NR Description: Putative membrane protein
  misc_feature (15)..(402): NCBI GI NO: 18086563 NR Description: AT4g17280/dl4675c [Arabidopsis thaliana]
  misc_feature (20)..(403): NCBI GI NO: 18421491 NR Description: auxin-induced protein family
  misc_feature (20)..(403): NCBI GI NO: 21592781 NR Description: putative membrane protein [Arabidopsis thaliana]
  misc_feature (31)..(408): NCBI GI NO: 13785213 NR Description: putative membrane protein [Solanum tuberosum]
  misc_feature (31)..(408): NCBI GI NO: 13785207 NR Description: putative membrane protein [Solanum tuberosum]
LHLLFIPPKAFTVTTSHPTMSSSSSVRISLSFIFLALLISPAVSQTCKSQTFSGDKTYPHCLDLPQLKAFLHYSYDASNTTLAVVFSAPPAKPGGWIAWAINPKATGMVGSQTLVAYKDPGNGVAVVKTLNISSYSSLIPSKLAFDVWDMKAEEAARDGGSLRIFARVKVPADLVAKGKVNQVWQVGPELGPGGMIGRHAFDSANLASMSSLDLKGDNSGGTISGGDEVNAKIKNRNIHGILNAVSWGILFPIGAIIARYMRVFDSADPAWFYLHVSCQFSAYVIGVAGWATGLKLGNESEGIRFSAHRNIGIALFTLATIQMFAMLLRPKKDHKYRFYWNIYHHGVGYAILTLGIINVFKGLNILKPQDTYKTAYIAVIAVLGGIALLLEAITWVVVLKRKSNNSMKPLRT

SEQ ID NO: 1433 - protein, 393 aa, Arabidopsis thaliana
  peptide (1)..(393): Ceres Seq. ID no. 13646087
  misc_feature (89)..(227): Pfam Name: DUF568 Pfam Description: Protein of unknown function
  misc_feature (1)..(393): NCBI GI NO: 18404500 NR Description: auxin-induced protein family
  misc_feature (4)..(392): NCBI GI NO: 15235545 NR Description: auxin-induced protein, putative
  misc_feature (4)..(392): NCBI GI NO: 21593814 NR Description: unknown [Arabidopsis thaliana]
  misc_feature (1)..(389): NCBI GI NO: 15238124 NR Description: auxin-induced protein, putative
  misc_feature (14)..(390): NCBI GI NO: 24414270 NR Description: Putative membrane protein
  misc_feature (1)..(383): NCBI GI NO: 18086563 NR Description: AT4g17280/dl4675c [Arabidopsis thaliana]
  misc_feature (1)..(384): NCBI GI NO: 18421491 NR Description: auxin-induced protein family
  misc_feature (1)..(384): NCBI GI NO: 21592781 NR Description: putative membrane protein [Arabidopsis thaliana]
  misc_feature (12)..(389): NCBI GI NO: 13785213 NR Description: putative membrane protein [Solanum tuberosum]
  misc_feature (12)..(389): NCBI GI NO: 13785207 NR Description: putative membrane protein [Solanum tuberosum]
MSSSSSVRISLSFIFLALLISPAVSQTCKSQTFSGDKTYPHCLDLPQLKAFLHYSYDASNTTLAVVFSAPPAKPGGWIAWAINPKATGMVGSQTLVAYKDPGNGVAVVKTLNISSYSSLIPSKLAFDVWDMKAEEAARDGGSLRIFARVKVPADLVAKGKVNQVWQVGPELGPGGMIGRHAFDSANLASMSSLDLKGDNSGGTISGGDEVNAKIKNRNIHGILNAVSWGILFPIGAIIARYMRVFDSADPAWFYLHVSCQFSAYVIGVAGWATGLKLGNESEGIRFSAHRNIGIALFTLATIQMFAMLLRPKKDHKYRFYWNIYHHGVGYAILTLGIINVFKGLNILKPQDTYKTAYIAVIAVLGGIALLLEAITWVVVLKRKSNNSMKPLRT

SEQ ID NO: 1434 - protein, 305 aa, Arabidopsis thaliana
  peptide (1)..(305): Ceres Seq. ID no. 13646088
  misc_feature (1)..(139): Pfam Name: DUF568 Pfam Description: Protein of unknown function
  misc_feature (1)..(305): NCBI GI NO: 18404500 NR Description: auxin-induced protein family
  misc_feature (1)..(304): NCBI GI NO: 15235545 NR Description: auxin-induced protein, putative
  misc_feature (1)..(304): NCBI GI NO: 21593814 NR Description: unknown [Arabidopsis thaliana]
  misc_feature (1)..(301): NCBI GI NO: 15238124 NR Description: auxin-induced protein, putative
  misc_feature (1)..(302): NCBI GI NO: 24414270 NR Description: Putative membrane protein
  misc_feature (1)..(295): NCBI GI NO: 18086563 NR Description: AT4g17280/dl4675c [Arabidopsis thaliana]
  misc_feature (1)..(296): NCBI GI NO: 18421491 NR Description: auxin-induced protein family
  misc_feature (1)..(296): NCBI GI NO: 21592781 NR Description: putative membrane protein [Arabidopsis thaliana]
  misc_feature (1)..(301): NCBI GI NO: 13785213 NR Description: putative membrane protein [Solanum tuberosum]
  misc_feature (1)..(301): NCBI GI NO: 13785207 NR Description: putative membrane protein [Solanum tuberosum]
MVGSQTLVAYKDPGNGVAVVKTLNISSYSSLIPSKLAFDVWDMKAEEAARDGGSLRIFARVKVPADLVAKGKVNQVWQVGPELGPGGMIGRHAFDSANLASMSSLDLKGDNSGGTISGGDEVNAKIKNRNIHGILNAVSWGILFPIGAIIARYMRVFDSADPAWFYLHVSCQFSAYVIGVAGWATGLKLGNESEGIRFSAHRNIGIALFTLATIQMFAMLLRPKKDHKYRFYWNIYHHGVGYAILTLGIINVFKGLNILKPQDTYKTAYIAVIAVLGGIALLLEAITWVVVLKRKSNNSMKPLRT

SEQ ID NO: 1435 - DNA, 1391 bp, Arabidopsis thaliana
  misc_feature (1)..(1391): Ceres Seq. ID no. 12336525
aggtccgtcgcttctcttccatttcttctcattttcgattttgattcttatttctttccagtagctcctgctctgtgaatttctccgctcacgatagatctgcttatactccttacattcaaccttagatctgaaacatgggtgcaggtggaagaatgccggttcctacttcttccaagaaatcggaaaccgacaccacaaagcgtgtgccgtgcgagaaaccgcctttctcggtgggagatctgaagaaagcaatcccgccgcattgtttcaaacgctcaatccctcgctctttctcctaccttatcagtgacatcattatagcctcatgcttctactacgtcgccaccaattacttctctctcctccctcagcctctctcttacttggcttggccactctattgggcctgtcaaggctgtgtcctaactggtatctgggtcatagcccacgaatgcggtcaccacgcattcagcgactaccaatggctggatgacacagttggtcttatcttccattccttcctcctcgtcccttacttctcctggaagtatagtcatcgccgtcaccattccaacactggatccctcgaaagagatgaagtatttgtcccaaagcagaaatcagcaatcaagtggtacgggaaatacctcaacaaccctcttggacgcatcatgatgttaaccgtccagtttgtcctcgggtggcccttgtacttagcctttaacgtctctggcagaccgtatgacgggttcgcttgccatttcttccccaacgctcccatctacaatgaccgagaacgcctccagatatacctctctgatgcgggtattctagccgtctgttttggtctttaccgttacgctgctgcacaagggatggcctcgatgatctgcctctacggagtaccgcttctgatagtgaatgcgttcctcgtcttgatcacttacttgcagcacactcatccctcgttgcctcactacgattcatcagagtgggactggctcaggggagctttggctaccgtagacagagactacggaatcttgaacaaggtgttccacaacattacagacacacacgtggctcatcacctgttctcgacaatgccgcattataacgcaatggaagctacaaaggcgataaagccaattctggggagaccattaccagttcgatggaacaccgtggtatgtggcgatgtatagggaggcaaaggagtgtatctatgtagaaccggacagggaaggtgacaagaaaggtgtgtactggtacaacaataagttatgaggatgatggtgaagaaattgtcgacttttctcttgtctgtttgtcttttgttaaagaagctatgcttcgttttaataatcttattgtccattttgttgtgc

SEQ ID NO: 1436 - protein, 356 aa, Arabidopsis thaliana
  peptide (1)..(356): Ceres Seq. ID no. 12336526
  misc_feature (89)..(340): Pfam Name: Pfam Description:  Fatty acid desaturase
  misc_feature (1)..(341): NCBI GI NO: 15229956 NR Description: omega-6 fatty acid desaturase
  misc_feature (1)..(341): NCBI GI NO: 21536781 NR Description: omega-6 fatty acid desaturase
  misc_feature (1)..(341): NCBI GI NO: 4378875 NR Description: delta-12 desaturase [Brassica carinata]
  misc_feature (1)..(341): NCBI GI NO: 3334184 NR Description: Omega-6 fatty acid desaturase
  misc_feature (1)..(341): NCBI GI NO: 20520624 NR Description: fatty acid desaturase 2 [Brassica rapa]
  misc_feature (1)..(341): NCBI GI NO: 8705229 NR Description: delta-12 oleate desaturase [Brassica napus]
  misc_feature (1)..(341): NCBI GI NO: 3452129 NR Description: bifunctional oleate 12-hydroxylase:desaturase
  misc_feature (1)..(341): NCBI GI NO: 27261181 NR Description: delta 12 oleic acid desaturase FAD2
  misc_feature (1)..(341): NCBI GI NO: 17225582 NR Description: delta-12 fatty acid desaturase
  misc_feature (1)..(341): NCBI GI NO: 3417601 NR Description: delta-12 fatty acid desaturase
MGAGGRMPVPTSSKKSETDTTKRVPCEKPPFSVGDLKKAIPPHCFKRSIPRSFSYLISDIIIASCFYYVATNYFSLLPQPLSYLAWPLYWACQGCVLTGIWVIAHECGHHAFSDYQWLDDTVGLIFHSFLLVPYFSWKYSHRRHHSNTGSLERDEVFVPKQKSAIKWYGKYLNNPLGRIMMLTVQFVLGWPLYLAFNVSGRPYDGFACHFFPNAPIYNDRERLQIYLSDAGILAVCFGLYRYAAAQGMASMICLYGVPLLIVNAFLVLITYLQHTHPSLPHYDSSEWDWLRGALATVDRDYGILNKVFHNITDTHVAHHLFSTMPHYNAMEATKAIKPILGRPLPVRWNTVVCGDV

SEQ ID NO: 1437 - protein, 350 aa, Arabidopsis thaliana
  peptide (1)..(350): Ceres Seq. ID no. 12336527
  misc_feature (83)..(334): Pfam Name: Pfam Description:  Fatty acid desaturase
  misc_feature (1)..(335): NCBI GI NO: 15229956 NR Description: omega-6 fatty acid desaturase
  misc_feature (1)..(335): NCBI GI NO: 21536781 NR Description: omega-6 fatty acid desaturase
  misc_feature (1)..(335): NCBI GI NO: 4378875 NR Description: delta-12 desaturase [Brassica carinata]
  misc_feature (1)..(335): NCBI GI NO: 3334184 NR Description: Omega-6 fatty acid desaturase
  misc_feature (1)..(335): NCBI GI NO: 20520624 NR Description: fatty acid desaturase 2 [Brassica rapa]
  misc_feature (1)..(335): NCBI GI NO: 8705229 NR Description: delta-12 oleate desaturase [Brassica napus]
  misc_feature (1)..(335): NCBI GI NO: 3452129 NR Description: bifunctional oleate 12-hydroxylase:desaturase
  misc_feature (1)..(335): NCBI GI NO: 27261181 NR Description: delta 12 oleic acid desaturase FAD2
  misc_feature (1)..(335): NCBI GI NO: 17225582 NR Description: delta-12 fatty acid desaturase
  misc_feature (1)..(335): NCBI GI NO: 3417601 NR Description: delta-12 fatty acid desaturase
MPVPTSSKKSETDTTKRVPCEKPPFSVGDLKKAIPPHCFKRSIPRSFSYLISDIIIASCFYYVATNYFSLLPQPLSYLAWPLYWACQGCVLTGIWVIAHECGHHAFSDYQWLDDTVGLIFHSFLLVPYFSWKYSHRRHHSNTGSLERDEVFVPKQKSAIKWYGKYLNNPLGRIMMLTVQFVLGWPLYLAFNVSGRPYDGFACHFFPNAPIYNDRERLQIYLSDAGILAVCFGLYRYAAAQGMASMICLYGVPLLIVNAFLVLITYLQHTHPSLPHYDSSEWDWLRGALATVDRDYGILNKVFHNITDTHVAHHLFSTMPHYNAMEATKAIKPILGRPLPVRWNTVVCGDV

SEQ ID NO: 1438 - DNA, 1053 bp, Arabidopsis thaliana
  misc_feature (1)..(1053): Ceres Seq. ID no. 13580576
aaaagaggaccaaaaggtcaaaaacgaataaactgtatctctcattcgccggagtttccagccgtttctttccgattctcggatttttcctgggaatcaaacgcatcgccgagaatcggaagagagggataaggttatggctcctcatggagatggattaagtgacatcgaagaacctgaggtcgatgctcaatcggagattcttcgaccgatctcctcagtcgtcttcgtcatcgctatgcaagcggaggctcttcctttggtcaacaagttcggactctctgaaactactgattcgccgcttggtaaaggattgccctgggttctgtatcacggcgtgcataaagatcttcgaatcaatgtagtttgccccggaagagatgcagctttagggatcgatagtgttggaactgttccagcttctctcataacttttgcttccatccaagcattaaaacctgacatcataatcaatgccggaacctgcggtggcttcaaggtcaaaggagccaacataggcgatgtattccttgtatctgatgttgtgtttcatgatagaagaataccaattccgatgtttgatctgtatggagttggtctccgtcaggcattctcgacacccaatctcctcaaggaactcaatttgaagattggcaggttatctactggtgactcgttggatatgtccacgcaagatgaaacattgatcattgccaatgatgctacgctaaaggacatggagggtgctgccgtggcgtatgtggctgatcttctgaaaataccagtcgtgttcctcaaagccgtgaccgatctagtggacggagataaacctacagcagaagagttcttgcagaacttgacagttgtgaccgctgcattagagggaactgctactaaagtgatcaacttcatcaatgggagaaacctttcggacctttaacttctgttctcttccttttttatggagagtgattttttaaaatgcgttcaacgtgcttgttgcagtttcactgatttccagtgatcatatttctcgttaataaatttcaagtt

SEQ ID NO: 1439 - protein, 267 aa, Arabidopsis thaliana
  peptide (1)..(267): Ceres Seq. ID no. 13580577
  misc_feature (28)..(252): Pfam Name: Pfam Description:  Phosphorylase family
  misc_feature (1)..(267): NCBI GI NO: 15234791 NR Description: expressed protein [Arabidopsis thaliana]
  misc_feature (1)..(267): NCBI GI NO: 7406708 NR Description: putative ripening-related protein [Vitis vinifera]
  misc_feature (1)..(267): NCBI GI NO: 34897892 NR Description: ESTs C28489
  misc_feature (1)..(267): NCBI GI NO: 18087497 NR Description: methylthioadenosine/ S-adenosyl homocysteine nucleosidase
  misc_feature (24)..(267): NCBI GI NO: 30690140 NR Description: expressed protein [Arabidopsis thaliana]
  misc_feature (68)..(267): NCBI GI NO: 7486865 NR Description: hypothetical protein T11I11
  misc_feature (80)..(259): NCBI GI NO: 23037085 NR Description: hypothetical protein [Oenococcus oeni MCW]
  misc_feature (81)..(238): NCBI GI NO: 23467396 NR Description: hypothetical protein [Haemophilus somnus 129PT]
  misc_feature (80)..(248): NCBI GI NO: 16273135 NR Description: pfs protein [Haemophilus influenzae Rd]
  misc_feature (80)..(232): NCBI GI NO: 24372900 NR Description: 5-methylthioadenosine nucleosidase/ S-adenosylhomocysteinenucleosidase
MAPHGDGLSDIEEPEVDAQSEILRPISSVVFVIAMQAEALPLVNKFGLSETTDSPLGKGLPWVLYHGVHKDLRINVVCPGRDAALGIDSVGTVPASLITFASIQALKPDIIINAGTCGGFKVKGANIGDVFLVSDVVFHDRRIPIPMFDLYGVGLRQAFSTPNLLKELNLKIGRLSTGDSLDMSTQDETLIIANDATLKDMEGAAVAYVADLLKIPVVFLKAVTDLVDGDKPTAEEFLQNLTVVTAALEGTATKVINFINGRNLSDL

SEQ ID NO: 1440 - protein, 233 aa, Arabidopsis thaliana
  peptide (1)..(233): Ceres Seq. ID no. 13580578
  misc_feature (1)..(218): Pfam Name: Pfam Description:  Phosphorylase family
  misc_feature (1)..(233): NCBI GI NO: 15234791 NR Description: expressed protein [Arabidopsis thaliana]
  misc_feature (1)..(233): NCBI GI NO: 7406708 NR Description: putative ripening-related protein [Vitis vinifera]
  misc_feature (1)..(233): NCBI GI NO: 34897892 NR Description: ESTs C28489
  misc_feature (1)..(233): NCBI GI NO: 18087497 NR Description: methylthioadenosine/ S-adenosyl homocysteine nucleosidase
  misc_feature (1)..(233): NCBI GI NO: 30690140 NR Description: expressed protein [Arabidopsis thaliana]
  misc_feature (34)..(233): NCBI GI NO: 7486865 NR Description: hypothetical protein T11I11
  misc_feature (46)..(225): NCBI GI NO: 23037085 NR Description: hypothetical protein [Oenococcus oeni MCW]
  misc_feature (47)..(204): NCBI GI NO: 23467396 NR Description: hypothetical protein [Haemophilus somnus 129PT]
  misc_feature (46)..(214): NCBI GI NO: 16273135 NR Description: pfs protein [Haemophilus influenzae Rd]
  misc_feature (46)..(198): NCBI GI NO: 24372900 NR Description: 5-methylthioadenosine nucleosidase/ S-adenosylhomocysteinenucleosidase
MQAEALPLVNKFGLSETTDSPLGKGLPWVLYHGVHKDLRINVVCPGRDAALGIDSVGTVPASLITFASIQALKPDIIINAGTCGGFKVKGANIGDVFLVSDVVFHDRRIPIPMFDLYGVGLRQAFSTPNLLKELNLKIGRLSTGDSLDMSTQDETLIIANDATLKDMEGAAVAYVADLLKIPVVFLKAVTDLVDGDKPTAEEFLQNLTVVTAALEGTATKVINFINGRNLSDL

SEQ ID NO: 1441 - DNA, 1160 bp, Arabidopsis thaliana
  misc_feature (1)..(1160): Ceres Seq. ID no. 13509186
aaaaactttgggaagcagctaaaatactgtgttctttatttcttccatcgaaatcgaaaaaagctaagatctttgcgttttgaaacgatggcggaagaacataagcatgatgaatctgtgatcgctcctgagccagctgttgaggttgtggagagagaatcgttgatggataagaagaagaagactaagaagccctcttctccttcgtcttctatgaaatcgaaagtttaccgcttgttcggacgagagcagcctgttcataaggttctcggcggtggaaagccggctgatatattcatgtggaagaacaagaagatgtctggtggtgtacttggtggtgctacagctgctttggttgtgtttgaattgatggagtaccatcttctcactctgctttgccacgtgatgattgttgttctcgctgtgctgtttttgtggtctaatgccgctatgttcattaacaagtccccaccaaagattcctgaagttcatatccctgaagaacctattcttcagcttgcgtctgggctcagaatcgagatcaaccgtggattctcttctctccgtgaaattgcatcaggaagggatctcaagaaattcctcattgctattgccgggttatgggttctctcaatcttgggcggttgcttcaacttcttgacattggcatacatagctcttgtgttgctcttcacggttcctcttgcctacgacaagtatgaagacaaagtcgacccattaggtgagaaagcaatgatcgagctcaagaagcagtatgcagtgttggatgagaaggtgttgagcaagatcccacttgggccgttgaagaacaagaagaaagattaggggtttacacaaggttgtccgtggctagcaaaacgggtgttgtgaaatggtatcgaagtaatgtgttttgggcgtttttttaggtggctctttcggttatgtgaatgaacttggaattttcctgactggtttgttctgttgtttatgtcattgttgatcagcgtcgagggataaaagtagtgatatttcttctctctctaagcctctatataactaagaatttcaagatatttgaattttgcaatctcgtggttaatgttgttctttctctatattctcctctttcattacatttgtaaaatggaatcaatgtc

SEQ ID NO: 1442 - protein, 281 aa, Arabidopsis thaliana
  peptide (1)..(281): Ceres Seq. ID no. 13509187
  misc_feature (57)..(281): NCBI GI NO: 15236556 NR Description: expressed protein [Arabidopsis thaliana]
  misc_feature (30)..(74): NCBI GI NO: 15236556 NR Description: expressed protein [Arabidopsis thaliana]
  misc_feature (57)..(281): NCBI GI NO: 15237093 NR Description: expressed protein [Arabidopsis thaliana]
  misc_feature (30)..(71): NCBI GI NO: 15237093 NR Description: expressed protein [Arabidopsis thaliana]
  misc_feature (30)..(281): NCBI GI NO: 15238125 NR Description: expressed protein [Arabidopsis thaliana]
  misc_feature (30)..(281): NCBI GI NO: 15222616 NR Description: expressed protein [Arabidopsis thaliana]
  misc_feature (33)..(279): NCBI GI NO: 34909318 NR Description: OSJNBb0021A09.5
  misc_feature (31)..(279): NCBI GI NO: 34904202 NR Description: P0492F05.25
  misc_feature (30)..(280): NCBI GI NO: 18406991 NR Description: expressed protein [Arabidopsis thaliana]
  misc_feature (41)..(271): NCBI GI NO: 15234108 NR Description: hypothetical protein [Arabidopsis thaliana]
KNFGKQLKYCVLYFFHRNRKKLRSLRFETMAEEHKHDESVIAPEPAVEVVERESLMDKKKKTKKPSSPSSSMKSKVYRLFGREQPVHKVLGGGKPADIFMWKNKKMSGGVLGGATAALVVFELMEYHLLTLLCHVMIVVLAVLFLWSNAAMFINKSPPKIPEVHIPEEPILQLASGLRIEINRGFSSLREIASGRDLKKFLIAIAGLWVLSILGGCFNFLTLAYIALVLLFTVPLAYDKYEDKVDPLGEKAMIELKKQYAVLDEKVLSKIPLGPLKNKKKD

SEQ ID NO: 1443 - protein, 252 aa, Arabidopsis thaliana
  peptide (1)..(252): Ceres Seq. ID no. 13509188
  misc_feature (28)..(252): NCBI GI NO: 15236556 NR Description: expressed protein [Arabidopsis thaliana]
  misc_feature (1)..(45): NCBI GI NO: 15236556 NR Description: expressed protein [Arabidopsis thaliana]
  misc_feature (28)..(252): NCBI GI NO: 15237093 NR Description: expressed protein [Arabidopsis thaliana]
  misc_feature (1)..(42): NCBI GI NO: 15237093 NR Description: expressed protein [Arabidopsis thaliana]
  misc_feature (1)..(252): NCBI GI NO: 15238125 NR Description: expressed protein [Arabidopsis thaliana]
  misc_feature (1)..(252): NCBI GI NO: 15222616 NR Description: expressed protein [Arabidopsis thaliana]
  misc_feature (4)..(250): NCBI GI NO: 34909318 NR Description: OSJNBb0021A09.5
  misc_feature (2)..(250): NCBI GI NO: 34904202 NR Description: P0492F05.25
  misc_feature (1)..(251): NCBI GI NO: 18406991 NR Description: expressed protein [Arabidopsis thaliana]
  misc_feature (12)..(242): NCBI GI NO: 15234108 NR Description: hypothetical protein [Arabidopsis thaliana]
MAEEHKHDESVIAPEPAVEVVERESLMDKKKKTKKPSSPSSSMKSKVYRLFGREQPVHKVLGGGKPADIFMWKNKKMSGGVLGGATAALVVFELMEYHLLTLLCHVMIVVLAVLFLWSNAAMFINKSPPKIPEVHIPEEPILQLASGLRIEINRGFSSLREIASGRDLKKFLIAIAGLWVLSILGGCFNFLTLAYIALVLLFTVPLAYDKYEDKVDPLGEKAMIELKKQYAVLDEKVLSKIPLGPLKNKKKD

SEQ ID NO: 1444 - protein, 226 aa, Arabidopsis thaliana
  peptide (1)..(226): Ceres Seq. ID no. 13509189
  misc_feature (2)..(226): NCBI GI NO: 15236556 NR Description: expressed protein [Arabidopsis thaliana]
  misc_feature (1)..(19): NCBI GI NO: 15236556 NR Description: expressed protein [Arabidopsis thaliana]
  misc_feature (2)..(226): NCBI GI NO: 15237093 NR Description: expressed protein [Arabidopsis thaliana]
  misc_feature (1)..(16): NCBI GI NO: 15237093 NR Description: expressed protein [Arabidopsis thaliana]
  misc_feature (1)..(226): NCBI GI NO: 15238125 NR Description: expressed protein [Arabidopsis thaliana]
  misc_feature (1)..(226): NCBI GI NO: 15222616 NR Description: expressed protein [Arabidopsis thaliana]
  misc_feature (1)..(224): NCBI GI NO: 34909318 NR Description: OSJNBb0021A09.5
  misc_feature (1)..(224): NCBI GI NO: 34904202 NR Description: P0492F05.25
  misc_feature (1)..(225): NCBI GI NO: 18406991 NR Description: expressed protein [Arabidopsis thaliana]
  misc_feature (1)..(216): NCBI GI NO: 15234108 NR Description: hypothetical protein [Arabidopsis thaliana]
MDKKKKTKKPSSPSSSMKSKVYRLFGREQPVHKVLGGGKPADIFMWKNKKMSGGVLGGATAALVVFELMEYHLLTLLCHVMIVVLAVLFLWSNAAMFINKSPPKIPEVHIPEEPILQLASGLRIEINRGFSSLREIASGRDLKKFLIAIAGLWVLSILGGCFNFLTLAYIALVLLFTVPLAYDKYEDKVDPLGEKAMIELKKQYAVLDEKVLSKIPLGPLKNKKKD

SEQ ID NO: 1445 - DNA, 892 bp, Arabidopsis thaliana
  misc_feature (1)..(892): Ceres Seq. ID no. 12558745
actatactcaaaacacataaactcatcttcaaaactcaatggccaccactcctctcctcctccttctcctcaccgccgtcttcctctccacggagataaccgctcaacgcgctgctccggctcctggcccggctggtcccatcaacatcacggcaatcctcgaaaaaggcggacaatttgttactcttatccgtcttttaaacacaactcaaataggaaaccagataaacatccaaatcaacagttcatcagaaggcatgaccgtgttagcaccaacagacaacgctttccaaaaccttaaacccggaaccctaaacaaactaagcccggacgaccaagtcaaactcattctttaccatgtcagtcccaaattctacacattggaagatcttctctctgtaagtaacccggtcagaactcaggcttcaggtcgagacgttggtggggtttacggacttaacttcaccggtcaagggaatcaagtcaatgtatctactggtgtcgttgagacacgtctcagtacttcattgagacaagaacgtcctcttgcggtttacgtggtggacatggtattgttgccggaagagatgtttggagaacgtaagatctcaccgatggcgcctccaccaaaatcaaaatctcctgatgtctcagatgattcagagtcctctaagaaagcggctgctccgtcagagtcagagaagtctggctccggtgagatgaatactggattagggcttggtcttggacttgttgtgttgtgtttgaaattcctcctttgagtttgtttatatatattgatttaattgtgcgggttgtaataagaaatttctatatgtttattatgatgcatgatttgaaaactgaaataagagattattatttcgtgtgc

SEQ ID NO: 1446 - protein, 247 aa, Arabidopsis thaliana
  peptide (1)..(247): Ceres Seq. ID no. 12558746
  misc_feature (39)..(181): Pfam Name: Pfam Description:  Fasciclin domain
  misc_feature (1)..(247): NCBI GI NO: 15241423 NR Description: fasciclin-like arabinogalactan-protein, putative
  misc_feature (1)..(246): NCBI GI NO: 18379157 NR Description: fasciclin-like arabinogalactan-protein
  misc_feature (1)..(246): NCBI GI NO: 24417458 NR Description: unknown [Arabidopsis thaliana]
  misc_feature (8)..(242): NCBI GI NO: 18399381 NR Description: fasciclin-like arabinogalactan-protein
  misc_feature (26)..(242): NCBI GI NO: 25350183 NR Description: probable surface protein
  misc_feature (6)..(243): NCBI GI NO: 34910950 NR Description: putative arabinogalactan-like protein
  misc_feature (1)..(241): NCBI GI NO: 15242651 NR Description: fasciclin-like arabinogalactan-protein
  misc_feature (1)..(241): NCBI GI NO: 21553523 NR Description: arabinogalactan protein-like
  misc_feature (13)..(241): NCBI GI NO: 2129473 NR Description: arabinogalactan-like protein - loblolly pine
  misc_feature (4)..(243): NCBI GI NO: 30841338 NR Description: arabinogalactan protein [Gossypium hirsutum]
MATTPLLLLLLTAVFLSTEITAQRAAPAPGPAGPINITAILEKGGQFVTLIRLLNTTQIGNQINIQINSSSEGMTVLAPTDNAFQNLKPGTLNKLSPDDQVKLILYHVSPKFYTLEDLLSVSNPVRTQASGRDVGGVYGLNFTGQGNQVNVSTGVVETRLSTSLRQERPLAVYVVDMVLLPEEMFGERKISPMAPPPKSKSPDVSDDSESSKKAAAPSESEKSGSGEMNTGLGLGLGLVVLCLKFLL

SEQ ID NO: 1447 - protein, 174 aa, Arabidopsis thaliana
  peptide (1)..(174): Ceres Seq. ID no. 12558747
  misc_feature (1)..(108): Pfam Name: Pfam Description:  Fasciclin domain
  misc_feature (1)..(174): NCBI GI NO: 15241423 NR Description: fasciclin-like arabinogalactan-protein, putative
  misc_feature (1)..(173): NCBI GI NO: 18379157 NR Description: fasciclin-like arabinogalactan-protein
  misc_feature (1)..(173): NCBI GI NO: 24417458 NR Description: unknown [Arabidopsis thaliana]
  misc_feature (1)..(169): NCBI GI NO: 18399381 NR Description: fasciclin-like arabinogalactan-protein
  misc_feature (1)..(169): NCBI GI NO: 25350183 NR Description: probable surface protein
  misc_feature (1)..(170): NCBI GI NO: 34910950 NR Description: putative arabinogalactan-like protein
  misc_feature (1)..(168): NCBI GI NO: 15242651 NR Description: fasciclin-like arabinogalactan-protein
  misc_feature (1)..(168): NCBI GI NO: 21553523 NR Description: arabinogalactan protein-like
  misc_feature (1)..(168): NCBI GI NO: 2129473 NR Description: arabinogalactan-like protein - loblolly pine
  misc_feature (1)..(170): NCBI GI NO: 30841338 NR Description: arabinogalactan protein [Gossypium hirsutum]
MTVLAPTDNAFQNLKPGTLNKLSPDDQVKLILYHVSPKFYTLEDLLSVSNPVRTQASGRDVGGVYGLNFTGQGNQVNVSTGVVETRLSTSLRQERPLAVYVVDMVLLPEEMFGERKISPMAPPPKSKSPDVSDDSESSKKAAAPSESEKSGSGEMNTGLGLGLGLVVLCLKFLL

SEQ ID NO: 1448 - DNA, 811 bp, Arabidopsis thaliana
  misc_feature (1)..(811): Ceres Seq. ID no. 12579903
accaacataaactaaacttcactgacattaaaaaaaattcaaaacctttcaaaaaaaccaaaacatcaacaatgttcggcgtcgtcttccccaatcgaagtttccctatagacatctcaaccttcactcaaatcgacacattccactgggttctcgacatgaaccacttcgtcggtgaagcttatgatcaaatctcagagatgtgtatcttcttgttaaacaatttcaatcttccaccagataaagctttagctgtttatgttcaatctccaggatcagcttttgtgttctgtggtgctgtaactttagctagaccatctgctgttttatcactccaatggcctgaacctggtagtgctgcaaagatgcaactcacggcgggtgattcgagttccttatcggcgaagatcggtgtttcggtggaggatgtagcaacgttgaggtcgttggatgttgttgcggagaggaggattgagaaattggctatgaaagttggagagaatttgtttaactttatgcagtctttttgtggtgttgatggaagtaaattggttgttcctatggatattttggatcgttggtttaagaagtttcaggagaaagctaaacgtgatcctgatttcctcaaaagctttgctttgtaaggttagcgtttttgtaaaatttgatcttgtggttctatgtgatgaattgaacaagagattgtagttttactttgtttgtcaatgtttattaactagttgatcatactctgcttttaagcaatttaaagtgttgaactttaaaaaaaaaaaaaaacttgagtcctgtg

SEQ ID NO: 1449 - protein, 213 aa, Arabidopsis thaliana
  peptide (1)..(213): Ceres Seq. ID no. 12579904
  misc_feature (24)..(210): Pfam Name: DUF775 Pfam Description: Protein of unknown function
  misc_feature (24)..(213): NCBI GI NO: 15218916 NR Description: hypothetical protein; protein id: At1g66080.1
  misc_feature (24)..(211): NCBI GI NO: 27357983 NR Description: Hypothetical protein
QHKLNFTDIKKNSKPFKKTKTSTMFGVVFPNRSFPIDISTFTQIDTFHWVLDMNHFVGEAYDQISEMCIFLLNNFNLPPDKALAVYVQSPGSAFVFCGAVTLARPSAVLSLQWPEPGSAAKMQLTAGDSSSLSAKIGVSVEDVATLRSLDVVAERRIEKLAMKVGENLFNFMQSFCGVDGSKLVVPMDILDRWFKKFQEKAKRDPDFLKSFAL

SEQ ID NO: 1450 - protein, 190 aa, Arabidopsis thaliana
  peptide (1)..(190): Ceres Seq. ID no. 12579905
  misc_feature (1)..(187): Pfam Name: DUF775 Pfam Description: Protein of unknown function
  misc_feature (1)..(190): NCBI GI NO: 15218916 NR Description: hypothetical protein; protein id: At1g66080.1
  misc_feature (1)..(188): NCBI GI NO: 27357983 NR Description: Hypothetical protein
MFGVVFPNRSFPIDISTFTQIDTFHWVLDMNHFVGEAYDQISEMCIFLLNNFNLPPDKALAVYVQSPGSAFVFCGAVTLARPSAVLSLQWPEPGSAAKMQLTAGDSSSLSAKIGVSVEDVATLRSLDVVAERRIEKLAMKVGENLFNFMQSFCGVDGSKLVVPMDILDRWFKKFQEKAKRDPDFLKSFAL

SEQ ID NO: 1451 - protein, 161 aa, Arabidopsis thaliana
  peptide (1)..(161): Ceres Seq. ID no. 12579906
  misc_feature (1)..(158): Pfam Name: DUF775 Pfam Description: Protein of unknown function
  misc_feature (1)..(161): NCBI GI NO: 15218916 NR Description: hypothetical protein; protein id: At1g66080.1
  misc_feature (1)..(159): NCBI GI NO: 27357983 NR Description: Hypothetical protein
MNHFVGEAYDQISEMCIFLLNNFNLPPDKALAVYVQSPGSAFVFCGAVTLARPSAVLSLQWPEPGSAAKMQLTAGDSSSLSAKIGVSVEDVATLRSLDVVAERRIEKLAMKVGENLFNFMQSFCGVDGSKLVVPMDILDRWFKKFQEKAKRDPDFLKSFAL

SEQ ID NO: 1452 - DNA, 1245 bp, Arabidopsis thaliana
  misc_feature (1)..(1245): Ceres Seq. ID no. 12600816
gtcgtgccattagcctttgatttcagaaaaaacacttacaaagctgatatctttcttactacttcgaagaaatcttcttctcccttccaaaaaaacaatccctaaacccggaaccaaagatcgacattcatggctctcttcgacactcataacacatgggcctttgttttcggcttgctcggaaacctcatttcctttgctgttttcctctctcccgtgccaacgttctataggatttgtaagaagaaaaccacagaaggatttcaatctattccctatgtggtggcgctcttcagcgcgatgctttggctctactacgctactcagaagaaagatgtcttccttctcgtcaccatcaacagctttggttgcttcattgaaaccatatacatctccatctttgttgccttcgcatccaagaaagcccgaatgctaacggtgaagctcttgttgctaatgaactttggagggttctgtttgattctcctcctctgccaattcttggcaaaaggaaccacacgtgcgaagatcattggaggtatctgtgtcggattctctgtctgcgtttttgctgcgccgcttagcattatcagaacggtgataaagacgaaaagtgtggagtacatgccgtttagcttatccttgactcttaccatcagtgcggtcatatggctcctttatggtcttgctcttaaggatatctatgttgccttcccaaacgtgattgggtttgttctaggtgcacttcaaatgatactctatgtggtttacaaatactgcaaaacgccgtcggatttggttgagaaagaacttgaggctgcgaaattgccagaagtgagcatcgatatggtgaagttaggtacactcacatctcctgaaccagtagcgatcaccgtcgtccgatcggtgaacacatgtaactgtaacgatcgaaatgctgagattgaaaatggtcagggagttagaaacagtgctgcaactacttgagtttgcccaagaaaccctaataagaaacctatttgttgactattttgactttgtacccttcttgatatacctatcaatcaccattgtccacgtgtactagtttcgttgtagtaattttcaaagtttatcgaagtatgcgtattcgaggattaattaaatcgggaattacattttcctgagttaattttttctctttttcttttacttatgggacaatgtaatgaaactatctgttgcatataaatattttccaagttg

SEQ ID NO: 1453 - protein, 285 aa, Arabidopsis thaliana
  peptide (1)..(285): Ceres Seq. ID no. 12600817
  misc_feature (12)..(99): Pfam Name: Pfam Description:  MtN3/saliva family
  misc_feature (1)..(285): NCBI GI NO: 15237803 NR Description: MtN3-like protein; protein id: At5g23660
  misc_feature (1)..(276): NCBI GI NO: 15229019 NR Description: MTN3-like protein; protein id: At3g48740
  misc_feature (1)..(246): NCBI GI NO: 21593109 NR Description: MtN3-like protein [Arabidopsis thaliana]
  misc_feature (1)..(246): NCBI GI NO: 15241278 NR Description: MtN3-like protein; protein id: At5g50800
  misc_feature (6)..(261): NCBI GI NO: 15234863 NR Description: MtN3 - like protein; protein id: At4g25010.1
  misc_feature (6)..(238): NCBI GI NO: 1619602 NR Description: MtN3 [Medicago truncatula]
  misc_feature (6)..(245): NCBI GI NO: 14715258 NR Description: N3 like protein [Medicago truncatula]
  misc_feature (1)..(232): NCBI GI NO: 21593422 NR Description: senescence-associated protein (SAG29)
  misc_feature (1)..(276): NCBI GI NO: 15240040 NR Description: senescence-associated protein
  misc_feature (11)..(246): NCBI GI NO: 15241265 NR Description: MtN3-like protein; protein id: At5g50790
MALFDTHNTWAFVFGLLGNLISFAVFLSPVPTFYRICKKKTTEGFQSIPYVVALFSAMLWLYYATQKKDVFLLVTINSFGCFIETIYISIFVAFASKKARMLTVKLLLLMNFGGFCLILLLCQFLAKGTTRAKIIGGICVGFSVCVFAAPLSIIRTVIKTKSVEYMPFSLSLTLTISAVIWLLYGLALKDIYVAFPNVIGFVLGALQMILYVVYKYCKTPSDLVEKELEAAKLPEVSIDMVKLGTLTSPEPVAITVVRSVNTCNCNDRNAEIENGQGVRNSAATT

SEQ ID NO: 1454 - protein, 228 aa, Arabidopsis thaliana
  peptide (1)..(228): Ceres Seq. ID no. 12600818
  misc_feature (1)..(228): NCBI GI NO: 15237803 NR Description: MtN3-like protein; protein id: At5g23660
  misc_feature (1)..(219): NCBI GI NO: 15229019 NR Description: MTN3-like protein; protein id: At3g48740
  misc_feature (1)..(189): NCBI GI NO: 21593109 NR Description: MtN3-like protein [Arabidopsis thaliana]
  misc_feature (1)..(189): NCBI GI NO: 15241278 NR Description: MtN3-like protein; protein id: At5g50800
  misc_feature (1)..(204): NCBI GI NO: 15234863 NR Description: MtN3 - like protein; protein id: At4g25010.1
  misc_feature (1)..(181): NCBI GI NO: 1619602 NR Description: MtN3 [Medicago truncatula]
  misc_feature (1)..(188): NCBI GI NO: 14715258 NR Description: N3 like protein [Medicago truncatula]
  misc_feature (1)..(175): NCBI GI NO: 21593422 NR Description: senescence-associated protein (SAG29)
  misc_feature (1)..(219): NCBI GI NO: 15240040 NR Description: senescence-associated protein
  misc_feature (1)..(189): NCBI GI NO: 15241265 NR Description: MtN3-like protein; protein id: At5g50790
MLWLYYATQKKDVFLLVTINSFGCFIETIYISIFVAFASKKARMLTVKLLLLMNFGGFCLILLLCQFLAKGTTRAKIIGGICVGFSVCVFAAPLSIIRTVIKTKSVEYMPFSLSLTLTISAVIWLLYGLALKDIYVAFPNVIGFVLGALQMILYVVYKYCKTPSDLVEKELEAAKLPEVSIDMVKLGTLTSPEPVAITVVRSVNTCNCNDRNAEIENGQGVRNSAATT

SEQ ID NO: 1455 - protein, 185 aa, Arabidopsis thaliana
  peptide (1)..(185): Ceres Seq. ID no. 12600819
  misc_feature (1)..(185): NCBI GI NO: 15237803 NR Description: MtN3-like protein; protein id: At5g23660
  misc_feature (1)..(176): NCBI GI NO: 15229019 NR Description: MTN3-like protein; protein id: At3g48740
  misc_feature (1)..(146): NCBI GI NO: 21593109 NR Description: MtN3-like protein [Arabidopsis thaliana]
  misc_feature (1)..(146): NCBI GI NO: 15241278 NR Description: MtN3-like protein; protein id: At5g50800
  misc_feature (1)..(161): NCBI GI NO: 15234863 NR Description: MtN3 - like protein; protein id: At4g25010.1
  misc_feature (1)..(138): NCBI GI NO: 1619602 NR Description: MtN3 [Medicago truncatula]
  misc_feature (1)..(145): NCBI GI NO: 14715258 NR Description: N3 like protein [Medicago truncatula]
  misc_feature (1)..(132): NCBI GI NO: 21593422 NR Description: senescence-associated protein (SAG29)
  misc_feature (1)..(176): NCBI GI NO: 15240040 NR Description: senescence-associated protein
  misc_feature (1)..(146): NCBI GI NO: 15241265 NR Description: MtN3-like protein; protein id: At5g50790
MLTVKLLLLMNFGGFCLILLLCQFLAKGTTRAKIIGGICVGFSVCVFAAPLSIIRTVIKTKSVEYMPFSLSLTLTISAVIWLLYGLALKDIYVAFPNVIGFVLGALQMILYVVYKYCKTPSDLVEKELEAAKLPEVSIDMVKLGTLTSPEPVAITVVRSVNTCNCNDRNAEIENGQGVRNSAATT

SEQ ID NO: 1456 - DNA, 1060 bp, Arabidopsis thaliana
  misc_feature (1)..(1060): Ceres Seq. ID no. 12330580
cataaacatcaaatggttctaattggtctttgatcttaaacccatttgattatggtatctaaagtttgatccttttgatgcactctcatcgcagtttctcgtgattttaatattattgaactcttttgatttgtggtgaagcaaaccttctctgtcacaactagctccattagaagccattctgtttgatgttgatggaacactctgtgactcagatcccatccaccttattgccttccaagaactgcttcaagagattggttttaacaatggggtcccaatcgatgagaaattctttgttgagaacattgctggaaaacacaattctgaaattgctctacttctgttccctgatgatgtttcaagagggttaaaattctgtgatgaaaaggaagctctttaccgcaaaattgttgcagagaagataaagccacttgatgggcttataaaactgaccaaatggatcgaagatcgtggattgaaacgagctgcggtaacaaacgctccaaaagaaaacgcagagctcatgatatcgaaacttggtctgactgatttctttcaagcagtgattcttggctctgaatgtgaatttcccaaaccacaccctggaccttacttgaaggctcttgaagtgcttaacgtgtcaaaggagcacacgctagttttcgaagactcgatctctgggataaaagctggagttgcagctggaatgccagtgattggactgactacagggaatccagcaagcctgcttatgcaagcaaaacccgcttttctcatcgagaactatgcggatccaaaactgtgggctgtgttggaagaacttgataacaagtcttaagtctcacttgtttggcttatggaaacccacacatgcatgagcagcctctgaagtttaccttatgtcttagatgatcattgttgaataattcattgggagtttatgacaatgggagctttcaaatatctgattattttgtattgatacatgcacaatgctagatttgtatccaggagatagttgcataaaccaatatactataccctcggatcttagctc

SEQ ID NO: 1457 - protein, 104 aa, Arabidopsis thaliana
  peptide (1)..(104): Ceres Seq. ID no. 12330581
  misc_feature (1)..(70): Pfam Name: Pfam Description:  haloacid dehalogenase-like hydrolase
  misc_feature (1)..(104): NCBI GI NO: 18404847 NR Description: expressed protein; protein id: At2g38740
  misc_feature (1)..(104): NCBI GI NO: 25408616 NR Description: hypothetical protein At2g38740
  misc_feature (1)..(101): NCBI GI NO: 37536998 NR Description: putative beta-phosphoglucomutase
  misc_feature (1)..(100): NCBI GI NO: 34897820 NR Description: P0514G12.30
  misc_feature (1)..(101): NCBI GI NO: 37700485 NR Description: putative beta-phosphoglucomutase [Oryza sativa]
  misc_feature (1)..(100): NCBI GI NO: 23127812 NR Description: hypothetical protein [Nostoc punctiforme]
  misc_feature (1)..(100): NCBI GI NO: 17228223 NR Description: hypothetical protein [Nostoc sp. PCC 7120]
  misc_feature (1)..(97): NCBI GI NO: 37521914 NR Description: hypothetical protein glr2345
  misc_feature (1)..(93): NCBI GI NO: 23042473 NR Description: hypothetical protein
  misc_feature (1)..(97): NCBI GI NO: 27377543 NR Description: blr2432 [Bradyrhizobium japonicum]
MISKLGLTDFFQAVILGSECEFPKPHPGPYLKALEVLNVSKEHTLVFEDSISGIKAGVAAGMPVIGLTTGNPASLLMQAKPAFLIENYADPKLWAVLEELDNKS

SEQ ID NO: 1458 - protein, 61 aa, Arabidopsis thaliana
  peptide (1)..(61): Ceres Seq. ID no. 12330582
MLMEHSVTQIPSTLLPSKNCFKRLVLTMGSQSMRNSLLRTLLENTILKLLYFCSLMMFQEG

SEQ ID NO: 1459 - protein, 59 aa, Arabidopsis thaliana
  peptide (1)..(59): Ceres Seq. ID no. 12330583
MEHSVTQIPSTLLPSKNCFKRLVLTMGSQSMRNSLLRTLLENTILKLLYFCSLMMFQEG

SEQ ID NO: 1460 - DNA, 1538 bp, Arabidopsis thaliana
  misc_feature (1)..(1538): Ceres Seq. ID no. 12580443
aacattttcttattttccttcctaatttccaacctctgttcttagcaatatattttttctccaaaaataattctcagtttgattttcttcttctagctcttaagtatatttctttgttgttatttatcttttaatcctttaatctcatctttgtttatctttaatcaaaacccaaaatttacatgggttcttgaaaatctagaagaaataaaggaaacataacaaaaatagaaagaaaaagaagctaatggtcttaaatatggagtctaccggagaagctgttagatcaaccaccggtaacgacggtggtattacggtggttagatccgacgcgccgtcagatttccacgtagctcaaagatcagaaagctcaaaccaatctcccacctctgtcactcctcctccaccacagccatcgtctcatcacacagctcctccgccgctgcaaatttcgacggtgacgactacgactacgacggccgcgatggaaggtatctccggtggactgatgaagaagaagcgtggacggccaaggaagtatggaccggacgggactgttgtagcgttatctcctaaaccgatttcatcagcgccggcgccgtcgcatcttccgccgccgagttcacacgtcatcgatttctccgcttctgagaaacgtagcaaagtgaaaccaacgaactcgtttaacagaacaaagtatcatcaccaagttgagaatttgggtgaatgggctccttgctccgtcggtggtaatttcacacctcatataatcacagtcaacaccggcgaggatgtaacaatgaagataatctcgttttcgcaacaaggacctcgctctatttgtgttctgtcagcaaacggtgttatttcaagcgttacacttcgtcagccagattcctctggcggcacattgacatacgaaggtcggtttgagatattatcattatccgggtcattcatgcctaatgattcaggcggaacacgaagtagaacgggaggaatgagtgtatcgttagcaagtcccgatggacgtgtagtaggcggtggcctcgccggtttactagtagccgcgagtccggttcaggtggttgtaggaagttttttagcgggcactgaccatcaagatcagaaaccgaaaaagaacaaacatgatttcatgttgtcgagtcctaccgctgcaattcctatctctagtgcagctgatcaccggacaatccattcggtctcgtctcttccggtcaataataatacatggcagacttctttagcttccgatccaagaaacaagcataccgatattaatgtcaatgtaacttgaaatccaatctttctctgtattttctgttaacaagtttgatttggttgtttatctacattaggattttactaaaatggtagtattatttatagggttttagggtctttattttggttccactgttgtcacttgtaggataatttctatctttttattaggattgaatcatcttgtttccttaattttttgctaacgagtcatggtcctggttttgcatgtc

SEQ ID NO: 1461 - protein, 356 aa, Arabidopsis thaliana
  peptide (1)..(356): Ceres Seq. ID no. 12580444
  misc_feature (1)..(356): NCBI GI NO: 22328578 NR Description: putative DNA-binding protein
  misc_feature (5)..(356): NCBI GI NO: 7485570 NR Description: hypothetical protein F16J13
  misc_feature (5)..(356): NCBI GI NO: 15235790 NR Description: putative DNA binding protein
  misc_feature (23)..(321): NCBI GI NO: 15235023 NR Description: putative protein; protein id: At4g25320
  misc_feature (150)..(331): NCBI GI NO: 15242131 NR Description: putative protein; protein id: At5g51590.1
  misc_feature (38)..(115): NCBI GI NO: 15242131 NR Description: putative protein; protein id: At5g51590.1
  misc_feature (5)..(300): NCBI GI NO: 8809639 NR Description: contains similarity to DNA-binding protein~gene_id:MMI9
  misc_feature (53)..(308): NCBI GI NO: 37537056 NR Description: putative AT-Hook DNA-binding protein
  misc_feature (53)..(308): NCBI GI NO: 14326504 NR Description: At2g33620/F4P9.39 [Arabidopsis thaliana]
  misc_feature (45)..(339): NCBI GI NO: 38346715 NR Description: OSJNBa0086O06.13
MVLNMESTGEAVRSTTGNDGGITVVRSDAPSDFHVAQRSESSNQSPTSVTPPPPQPSSHHTAPPPLQISTVTTTTTTAAMEGISGGLMKKKRGRPRKYGPDGTVVALSPKPISSAPAPSHLPPPSSHVIDFSASEKRSKVKPTNSFNRTKYHHQVENLGEWAPCSVGGNFTPHIITVNTGEDVTMKIISFSQQGPRSICVLSANGVISSVTLRQPDSSGGTLTYEGRFEILSLSGSFMPNDSGGTRSRTGGMSVSLASPDGRVVGGGLAGLLVAASPVQVVVGSFLAGTDHQDQKPKKNKHDFMLSSPTAAIPISSAADHRTIHSVSSLPVNNNTWQTSLASDPRNKHTDINVNVT

SEQ ID NO: 1462 - protein, 352 aa, Arabidopsis thaliana
  peptide (1)..(352): Ceres Seq. ID no. 12580445
  misc_feature (1)..(352): NCBI GI NO: 22328578 NR Description: putative DNA-binding protein
  misc_feature (1)..(352): NCBI GI NO: 7485570 NR Description: hypothetical protein F16J13
  misc_feature (1)..(352): NCBI GI NO: 15235790 NR Description: putative DNA binding protein
  misc_feature (19)..(317): NCBI GI NO: 15235023 NR Description: putative protein; protein id: At4g25320
  misc_feature (146)..(327): NCBI GI NO: 15242131 NR Description: putative protein; protein id: At5g51590.1
  misc_feature (34)..(111): NCBI GI NO: 15242131 NR Description: putative protein; protein id: At5g51590.1
  misc_feature (1)..(296): NCBI GI NO: 8809639 NR Description: contains similarity to DNA-binding protein~gene_id:MMI9
  misc_feature (49)..(304): NCBI GI NO: 37537056 NR Description: putative AT-Hook DNA-binding protein
  misc_feature (49)..(304): NCBI GI NO: 14326504 NR Description: At2g33620/F4P9.39 [Arabidopsis thaliana]
  misc_feature (41)..(335): NCBI GI NO: 38346715 NR Description: OSJNBa0086O06.13
MESTGEAVRSTTGNDGGITVVRSDAPSDFHVAQRSESSNQSPTSVTPPPPQPSSHHTAPPPLQISTVTTTTTTAAMEGISGGLMKKKRGRPRKYGPDGTVVALSPKPISSAPAPSHLPPPSSHVIDFSASEKRSKVKPTNSFNRTKYHHQVENLGEWAPCSVGGNFTPHIITVNTGEDVTMKIISFSQQGPRSICVLSANGVISSVTLRQPDSSGGTLTYEGRFEILSLSGSFMPNDSGGTRSRTGGMSVSLASPDGRVVGGGLAGLLVAASPVQVVVGSFLAGTDHQDQKPKKNKHDFMLSSPTAAIPISSAADHRTIHSVSSLPVNNNTWQTSLASDPRNKHTDINVNVT

SEQ ID NO: 1463 - protein, 277 aa, Arabidopsis thaliana
  peptide (1)..(277): Ceres Seq. ID no. 12580446
  misc_feature (1)..(277): NCBI GI NO: 22328578 NR Description: putative DNA-binding protein
  misc_feature (1)..(277): NCBI GI NO: 7485570 NR Description: hypothetical protein F16J13
  misc_feature (1)..(277): NCBI GI NO: 15235790 NR Description: putative DNA binding protein
  misc_feature (1)..(242): NCBI GI NO: 15235023 NR Description: putative protein; protein id: At4g25320
  misc_feature (71)..(252): NCBI GI NO: 15242131 NR Description: putative protein; protein id: At5g51590.1
  misc_feature (1)..(36): NCBI GI NO: 15242131 NR Description: putative protein; protein id: At5g51590.1
  misc_feature (1)..(221): NCBI GI NO: 8809639 NR Description: contains similarity to DNA-binding protein~gene_id:MMI9
  misc_feature (1)..(229): NCBI GI NO: 37537056 NR Description: putative AT-Hook DNA-binding protein
  misc_feature (1)..(229): NCBI GI NO: 14326504 NR Description: At2g33620/F4P9.39 [Arabidopsis thaliana]
  misc_feature (1)..(260): NCBI GI NO: 38346715 NR Description: OSJNBa0086O06.13
MEGISGGLMKKKRGRPRKYGPDGTVVALSPKPISSAPAPSHLPPPSSHVIDFSASEKRSKVKPTNSFNRTKYHHQVENLGEWAPCSVGGNFTPHIITVNTGEDVTMKIISFSQQGPRSICVLSANGVISSVTLRQPDSSGGTLTYEGRFEILSLSGSFMPNDSGGTRSRTGGMSVSLASPDGRVVGGGLAGLLVAASPVQVVVGSFLAGTDHQDQKPKKNKHDFMLSSPTAAIPISSAADHRTIHSVSSLPVNNNTWQTSLASDPRNKHTDINVNVT

SEQ ID NO: 1464 - DNA, 1296 bp, Arabidopsis thaliana
  misc_feature (1)..(1296): Ceres Seq. ID no. 13489389
aaaataaaagtttctataagaagaaatctcgtctctgtttaattctctctttaacgttttgatccgtttccataagaacataacagagcaagaaaaaaaagaaagcacaagctttgttgttctgaagagaaaacaaacaaaacagagagtttaagacagagagaagctcatggatgtttttgctttcaatgcttctttatccatgtgtaaagatgttgccggaatcgcaggcaacatatttgcatttggactcttcgtttcaccaatgccaacgtttaggaggatcatgaggaacaaatcgacggagcaattctccggtttaccatacatttacgctctcttaaactgcttgatctgcctttggtatggcacacctttcatatcacacagcaatgccatgcttatgactgtgaattccgttggagctacgtttcagctttgctacattatcctcttcatcatgcatacagacaagaagaacaagatgaagatgcttggtttgctttttgtggtgtttgctgtggttggagtgattgtagctggaagtttgcagatacctgaccagctcacacggtggtactttgtcgggttcttgagctgcggttctcttgtttcaatgtttgcctcgccgttgtttgttattaacctagtgattcggactaagagcgttgagtttatgccgttttatctctcgctatcgactttcttgatgagtgcttccttccttctttacgggttattcaacagcgatgcctttgtttatacaccaaatggaataggaacgattcttggcattgtgcagctggctttgtactgttactaccacaggaattctatagaagaagaaacaaaagagcctttgattgtttcttacgtgtgaggttcgcgcaaagaagcaaatttatagtggggaaattaaaagaaaccagaaaatgtggtgacatcaagattctttgttgttgttgttattgttgtctactctgtgtagctcattgtgactatctaccggctttcattctctcatggcgtgaagatgtttattctctctgcttctgtcatgatcgaaggatggaagtctttttcagttttgatggctcaattgctgaagattatgtgaagacacatgacagattcactggtgtacgtgggttttgtttttttgtggtggaaatctcatggtgggtcgataacgtttgtccatatattgtttgttttttttgaagattactctatttttttgttcataagattttttttctttgatatggaaatctctggtgggttgatttgaagacc

SEQ ID NO: 1465 - protein, 236 aa, Arabidopsis thaliana
  peptide (1)..(236): Ceres Seq. ID no. 13489390
  misc_feature (15)..(104): Pfam Name: Pfam Description:  MtN3/saliva family
  misc_feature (1)..(236): NCBI GI NO: 18400517 NR Description: nodulin MtN3 family protein [Arabidopsis thaliana]
  misc_feature (17)..(190): NCBI GI NO: 34911484 NR Description: putative MtN3
  misc_feature (18)..(221): NCBI GI NO: 34907420 NR Description: P0018C10.36
  misc_feature (10)..(225): NCBI GI NO: 18394992 NR Description: nodulin MtN3 family protein [Arabidopsis thaliana]
  misc_feature (14)..(234): NCBI GI NO: 34912454 NR Description: P0681B11.31
  misc_feature (18)..(218): NCBI GI NO: 34146818 NR Description: At5g53190 [Arabidopsis thaliana]
  misc_feature (10)..(231): NCBI GI NO: 15219732 NR Description: nodulin MtN3 family protein [Arabidopsis thaliana]
  misc_feature (14)..(228): NCBI GI NO: 34912462 NR Description: MtN3-like protein
  misc_feature (8)..(236): NCBI GI NO: 18413388 NR Description: nodulin MtN3 family protein [Arabidopsis thaliana]
  misc_feature (18)..(218): NCBI GI NO: 15238678 NR Description: nodulin MtN3 family protein [Arabidopsis thaliana]
MDVFAFNASLSMCKDVAGIAGNIFAFGLFVSPMPTFRRIMRNKSTEQFSGLPYIYALLNCLICLWYGTPFISHSNAMLMTVNSVGATFQLCYIILFIMHTDKKNKMKMLGLLFVVFAVVGVIVAGSLQIPDQLTRWYFVGFLSCGSLVSMFASPLFVINLVIRTKSVEFMPFYLSLSTFLMSASFLLYGLFNSDAFVYTPNGIGTILGIVQLALYCYYHRNSIEEETKEPLIVSYV

SEQ ID NO: 1466 - protein, 225 aa, Arabidopsis thaliana
  peptide (1)..(225): Ceres Seq. ID no. 13489391
  misc_feature (4)..(93): Pfam Name: Pfam Description:  MtN3/saliva family
  misc_feature (1)..(225): NCBI GI NO: 18400517 NR Description: nodulin MtN3 family protein [Arabidopsis thaliana]
  misc_feature (6)..(179): NCBI GI NO: 34911484 NR Description: putative MtN3
  misc_feature (7)..(210): NCBI GI NO: 34907420 NR Description: P0018C10.36
  misc_feature (1)..(214): NCBI GI NO: 18394992 NR Description: nodulin MtN3 family protein [Arabidopsis thaliana]
  misc_feature (3)..(223): NCBI GI NO: 34912454 NR Description: P0681B11.31
  misc_feature (7)..(207): NCBI GI NO: 34146818 NR Description: At5g53190 [Arabidopsis thaliana]
  misc_feature (1)..(220): NCBI GI NO: 15219732 NR Description: nodulin MtN3 family protein [Arabidopsis thaliana]
  misc_feature (3)..(217): NCBI GI NO: 34912462 NR Description: MtN3-like protein
  misc_feature (1)..(225): NCBI GI NO: 18413388 NR Description: nodulin MtN3 family protein [Arabidopsis thaliana]
  misc_feature (7)..(207): NCBI GI NO: 15238678 NR Description: nodulin MtN3 family protein [Arabidopsis thaliana]
MCKDVAGIAGNIFAFGLFVSPMPTFRRIMRNKSTEQFSGLPYIYALLNCLICLWYGTPFISHSNAMLMTVNSVGATFQLCYIILFIMHTDKKNKMKMLGLLFVVFAVVGVIVAGSLQIPDQLTRWYFVGFLSCGSLVSMFASPLFVINLVIRTKSVEFMPFYLSLSTFLMSASFLLYGLFNSDAFVYTPNGIGTILGIVQLALYCYYHRNSIEEETKEPLIVSYV

SEQ ID NO: 1467 - protein, 204 aa, Arabidopsis thaliana
  peptide (1)..(204): Ceres Seq. ID no. 13489392
  misc_feature (1)..(72): Pfam Name: Pfam Description:  MtN3/saliva family
  misc_feature (1)..(204): NCBI GI NO: 18400517 NR Description: nodulin MtN3 family protein [Arabidopsis thaliana]
  misc_feature (1)..(158): NCBI GI NO: 34911484 NR Description: putative MtN3
  misc_feature (1)..(189): NCBI GI NO: 34907420 NR Description: P0018C10.36
  misc_feature (1)..(193): NCBI GI NO: 18394992 NR Description: nodulin MtN3 family protein [Arabidopsis thaliana]
  misc_feature (1)..(202): NCBI GI NO: 34912454 NR Description: P0681B11.31
  misc_feature (1)..(186): NCBI GI NO: 34146818 NR Description: At5g53190 [Arabidopsis thaliana]
  misc_feature (1)..(199): NCBI GI NO: 15219732 NR Description: nodulin MtN3 family protein [Arabidopsis thaliana]
  misc_feature (1)..(196): NCBI GI NO: 34912462 NR Description: MtN3-like protein
  misc_feature (1)..(204): NCBI GI NO: 18413388 NR Description: nodulin MtN3 family protein [Arabidopsis thaliana]
  misc_feature (1)..(186): NCBI GI NO: 15238678 NR Description: nodulin MtN3 family protein [Arabidopsis thaliana]
MPTFRRIMRNKSTEQFSGLPYIYALLNCLICLWYGTPFISHSNAMLMTVNSVGATFQLCYIILFIMHTDKKNKMKMLGLLFVVFAVVGVIVAGSLQIPDQLTRWYFVGFLSCGSLVSMFASPLFVINLVIRTKSVEFMPFYLSLSTFLMSASFLLYGLFNSDAFVYTPNGIGTILGIVQLALYCYYHRNSIEEETKEPLIVSYV

SEQ ID NO: 1468 - DNA, 1379 bp, Arabidopsis thaliana
  misc_feature (1)..(1379): Ceres Seq. ID no. 12339588
aaattcccagacgtggtggagtgaacaaccaaaaaaacaacatgattgattgattctgaaattcactttaattttcaagagagagtttctgaggatcttgatatcagaatctgtcatgagagaagcaggagaagagaaagtggcgtggaagtactttaccagagatgttgtgccgtttgctgcgatgtttgcggtggagtgtgccactgttgggtcaaacacgctgtttaaggctgctactttaagaggattgagcttctatgtctttgtcttctactcttatattgtttcaacacttctccttcttccactttctgtaatctttggaaggtcaagaagattaccagcagctaagtctcctcttttcttcaagattttcttacttgggcttgttggattgctggttgtaaaggtattgcatacagttccccaactcttgcatctgctatcagcaatctcacaccggctttcacattcacactcgctgttatcttcaggatggagcaagtaaggttaaggagctctgcgactcaggctaaaatcattggtgcaatactatctatatctggtgctctggtagttgtgctgtataaaggcccacaagttctcgcctctgcatcttttacaactgtattacctaccgttacacttcaccagcatttgacctcaatagagtcaagctggataatcggagggctcttgcttgcttcacagtattttcttatatccgtctgactcgtgtcatggaggtttaccctgaagagataaccgtagtcttcttctacaatttatttgcaacactaatctcagtaccagtatgtctttttgcggagagcaacttgacttcttgggtgcttaaaccagacatttccctcgctgcaatcatatactcgggagtcttcgtttcattattcagcgcgcttacccacacatggggtctgcatctgaagggtccggtatacatatccttgttcaggccattgtctattgcgattgcagtcgccatgggtgctatattcctcggcgatgcacttcaccttgggagtgtcattggatcaatgatattgtgcattggattctacactgtgatttggggcaaagcaagagaggatacaatcaaaactgtagctggttctgagcagtcacctttgctgcttacacatatcatagaagatggagcctttccattaagctaggattgatgcaagtgaaatccttatactatttattaataaatatggatccctaaaagaggtgtaccatatatgtttatatatgtctatagttacatataagatatctgttctttttttcttgttttattttgatgttacatatgaatgagaattatgaatctataagaaatatttggtcctttt

SEQ ID NO: 1469 - protein, 150 aa, Arabidopsis thaliana
  peptide (1)..(150): Ceres Seq. ID no. 12339589
  misc_feature (1)..(150): NCBI GI NO: 10177511 NR Description: nodulin-like protein [Arabidopsis thaliana]
  misc_feature (70)..(150): NCBI GI NO: 15242614 NR Description: putative protein; protein id: At5g40240.1
  misc_feature (1)..(61): NCBI GI NO: 15242614 NR Description: putative protein; protein id: At5g40240.1
  misc_feature (1)..(146): NCBI GI NO: 15242612 NR Description: putative protein; protein id: At5g40230.1
  misc_feature (1)..(146): NCBI GI NO: 10177510 NR Description: nodulin-like protein [Arabidopsis thaliana]
  misc_feature (1)..(144): NCBI GI NO: 19347832 NR Description: unknown protein [Arabidopsis thaliana]
  misc_feature (1)..(122): NCBI GI NO: 18405635 NR Description: expressed protein; protein id: At3g28050
  misc_feature (1)..(122): NCBI GI NO: 21594034 NR Description: nodulin MtN21-like protein [Arabidopsis thaliana]
  misc_feature (25)..(144): NCBI GI NO: 18414474 NR Description: hypothetical protein; protein id: At4g15540.1
  misc_feature (1)..(138): NCBI GI NO: 11994130 NR Description: contains similarity to integral membrane proteinnodulin~gene_id:MMG15
MEVYPEEITVVFFYNLFATLISVPVCLFAESNLTSWVLKPDISLAAIIYSGVFVSLFSALTHTWGLHLKGPVYISLFRPLSIAIAVAMGAIFLGDALHLGSVIGSMILCIGFYTVIWGKAREDTIKTVAGSEQSPLLLTHIIEDGAFPLS

SEQ ID NO: 1470 - protein, 131 aa, Arabidopsis thaliana
  peptide (1)..(131): Ceres Seq. ID no. 12339590
  misc_feature (30)..(94): Pfam Name: Pfam Description:  Integral membrane protein DUF6
  misc_feature (1)..(96): NCBI GI NO: 10177511 NR Description: nodulin-like protein [Arabidopsis thaliana]
  misc_feature (1)..(96): NCBI GI NO: 15242614 NR Description: putative protein; protein id: At5g40240.1
  misc_feature (2)..(96): NCBI GI NO: 15242612 NR Description: putative protein; protein id: At5g40230.1
  misc_feature (24)..(96): NCBI GI NO: 10177510 NR Description: nodulin-like protein [Arabidopsis thaliana]
  misc_feature (27)..(95): NCBI GI NO: 19347832 NR Description: unknown protein [Arabidopsis thaliana]
  misc_feature (9)..(94): NCBI GI NO: 18405635 NR Description: expressed protein; protein id: At3g28050
  misc_feature (9)..(94): NCBI GI NO: 21594034 NR Description: nodulin MtN21-like protein [Arabidopsis thaliana]
  misc_feature (6)..(118): NCBI GI NO: 18414474 NR Description: hypothetical protein; protein id: At4g15540.1
  misc_feature (16)..(98): NCBI GI NO: 11994130 NR Description: contains similarity to integral membrane proteinnodulin~gene_id:MMG15
  misc_feature (6)..(118): NCBI GI NO: 7485048 NR Description: hypothetical protein - Arabidopsis thaliana
MREAGEEKVAWKYFTRDVVPFAAMFAVECATVGSNTLFKAATLRGLSFYVFVFYSYIVSTLLLLPLSVIFGRSRRLPAAKSPLFFKIFLLGLVGLLVVKVLHTVPQLLHLLSAISHRLSHSHSLLSSGWSK

SEQ ID NO: 1471 - protein, 108 aa, Arabidopsis thaliana
  peptide (1)..(108): Ceres Seq. ID no. 12339591
  misc_feature (7)..(71): Pfam Name: Pfam Description:  Integral membrane protein DUF6
  misc_feature (1)..(73): NCBI GI NO: 10177511 NR Description: nodulin-like protein [Arabidopsis thaliana]
  misc_feature (1)..(73): NCBI GI NO: 15242614 NR Description: putative protein; protein id: At5g40240.1
  misc_feature (1)..(73): NCBI GI NO: 15242612 NR Description: putative protein; protein id: At5g40230.1
  misc_feature (1)..(73): NCBI GI NO: 10177510 NR Description: nodulin-like protein [Arabidopsis thaliana]
  misc_feature (4)..(72): NCBI GI NO: 19347832 NR Description: unknown protein [Arabidopsis thaliana]
  misc_feature (1)..(71): NCBI GI NO: 18405635 NR Description: expressed protein; protein id: At3g28050
  misc_feature (1)..(71): NCBI GI NO: 21594034 NR Description: nodulin MtN21-like protein [Arabidopsis thaliana]
  misc_feature (1)..(95): NCBI GI NO: 18414474 NR Description: hypothetical protein; protein id: At4g15540.1
  misc_feature (1)..(75): NCBI GI NO: 11994130 NR Description: contains similarity to integral membrane proteinnodulin~gene_id:MMG15
  misc_feature (1)..(95): NCBI GI NO: 7485048 NR Description: hypothetical protein - Arabidopsis thaliana
MFAVECATVGSNTLFKAATLRGLSFYVFVFYSYIVSTLLLLPLSVIFGRSRRLPAAKSPLFFKIFLLGLVGLLVVKVLHTVPQLLHLLSAISHRLSHSHSLLSSGWSK

SEQ ID NO: 1472 - DNA, 1517 bp, Arabidopsis thaliana
  misc_feature (1)..(1517): Ceres Seq. ID no. 12329204
actttttctgaactcagttggtttcgattttcttcggaccttctattgttaaatcagctttataacctcacaagcttctcctctattccatagatcaaaccacaactttgtttgacctttttttgagtacttctcttgtcttttcttcttcaagtttacttagttctttgagaacaaatttctgttgattttttttctttcttgtagagggataattacaagtttaatttccctagagtgtctttaccttttgccttgtctccctctcgagacaaaaagagaaagagaaacactttctgtcctctttttttttcctctctttttctctctcgctggaaaccttttcatattcaagtgtaattttaatatttcaagcaattttctagctaattatggccttggaggctgtagtttacccgcaagatccgttctcctacatctcttgcaaagattttccgttttacgacttatactttcaagaagaagaagatcaagatccacaagatactaagaacaacattaagctagggcaaggacaaggacatggttttgcgagtaataattacaacggtagaaccggagattatagtgatgattataattacaacgaagaggatctccaatggccacgagaccttccttatggatctgccgtcgacaccgagagccagcctccaccgtcggatgtggcggcgggaggagggaggaggaaaaggaggaggacgaggagtagcaagaacaaagaagagatcgagaaccagaggatgactcacatcgccgttgaaagaaatcgccggaaacagatgaacgagtacctcgccgttctccggtctctcatgccaccttattatgctcaaaggggagatcaagcatcgatagtaggcggagccattaactacttaaaggagcttgagcatcatttacaatcaatggaacctccggttaagaccgccacagaagacaccggagccggccacgaccagaccaaaacaacctcggctagttcgtcgggaccattctcggatttctttgcatttcctcagtactcgaaccggcctacctctgcggcggcggctgaggggatggcggagatagaggtaacgatggtagagagccatgcgagtctgaaaatacttgcgaaaaagagaccgagacagcttcttaaactggtctcatcgatacagagcctaaggctcactcttctccatctaaacgtcacaactcgagacgactccgtcctctattccatcagcgtcaaggttgaagaagggagccaattgaatacagtagaagatattgcagcagctgtgaatcaaatcctaaggaggatcgaagaagagtcatcctttagctagtattgttgaattttagttatggcacatttagaggagctctaatttttcatgtgtgatcttttgctctctctttttcatatattaaataatataaatttcctttttctttttgttaacgttaattctaatgcattatatattggagtttttgtgtgattgacc

SEQ ID NO: 1473 - protein, 320 aa, Arabidopsis thaliana
  peptide (1)..(320): Ceres Seq. ID no. 12329205
  misc_feature (123)..(174): Pfam Name: Pfam Description:  Helix-loop-helix DNA-binding domain
  misc_feature (1)..(320): NCBI GI NO: 15218391 NR Description: bHLH protein; protein id: At1g72210.1
  misc_feature (1)..(320): NCBI GI NO: 21593808 NR Description: unknown [Arabidopsis thaliana]
  misc_feature (1)..(317): NCBI GI NO: 18395124 NR Description: expressed protein; protein id: At1g22490
  misc_feature (117)..(317): NCBI GI NO: 25513460 NR Description: F12K8.16 protein - Arabidopsis thaliana
  misc_feature (1)..(49): NCBI GI NO: 25513460 NR Description: F12K8.16 protein - Arabidopsis thaliana
  misc_feature (77)..(320): NCBI GI NO: 37533680 NR Description: putative helix-loop-helix DNA-binding protein
  misc_feature (1)..(290): NCBI GI NO: 28558779 NR Description: helix-loop-helix-like protein [Cucumis melo]
  misc_feature (85)..(320): NCBI GI NO: 15234187 NR Description: bHLH protein; protein id: At4g01460
  misc_feature (22)..(320): NCBI GI NO: 30687365 NR Description: bHLH protein family [Arabidopsis thaliana]
  misc_feature (106)..(316): NCBI GI NO: 15238424 NR Description: bHLH protein; protein id: At5g65320
MALEAVVYPQDPFSYISCKDFPFYDLYFQEEEDQDPQDTKNNIKLGQGQGHGFASNNYNGRTGDYSDDYNYNEEDLQWPRDLPYGSAVDTESQPPPSDVAAGGGRRKRRRTRSSKNKEEIENQRMTHIAVERNRRKQMNEYLAVLRSLMPPYYAQRGDQASIVGGAINYLKELEHHLQSMEPPVKTATEDTGAGHDQTKTTSASSSGPFSDFFAFPQYSNRPTSAAAAEGMAEIEVTMVESHASLKILAKKRPRQLLKLVSSIQSLRLTLLHLNVTTRDDSVLYSISVKVEEGSQLNTVEDIAAAVNQILRRIEEESSFS

SEQ ID NO: 1474 - protein, 196 aa, Arabidopsis thaliana
  peptide (1)..(196): Ceres Seq. ID no. 12329206
  misc_feature (1)..(50): Pfam Name: Pfam Description:  Helix-loop-helix DNA-binding domain
  misc_feature (1)..(196): NCBI GI NO: 15218391 NR Description: bHLH protein; protein id: At1g72210.1
  misc_feature (1)..(196): NCBI GI NO: 21593808 NR Description: unknown [Arabidopsis thaliana]
  misc_feature (1)..(193): NCBI GI NO: 18395124 NR Description: expressed protein; protein id: At1g22490
  misc_feature (1)..(193): NCBI GI NO: 25513460 NR Description: F12K8.16 protein - Arabidopsis thaliana
  misc_feature (1)..(196): NCBI GI NO: 37533680 NR Description: putative helix-loop-helix DNA-binding protein
  misc_feature (1)..(166): NCBI GI NO: 28558779 NR Description: helix-loop-helix-like protein [Cucumis melo]
  misc_feature (1)..(196): NCBI GI NO: 15234187 NR Description: bHLH protein; protein id: At4g01460
  misc_feature (1)..(196): NCBI GI NO: 30687365 NR Description: bHLH protein family [Arabidopsis thaliana]
  misc_feature (1)..(192): NCBI GI NO: 15238424 NR Description: bHLH protein; protein id: At5g65320
  misc_feature (18)..(193): NCBI GI NO: 3641870 NR Description: hypothetical protein [Cicer arietinum]
MTHIAVERNRRKQMNEYLAVLRSLMPPYYAQRGDQASIVGGAINYLKELEHHLQSMEPPVKTATEDTGAGHDQTKTTSASSSGPFSDFFAFPQYSNRPTSAAAAEGMAEIEVTMVESHASLKILAKKRPRQLLKLVSSIQSLRLTLLHLNVTTRDDSVLYSISVKVEEGSQLNTVEDIAAAVNQILRRIEEESSFS

SEQ ID NO: 1475 - protein, 183 aa, Arabidopsis thaliana
  peptide (1)..(183): Ceres Seq. ID no. 12329207
  misc_feature (1)..(37): Pfam Name: Pfam Description:  Helix-loop-helix DNA-binding domain
  misc_feature (1)..(183): NCBI GI NO: 15218391 NR Description: bHLH protein; protein id: At1g72210.1
  misc_feature (1)..(183): NCBI GI NO: 21593808 NR Description: unknown [Arabidopsis thaliana]
  misc_feature (1)..(180): NCBI GI NO: 18395124 NR Description: expressed protein; protein id: At1g22490
  misc_feature (1)..(180): NCBI GI NO: 25513460 NR Description: F12K8.16 protein - Arabidopsis thaliana
  misc_feature (1)..(183): NCBI GI NO: 37533680 NR Description: putative helix-loop-helix DNA-binding protein
  misc_feature (1)..(153): NCBI GI NO: 28558779 NR Description: helix-loop-helix-like protein [Cucumis melo]
  misc_feature (1)..(183): NCBI GI NO: 15234187 NR Description: bHLH protein; protein id: At4g01460
  misc_feature (1)..(183): NCBI GI NO: 30687365 NR Description: bHLH protein family [Arabidopsis thaliana]
  misc_feature (1)..(179): NCBI GI NO: 15238424 NR Description: bHLH protein; protein id: At5g65320
  misc_feature (5)..(180): NCBI GI NO: 3641870 NR Description: hypothetical protein [Cicer arietinum]
MNEYLAVLRSLMPPYYAQRGDQASIVGGAINYLKELEHHLQSMEPPVKTATEDTGAGHDQTKTTSASSSGPFSDFFAFPQYSNRPTSAAAAEGMAEIEVTMVESHASLKILAKKRPRQLLKLVSSIQSLRLTLLHLNVTTRDDSVLYSISVKVEEGSQLNTVEDIAAAVNQILRRIEEESSFS

SEQ ID NO: 1476 - DNA, 1753 bp, Arabidopsis thaliana
  misc_feature (1)..(1753): Ceres Seq. ID no. 12394650
aagaaggcctcattgataatttacaatcgagagagagagcgataaagtcaactcgttgactaaaatgaaagatttcccgatagcaatctcccttctgttcgctctactatcgccggttcttctaccttgctccggcgattccaccggcggcgtcgaggatgattctccagcgaccgtatgtatcgtcgggagtgggatcggaggctcatccgtagctcacttcctccgtaactactctgtttccaccggcttaaatcaagccaagatcctgatgtttgagcgtcacgagatagtcggtggacgcatgaggaccgtcactgtcgccggtgatactttcgaagccggcggttcgattctccatccgaagaactaccacgttaaggatttcgtcgaaaggttcaatctgacggttcgattaccgacgccgattgaagaatcttcagcgattggaatctgggatgggaagagatttgtcgtcaagacattcggttccggtaccaaatttccgtttttggatacgatcgtctcttgggtgaatgatctctacttgttcttacgttatgggttatcactgctgagaatgagcagcttcattgagaatacagttgataatttcttgaagtactatgaaagcttagagtcaagacctatcttcgacaatgttgaagggatgcttaaatggtcaggcttgtacaatctcacaaagctcactctacaggagaaattatctgaagctcagctttctcctttgttagtcaacgagctggttacggttattacaaggataaactatggacagagtgtactcatcagtgggttggcaggtgctgtctctttggcgggttcaggtggaggattatggtctgttgaaggtggaaactggcagatggctgcaaagctcattaatcattcagatgttacgttacacctgaacgagaaaattgaatccatttcatatctcgaaaaccattacgagcttaaatccactaaaggaaacagctacaagtgtgatgtcacagtagttgccacaccattagacgaagtggatattcagttctcacccacgatctcaattcctaagagagaactacaacacacgcacacgacatttgtgagggggcttttaaacccaggatactttgggatgaaatcgctttcagatgttccagctttggtgggaacccttgaagatcctctaattccattctcatgcatctcaattctaaggaaatatagtaaaacagatatgacatacaagatttttacgcgacaacctgcatcagattcgttgcttgatgagctcttcagtaggagaaccgaaaccgttcgaatagactggggtgcatacccaaagtaccacgcgcctgaagttttcgcaccattcatattagatgaccatcacttgtactatgtgaatgcttttgaaaacgcggcaagcacaatggagacaagtgcagtggctggtgagaacattgccagactcataatttccagattcatgacaaaggaatcattatcttcctcggacaaaagaagctgtagttctggtctgcactcagactcataaacaactttggtccccacataaacaaggactattggctgtgtgtgttttgaagaagaatatgatgtttatgtatatagacacataaaacagttttgagttactgattgtgtttgttcctcgtaacctaagcttcttcttttttttaatctttttcgagttcttgaatcagaccattggcattagcat

SEQ ID NO: 1477 - protein, 500 aa, Arabidopsis thaliana
  peptide (1)..(500): Ceres Seq. ID no. 12394651
  misc_feature (1)..(500): NCBI GI NO: 15237560 NR Description: unknown protein; protein id: At5g63910
  misc_feature (35)..(368): NCBI GI NO: 40744452 NR Description: hypothetical protein AN3057.2
  misc_feature (425)..(486): NCBI GI NO: 40744452 NR Description: hypothetical protein AN3057.2
  misc_feature (6)..(364): NCBI GI NO: 4240305 NR Description: KIAA0908 protein [Homo sapiens]
  misc_feature (6)..(364): NCBI GI NO: 33620751 NR Description: prenylcysteine lyase [Homo sapiens]
  misc_feature (6)..(364): NCBI GI NO: 21708072 NR Description: prenylcysteine lyase [Homo sapiens]
  misc_feature (6)..(364): NCBI GI NO: 12643885 NR Description: Prenylcysteine oxidase precursor
  misc_feature (10)..(364): NCBI GI NO: 14388370 NR Description: hypothetical protein [Macaca fascicularis]
  misc_feature (10)..(308): NCBI GI NO: 15021897 NR Description: hypothetical protein [Macaca fascicularis]
  misc_feature (67)..(362): NCBI GI NO: 13385294 NR Description: RIKEN cDNA 1200015P13; EST AI115532; EST AI448340
MKDFPIAISLLFALLSPVLLPCSGDSTGGVEDDSPATVCIVGSGIGGSSVAHFLRNYSVSTGLNQAKILMFERHEIVGGRMRTVTVAGDTFEAGGSILHPKNYHVKDFVERFNLTVRLPTPIEESSAIGIWDGKRFVVKTFGSGTKFPFLDTIVSWVNDLYLFLRYGLSLLRMSSFIENTVDNFLKYYESLESRPIFDNVEGMLKWSGLYNLTKLTLQEKLSEAQLSPLLVNELVTVITRINYGQSVLISGLAGAVSLAGSGGGLWSVEGGNWQMAAKLINHSDVTLHLNEKIESISYLENHYELKSTKGNSYKCDVTVVATPLDEVDIQFSPTISIPKRELQHTHTTFVRGLLNPGYFGMKSLSDVPALVGTLEDPLIPFSCISILRKYSKTDMTYKIFTRQPASDSLLDELFSRRTETVRIDWGAYPKYHAPEVFAPFILDDHHLYYVNAFENAASTMETSAVAGENIARLIISRFMTKESLSSSDKRSCSSGLHSDS

SEQ ID NO: 1478 - protein, 431 aa, Arabidopsis thaliana
  peptide (1)..(431): Ceres Seq. ID no. 12394652
  misc_feature (1)..(431): NCBI GI NO: 15237560 NR Description: unknown protein; protein id: At5g63910
  misc_feature (1)..(299): NCBI GI NO: 40744452 NR Description: hypothetical protein AN3057.2
  misc_feature (356)..(417): NCBI GI NO: 40744452 NR Description: hypothetical protein AN3057.2
  misc_feature (1)..(295): NCBI GI NO: 4240305 NR Description: KIAA0908 protein [Homo sapiens]
  misc_feature (1)..(295): NCBI GI NO: 33620751 NR Description: prenylcysteine lyase [Homo sapiens]
  misc_feature (1)..(295): NCBI GI NO: 21708072 NR Description: prenylcysteine lyase [Homo sapiens]
  misc_feature (1)..(295): NCBI GI NO: 12643885 NR Description: Prenylcysteine oxidase precursor
  misc_feature (1)..(295): NCBI GI NO: 14388370 NR Description: hypothetical protein [Macaca fascicularis]
  misc_feature (1)..(239): NCBI GI NO: 15021897 NR Description: hypothetical protein [Macaca fascicularis]
  misc_feature (1)..(293): NCBI GI NO: 13385294 NR Description: RIKEN cDNA 1200015P13; EST AI115532; EST AI448340
MFERHEIVGGRMRTVTVAGDTFEAGGSILHPKNYHVKDFVERFNLTVRLPTPIEESSAIGIWDGKRFVVKTFGSGTKFPFLDTIVSWVNDLYLFLRYGLSLLRMSSFIENTVDNFLKYYESLESRPIFDNVEGMLKWSGLYNLTKLTLQEKLSEAQLSPLLVNELVTVITRINYGQSVLISGLAGAVSLAGSGGGLWSVEGGNWQMAAKLINHSDVTLHLNEKIESISYLENHYELKSTKGNSYKCDVTVVATPLDEVDIQFSPTISIPKRELQHTHTTFVRGLLNPGYFGMKSLSDVPALVGTLEDPLIPFSCISILRKYSKTDMTYKIFTRQPASDSLLDELFSRRTETVRIDWGAYPKYHAPEVFAPFILDDHHLYYVNAFENAASTMETSAVAGENIARLIISRFMTKESLSSSDKRSCSSGLHSDS

SEQ ID NO: 1479 - protein, 420 aa, Arabidopsis thaliana
  peptide (1)..(420): Ceres Seq. ID no. 12394653
  misc_feature (1)..(420): NCBI GI NO: 15237560 NR Description: unknown protein; protein id: At5g63910
  misc_feature (1)..(288): NCBI GI NO: 40744452 NR Description: hypothetical protein AN3057.2
  misc_feature (345)..(406): NCBI GI NO: 40744452 NR Description: hypothetical protein AN3057.2
  misc_feature (1)..(284): NCBI GI NO: 4240305 NR Description: KIAA0908 protein [Homo sapiens]
  misc_feature (1)..(284): NCBI GI NO: 33620751 NR Description: prenylcysteine lyase [Homo sapiens]
  misc_feature (1)..(284): NCBI GI NO: 21708072 NR Description: prenylcysteine lyase [Homo sapiens]
  misc_feature (1)..(284): NCBI GI NO: 12643885 NR Description: Prenylcysteine oxidase precursor
  misc_feature (1)..(284): NCBI GI NO: 14388370 NR Description: hypothetical protein [Macaca fascicularis]
  misc_feature (1)..(228): NCBI GI NO: 15021897 NR Description: hypothetical protein [Macaca fascicularis]
  misc_feature (1)..(282): NCBI GI NO: 13385294 NR Description: RIKEN cDNA 1200015P13; EST AI115532; EST AI448340
MRTVTVAGDTFEAGGSILHPKNYHVKDFVERFNLTVRLPTPIEESSAIGIWDGKRFVVKTFGSGTKFPFLDTIVSWVNDLYLFLRYGLSLLRMSSFIENTVDNFLKYYESLESRPIFDNVEGMLKWSGLYNLTKLTLQEKLSEAQLSPLLVNELVTVITRINYGQSVLISGLAGAVSLAGSGGGLWSVEGGNWQMAAKLINHSDVTLHLNEKIESISYLENHYELKSTKGNSYKCDVTVVATPLDEVDIQFSPTISIPKRELQHTHTTFVRGLLNPGYFGMKSLSDVPALVGTLEDPLIPFSCISILRKYSKTDMTYKIFTRQPASDSLLDELFSRRTETVRIDWGAYPKYHAPEVFAPFILDDHHLYYVNAFENAASTMETSAVAGENIARLIISRFMTKESLSSSDKRSCSSGLHSDS

SEQ ID NO: 1480 - DNA, 1666 bp, Arabidopsis thaliana
  misc_feature (1)..(1666): Ceres Seq. ID no. 13489048
acaaacatacaaataattctttacttcaccaaaagaaaaaaaaaatgggatccatatcagaaatggtgttcgaaacttgtccatctccaaacccaattcatgtaatgctcgtctcgtttcaaggacaaggccacgtcaaccctcttcttcgtctcggcaagttaattgcttcaaagggtttactcgttaccttcgttacaacggagctttggggcaagaaaatgagacaagccaacaaaatcgttgacggtgaacttaaaccggttggttccggttcaatccggtttgagttctttgatgaagaatgggcagaggatgatgaccggagagctgatttctctttgtacattgctcacctagagagcgttgggatacgagaagtgtctaagcttgtgagaagatacgaggaagcgaacgagcctgtctcgtgtcttatcaataacccgtttatcccatgggtctgccacgtggcggaagagttcaacattccttgtgcggttctctgggttcagtcttgtgcttgtttctctgcttattaccattaccaagatggctctgtttcattccctacggaaacagagcctgagctcgatgtgaagcttccttgtgttcctgtcttgaagaacgacgagattcctagctttctccatccttcttctaggttcacgggttttcgacaagcgattcttgggcaattcaagaatctgagcaagtccttctgtgttctaatcgattcttttgactcattggaacaagaagttatcgattacatgtcaagtctttgtccggttaaaaccgttggaccgcttttcaaagttgctaggacagttacttctgacgtaagcggtgacatttgcaaatcaacagataaatgcctcgagtggttagactcgaggcctaaatcgtcagttgtctacatttcgttcgggacagttgcatatttgaagcaagaacagatcgaagagatcgctcacggagttttgaagtcgggtttatcgttcttgtgggtgattagacctccaccacacgatctgaaggtcgagacacatgtcttgcctcaagaacttaaagagagtagtgctaaaggtaaagggatgattgtggattggtgcccacaagagcaagtcttgtctcatccttcagtggcatgcttcgtgactcattgtggatggaactcgacaatggaatctttgtcttcaggtgttccggtggtttgttgtccgcaatggggagatcaagtgactgatgcagtgtatttgatcgatgttttcaagaccggggttagactaggccgtggagcgaccgaggagagggtagtgccaagggaggaagtggcggagaagcttttggaagcgacagttggggagaaggcagaggagttgagaaagaacgctttgaaatggaaggcggaggcggaagcagcggtggctccaggaggttcgtcggataagaattttagggagtttgtggagaagttaggtgcgggagtaacgaagactaaagataatggatactaggcaaaagtctttgactgtctatattctattttgataatgcattattactgttccatctttgtcttggtgaattctaaagattgcttgttttgtagttggtaaccgtggtgtaattgattaattcaatgttcggcttcggcacatgtttg

SEQ ID NO: 1481 - protein, 504 aa, Arabidopsis thaliana
  peptide (1)..(504): Ceres Seq. ID no. 13489049
  misc_feature (52)..(500): Pfam Name: Pfam Description:  UDP-glucoronosyl and UDP-glucosyl transferase
  misc_feature (15)..(504): NCBI GI NO: 30683281 NR Description: UDP-glycosyltransferase family
  misc_feature (15)..(504): NCBI GI NO: 25082972 NR Description: indole-3-acetate beta-glucosyltransferase like
  misc_feature (21)..(504): NCBI GI NO: 7433899 NR Description: probable indole-3-acetate beta-glucosyltransferase -Arabidopsis thaliana
  misc_feature (33)..(503): NCBI GI NO: 15234616 NR Description: UDP-glycosyltransferase, putative
  misc_feature (33)..(503): NCBI GI NO: 21593030 NR Description: indole-3-acetate beta-glucosyltransferase like
  misc_feature (24)..(503): NCBI GI NO: 9794913 NR Description: UDP-glucose:sinapate glucosyltransferase
  misc_feature (21)..(503): NCBI GI NO: 15233091 NR Description: UDP-glucosyltransferase, putative
  misc_feature (21)..(503): NCBI GI NO: 20259348 NR Description: putative UDP-glucose:indole-3-acetate beta-D-glucosyltransferase
  misc_feature (33)..(502): NCBI GI NO: 15234619 NR Description: glycosyltransferase family [Arabidopsis thaliana]
  misc_feature (32)..(492): NCBI GI NO: 13431605 NR Description: Limonoid UDP-glucosyltransferase
KHTNNSLLHQKKKKMGSISEMVFETCPSPNPIHVMLVSFQGQGHVNPLLRLGKLIASKGLLVTFVTTELWGKKMRQANKIVDGELKPVGSGSIRFEFFDEEWAEDDDRRADFSLYIAHLESVGIREVSKLVRRYEEANEPVSCLINNPFIPWVCHVAEEFNIPCAVLWVQSCACFSAYYHYQDGSVSFPTETEPELDVKLPCVPVLKNDEIPSFLHPSSRFTGFRQAILGQFKNLSKSFCVLIDSFDSLEQEVIDYMSSLCPVKTVGPLFKVARTVTSDVSGDICKSTDKCLEWLDSRPKSSVVYISFGTVAYLKQEQIEEIAHGVLKSGLSFLWVIRPPPHDLKVETHVLPQELKESSAKGKGMIVDWCPQEQVLSHPSVACFVTHCGWNSTMESLSSGVPVVCCPQWGDQVTDAVYLIDVFKTGVRLGRGATEERVVPREEVAEKLLEATVGEKAEELRKNALKWKAEAEAAVAPGGSSDKNFREFVEKLGAGVTKTKDNGY

SEQ ID NO: 1482 - protein, 490 aa, Arabidopsis thaliana
  peptide (1)..(490): Ceres Seq. ID no. 13489050
  misc_feature (38)..(486): Pfam Name: Pfam Description:  UDP-glucoronosyl and UDP-glucosyl transferase
  misc_feature (1)..(490): NCBI GI NO: 30683281 NR Description: UDP-glycosyltransferase family
  misc_feature (1)..(490): NCBI GI NO: 25082972 NR Description: indole-3-acetate beta-glucosyltransferase like
  misc_feature (7)..(490): NCBI GI NO: 7433899 NR Description: probable indole-3-acetate beta-glucosyltransferase -Arabidopsis thaliana
  misc_feature (19)..(489): NCBI GI NO: 15234616 NR Description: UDP-glycosyltransferase, putative
  misc_feature (19)..(489): NCBI GI NO: 21593030 NR Description: indole-3-acetate beta-glucosyltransferase like
  misc_feature (10)..(489): NCBI GI NO: 9794913 NR Description: UDP-glucose:sinapate glucosyltransferase
  misc_feature (7)..(489): NCBI GI NO: 15233091 NR Description: UDP-glucosyltransferase, putative
  misc_feature (7)..(489): NCBI GI NO: 20259348 NR Description: putative UDP-glucose:indole-3-acetate beta-D-glucosyltransferase
  misc_feature (19)..(488): NCBI GI NO: 15234619 NR Description: glycosyltransferase family [Arabidopsis thaliana]
  misc_feature (18)..(478): NCBI GI NO: 13431605 NR Description: Limonoid UDP-glucosyltransferase
MGSISEMVFETCPSPNPIHVMLVSFQGQGHVNPLLRLGKLIASKGLLVTFVTTELWGKKMRQANKIVDGELKPVGSGSIRFEFFDEEWAEDDDRRADFSLYIAHLESVGIREVSKLVRRYEEANEPVSCLINNPFIPWVCHVAEEFNIPCAVLWVQSCACFSAYYHYQDGSVSFPTETEPELDVKLPCVPVLKNDEIPSFLHPSSRFTGFRQAILGQFKNLSKSFCVLIDSFDSLEQEVIDYMSSLCPVKTVGPLFKVARTVTSDVSGDICKSTDKCLEWLDSRPKSSVVYISFGTVAYLKQEQIEEIAHGVLKSGLSFLWVIRPPPHDLKVETHVLPQELKESSAKGKGMIVDWCPQEQVLSHPSVACFVTHCGWNSTMESLSSGVPVVCCPQWGDQVTDAVYLIDVFKTGVRLGRGATEERVVPREEVAEKLLEATVGEKAEELRKNALKWKAEAEAAVAPGGSSDKNFREFVEKLGAGVTKTKDNGY

SEQ ID NO: 1483 - protein, 484 aa, Arabidopsis thaliana
  peptide (1)..(484): Ceres Seq. ID no. 13489051
  misc_feature (32)..(480): Pfam Name: Pfam Description:  UDP-glucoronosyl and UDP-glucosyl transferase
  misc_feature (1)..(484): NCBI GI NO: 30683281 NR Description: UDP-glycosyltransferase family
  misc_feature (1)..(484): NCBI GI NO: 25082972 NR Description: indole-3-acetate beta-glucosyltransferase like
  misc_feature (1)..(484): NCBI GI NO: 7433899 NR Description: probable indole-3-acetate beta-glucosyltransferase -Arabidopsis thaliana
  misc_feature (13)..(483): NCBI GI NO: 15234616 NR Description: UDP-glycosyltransferase, putative
  misc_feature (13)..(483): NCBI GI NO: 21593030 NR Description: indole-3-acetate beta-glucosyltransferase like
  misc_feature (4)..(483): NCBI GI NO: 9794913 NR Description: UDP-glucose:sinapate glucosyltransferase
  misc_feature (1)..(483): NCBI GI NO: 15233091 NR Description: UDP-glucosyltransferase, putative
  misc_feature (1)..(483): NCBI GI NO: 20259348 NR Description: putative UDP-glucose:indole-3-acetate beta-D-glucosyltransferase
  misc_feature (13)..(482): NCBI GI NO: 15234619 NR Description: glycosyltransferase family [Arabidopsis thaliana]
  misc_feature (12)..(472): NCBI GI NO: 13431605 NR Description: Limonoid UDP-glucosyltransferase
MVFETCPSPNPIHVMLVSFQGQGHVNPLLRLGKLIASKGLLVTFVTTELWGKKMRQANKIVDGELKPVGSGSIRFEFFDEEWAEDDDRRADFSLYIAHLESVGIREVSKLVRRYEEANEPVSCLINNPFIPWVCHVAEEFNIPCAVLWVQSCACFSAYYHYQDGSVSFPTETEPELDVKLPCVPVLKNDEIPSFLHPSSRFTGFRQAILGQFKNLSKSFCVLIDSFDSLEQEVIDYMSSLCPVKTVGPLFKVARTVTSDVSGDICKSTDKCLEWLDSRPKSSVVYISFGTVAYLKQEQIEEIAHGVLKSGLSFLWVIRPPPHDLKVETHVLPQELKESSAKGKGMIVDWCPQEQVLSHPSVACFVTHCGWNSTMESLSSGVPVVCCPQWGDQVTDAVYLIDVFKTGVRLGRGATEERVVPREEVAEKLLEATVGEKAEELRKNALKWKAEAEAAVAPGGSSDKNFREFVEKLGAGVTKTKDNGY

SEQ ID NO: 1484 - DNA, 1811 bp, Arabidopsis thaliana
  misc_feature (1)..(1811): Ceres Seq. ID no. 12329212
aagaaaaaatctatctccgccatgaacgcgagagctcttctttgctcttcaaatattcactctctctacacttcaaatcgtccacctgaaaaaacctcttcttctcgcagcctccgtaatctcaaaccatctccaaagtcgttacgggtatggatctacccgcgaaataggtccagtgttttccgggtattagttcggagctccgacaagagtgaaagcagtaattcgtattacgtagaaggagataaagtaagtggaaacaatgacgtcgtttctgattcgcctagctctatcgtcctcccatggtgggaagagtttccgaagcggtgggtgattgtgttactctgtttctcagcttttcttctctgcaatatggacagagtgaatatgagtatagctatacttccgatgtcagctgagtatggttggaatccagcaacagttggtctgattcagtcttctttcttctggggttaccttcttacacagatagctggtggaatttgggcagacactgtaggagggaaaagggttcttggattcggtgttatttggtggtcaatcgctacaattctcactcctgtagctgctaaactcggtcttccttacttgctcgttgttcgtgctttcatgggagttggagagggtgttgcaatgcctgctatgaataatatattgtcgaagtgggttcctgtgcaagagagaagcagatcactcgcgcttgtttacagcggaatgtaccttggatctgtcaccggtttagccttttcgcctttcttgattcatcaatttggatggccttctgtgttttattctttcgggtctcttggaactgtatggttgactctgtggctaactaaggcagagagttcaccattagaagatccaacattgctccctgaagaaagaaagctaattgcagacaactgtgctagcaaagagccagtgaagtcgatcccgtggaggctgatattgtcgaaaccaccggtttgggctctcatcagttgccacttttgtcacaactggggaacattcattctcttaacatggatgccaacttattaccatcaagtgctgaagttcaaccttatggagtcaggacttctctctgtatttccatggatgacaatggcaatatctgcaaatgccggtggatggattgccgatacacttgtcagccgaggtttctctgtcacgaatgtccgcaagataatgcaaacaatagggtttcttggaccagcgttcttcctaacacagctgaaacacatagattctcctacaatggctgttttgtgcatggcttgtagtcaggggactgatgcgttttcacagtctggtctatactctaaccatcaagacatcgctccaagatactctggagtgttacttggtttgtctaatactgctggagtacttgccggagttcttggcacagctgcgactggtcacatactacaacacggttcttgggatgacgttttcacgatttcggtcggtctttacctcgttgggaccgtcatttggaacctattttcaaccggagagaagataatcgattgatccattccgagaatagtaaatagttcggctccaagacctctcatcaggtgcaacttcacctcacgccagtctctgattatacaagtatcattgcagtctgagagctagccggaatattccttttttgccagaaaattcttcaggatctttctgctcgttgatttaggccaaacgcatatgaataatactttgtagatgaaagatatacagatgattttttgtaaataaacaaagctcacactttctcaaga

SEQ ID NO: 1485 - protein, 519 aa, Arabidopsis thaliana
  peptide (1)..(519): Ceres Seq. ID no. 12329213
  misc_feature (111)..(515): Pfam Name: and other Pfam Description: Sugar
  misc_feature (8)..(519): NCBI GI NO: 15227589 NR Description: putative Na+-dependent inorganic phosphate cotransporter
  misc_feature (8)..(519): NCBI GI NO: 17064976 NR Description: putative Na+-dependent inorganic phosphate cotransporter
  misc_feature (8)..(405): NCBI GI NO: 30684317 NR Description: inorganic phosphate transporter, putative
  misc_feature (105)..(519): NCBI GI NO: 34903342 NR Description: unnamed protein product
  misc_feature (20)..(519): NCBI GI NO: 30678625 NR Description: expressed protein [Arabidopsis thaliana]
  misc_feature (214)..(372): NCBI GI NO: 7485271 NR Description: hypothetical protein A_IG005I10
  misc_feature (433)..(519): NCBI GI NO: 7485271 NR Description: hypothetical protein A_IG005I10
  misc_feature (59)..(248): NCBI GI NO: 7485271 NR Description: hypothetical protein A_IG005I10
  misc_feature (354)..(400): NCBI GI NO: 7485271 NR Description: hypothetical protein A_IG005I10
  misc_feature (119)..(517): NCBI GI NO: 34908356 NR Description: P0529H11.31
KKKSISAMNARALLCSSNIHSLYTSNRPPEKTSSSRSLRNLKPSPKSLRVWIYPRNRSSVFRVLVRSSDKSESSNSYYVEGDKVSGNNDVVSDSPSSIVLPWWEEFPKRWVIVLLCFSAFLLCNMDRVNMSIAILPMSAEYGWNPATVGLIQSSFFWGYLLTQIAGGIWADTVGGKRVLGFGVIWWSIATILTPVAAKLGLPYLLVVRAFMGVGEGVAMPAMNNILSKWVPVQERSRSLALVYSGMYLGSVTGLAFSPFLIHQFGWPSVFYSFGSLGTVWLTLWLTKAESSPLEDPTLLPEERKLIADNCASKEPVKSIPWRLILSKPPVWALISCHFCHNWGTFILLTWMPTYYHQVLKFNLMESGLLSVFPWMTMAISANAGGWIADTLVSRGFSVTNVRKIMQTIGFLGPAFFLTQLKHIDSPTMAVLCMACSQGTDAFSQSGLYSNHQDIAPRYSGVLLGLSNTAGVLAGVLGTAATGHILQHGSWDDVFTISVGLYLVGTVIWNLFSTGEKIID

SEQ ID NO: 1486 - protein, 512 aa, Arabidopsis thaliana
  peptide (1)..(512): Ceres Seq. ID no. 12329214
  misc_feature (104)..(508): Pfam Name: and other Pfam Description: Sugar
  misc_feature (1)..(512): NCBI GI NO: 15227589 NR Description: putative Na+-dependent inorganic phosphate cotransporter
  misc_feature (1)..(512): NCBI GI NO: 17064976 NR Description: putative Na+-dependent inorganic phosphate cotransporter
  misc_feature (1)..(398): NCBI GI NO: 30684317 NR Description: inorganic phosphate transporter, putative
  misc_feature (98)..(512): NCBI GI NO: 34903342 NR Description: unnamed protein product
  misc_feature (13)..(512): NCBI GI NO: 30678625 NR Description: expressed protein [Arabidopsis thaliana]
  misc_feature (207)..(365): NCBI GI NO: 7485271 NR Description: hypothetical protein A_IG005I10
  misc_feature (426)..(512): NCBI GI NO: 7485271 NR Description: hypothetical protein A_IG005I10
  misc_feature (52)..(241): NCBI GI NO: 7485271 NR Description: hypothetical protein A_IG005I10
  misc_feature (347)..(393): NCBI GI NO: 7485271 NR Description: hypothetical protein A_IG005I10
  misc_feature (112)..(510): NCBI GI NO: 34908356 NR Description: P0529H11.31
MNARALLCSSNIHSLYTSNRPPEKTSSSRSLRNLKPSPKSLRVWIYPRNRSSVFRVLVRSSDKSESSNSYYVEGDKVSGNNDVVSDSPSSIVLPWWEEFPKRWVIVLLCFSAFLLCNMDRVNMSIAILPMSAEYGWNPATVGLIQSSFFWGYLLTQIAGGIWADTVGGKRVLGFGVIWWSIATILTPVAAKLGLPYLLVVRAFMGVGEGVAMPAMNNILSKWVPVQERSRSLALVYSGMYLGSVTGLAFSPFLIHQFGWPSVFYSFGSLGTVWLTLWLTKAESSPLEDPTLLPEERKLIADNCASKEPVKSIPWRLILSKPPVWALISCHFCHNWGTFILLTWMPTYYHQVLKFNLMESGLLSVFPWMTMAISANAGGWIADTLVSRGFSVTNVRKIMQTIGFLGPAFFLTQLKHIDSPTMAVLCMACSQGTDAFSQSGLYSNHQDIAPRYSGVLLGLSNTAGVLAGVLGTAATGHILQHGSWDDVFTISVGLYLVGTVIWNLFSTGEKIID

SEQ ID NO: 1487 - protein, 395 aa, Arabidopsis thaliana
  peptide (1)..(395): Ceres Seq. ID no. 12329215
  misc_feature (1)..(391): Pfam Name: and other Pfam Description: Sugar
  misc_feature (1)..(395): NCBI GI NO: 15227589 NR Description: putative Na+-dependent inorganic phosphate cotransporter
  misc_feature (1)..(395): NCBI GI NO: 17064976 NR Description: putative Na+-dependent inorganic phosphate cotransporter
  misc_feature (1)..(281): NCBI GI NO: 30684317 NR Description: inorganic phosphate transporter, putative
  misc_feature (1)..(395): NCBI GI NO: 34903342 NR Description: unnamed protein product
  misc_feature (1)..(395): NCBI GI NO: 30678625 NR Description: expressed protein [Arabidopsis thaliana]
  misc_feature (90)..(248): NCBI GI NO: 7485271 NR Description: hypothetical protein A_IG005I10
  misc_feature (309)..(395): NCBI GI NO: 7485271 NR Description: hypothetical protein A_IG005I10
  misc_feature (1)..(124): NCBI GI NO: 7485271 NR Description: hypothetical protein A_IG005I10
  misc_feature (230)..(276): NCBI GI NO: 7485271 NR Description: hypothetical protein A_IG005I10
  misc_feature (1)..(393): NCBI GI NO: 34908356 NR Description: P0529H11.31
MDRVNMSIAILPMSAEYGWNPATVGLIQSSFFWGYLLTQIAGGIWADTVGGKRVLGFGVIWWSIATILTPVAAKLGLPYLLVVRAFMGVGEGVAMPAMNNILSKWVPVQERSRSLALVYSGMYLGSVTGLAFSPFLIHQFGWPSVFYSFGSLGTVWLTLWLTKAESSPLEDPTLLPEERKLIADNCASKEPVKSIPWRLILSKPPVWALISCHFCHNWGTFILLTWMPTYYHQVLKFNLMESGLLSVFPWMTMAISANAGGWIADTLVSRGFSVTNVRKIMQTIGFLGPAFFLTQLKHIDSPTMAVLCMACSQGTDAFSQSGLYSNHQDIAPRYSGVLLGLSNTAGVLAGVLGTAATGHILQHGSWDDVFTISVGLYLVGTVIWNLFSTGEKIID

SEQ ID NO: 1488 - DNA, 516 bp, Arabidopsis thaliana
  misc_feature (1)..(516): Ceres Seq. ID no. 12329216
atgatccgattcatattattgcagaacagacaaggtaagactcgtctagccaaatactatgtccctctcgaagaatccgagaaacacaaagtcgaatacgaggttcatagattagtggtgaatcgcgacgccaaattcaccaacttcgttgagtttagaacacacaaggtgatatacaggcgttatgctggattgtttttctctgtgtgcgtggatataaccgacaatgagttggcttacttggagagtatccatttgtttgtggagatattggaccatttcttcagcaatgtttgtgagctagatttggtgtttaatttccacaaggtgtacttgatactcgatgagttcattcttgctggggagctccaagaaacaagcaaaagggcaatcatcgaaaggatgtcagaactcgagaagctacagtgatgacggttaagaatcacattctacttggttaactgcgtacctgccagatgtttcttggcatgttcagagatttgctatactttgttg

SEQ ID NO: 1489 - protein, 142 aa, Arabidopsis thaliana
  peptide (1)..(142): Ceres Seq. ID no. 12329217
  misc_feature (1)..(142): Pfam Name: Pfam Description:  Clathrin adaptor complex small chain
  misc_feature (1)..(142): NCBI GI NO: 15220987 NR Description: clathrin coat assembly protein AP17, putative
  misc_feature (1)..(142): NCBI GI NO: 17149110 NR Description: clathrin assembly protein AP17-like protein
  misc_feature (1)..(142): NCBI GI NO: 30983940 NR Description: clathrin coat assembly protein
  misc_feature (1)..(129): NCBI GI NO: 7489722 NR Description: clathrin coat assembly protein AP17 - maize
  misc_feature (11)..(109): NCBI GI NO: 25405904 NR Description: protein T2E6.6 [imported] - Arabidopsis thaliana
  misc_feature (1)..(142): NCBI GI NO: 40746043 NR Description: conserved hypothetical protein
  misc_feature (40)..(142): NCBI GI NO: 19070753 NR Description: clathrin coat assembly protein [Oryza sativa]
  misc_feature (1)..(142): NCBI GI NO: 34784526 NR Description: Unknown (protein for MGC:65827) [Danio rerio]
  misc_feature (1)..(140): NCBI GI NO: 19110255 NR Description: putative adaptor protein complex small chain subunit
  misc_feature (1)..(142): NCBI GI NO: 4757996 NR Description: adaptor-related protein complex 2
MIRFILLQNRQGKTRLAKYYVPLEESEKHKVEYEVHRLVVNRDAKFTNFVEFRTHKVIYRRYAGLFFSVCVDITDNELAYLESIHLFVEILDHFFSNVCELDLVFNFHKVYLILDEFILAGELQETSKRAIIERMSELEKLQ

SEQ ID NO: 1490 - DNA, 1638 bp, Arabidopsis thaliana
  misc_feature (1)..(1638): Ceres Seq. ID no. 12481896
acaacttccccattttctgcttctttttgttcaactccaatcacacaattcacaacccattgagaaaccaataaaataacctcaatcaaaaaaaaaaaaaaaaaaagatgaaaatctcaatttagtaaaggagaaaaaagccatttcgaataacttgaaaaggttttggttttgcagaagaaaatgaaggagaaggcggagagtggtggaggagtaggatacgtgagagcagatcagatagatttaaagagtctggacgagcaattgcagagacacttaagtaaagcatggacgatggagaagaggaagagtttgagtgatggtgaagataacgtcaataacacccgacataaccagaacaacttcggacatcgacagcttgtgtttcagaggccgcttcttggtggtggatatagcaacaacaacaacagcagcaagaacgacataattaggtcgaccgaggttgagaagtcgaggagagagtgggagattgatccttctaagcttataatcaaaagtgtgattgctagaggtacttttggtacggttcaccgtggaatctacgatggtcaagatgtcgccgtaaaactactagactggggagaagaggggcacaggtcagacgcagagatagcttcgcttagagctgctttcactcaagaagttgctgtgtggcataagctcgaccatcccaatgtcaccaagttcataggagcggcgatggggacatcggagatgagcatacaaacggaaaacgggcaaatgggaatgccgagtaacgtttgctgtgtcgtggttgagtattgccccggcggcgctctcaagtcattcctcatcaaaactcgccgccgcaaactcgccttcaaagtcgttatccaactctcccttgatcttgctcgcgggttgagttacttgcactctcagaagattgtgcatagagacgtgaaaacggagaacatgcttttagataagtcacgcaccttaaagattgcagattttggtgtggctcgtctagaggcttcaaaccctaacgacatgaccggtgagaccggaaccttgggctatatggctcctgaggtgctaaacgggagtccctacaacagaaagtgcgatgtgtatagctttgggatatgtctttgggagatttactgttgcgacatgccttatcctgacctcagcttctccgaagtaacctccgccgtcgtccgccagaatttgagaccagagatacctagatgttgtccaagctcgctggcgaacgtgatgaagaggtgttgggatgcgaatccggagaagcggccggagatggaggaagttgtggctatgttggaggctattgatacttccaaaggcggaggaatgattcctcctgaccaacaacaaggctgtttctgtttccgccgacaccgaggcccatgaagtacacacacatgcactacgttcccattattattataattaactcttactattttggaagaagagagattatttttaaaagttaattgtggggtaattaaaatgttttaattagtttggtgtttgatttataggatgaatgtcgtacctatttcaaacgatcatctcatacgttatacataacacacaacaaaaccttattcttgatcttcgcttgtt

SEQ ID NO: 1491 - protein, 411 aa, Arabidopsis thaliana
  peptide (1)..(411): Ceres Seq. ID no. 12481897
  misc_feature (108)..(382): Pfam Name: Pfam Description:  Protein kinase domain
  misc_feature (1)..(411): NCBI GI NO: 15232131 NR Description: putative protein kinase; protein id: At3g01490
  misc_feature (96)..(411): NCBI GI NO: 15240597 NR Description: protein kinase; protein id: At5g50000
  misc_feature (9)..(49): NCBI GI NO: 15240597 NR Description: protein kinase; protein id: At5g50000
  misc_feature (96)..(411): NCBI GI NO: 21553402 NR Description: protein kinase [Arabidopsis thaliana]
  misc_feature (9)..(49): NCBI GI NO: 21553402 NR Description: protein kinase [Arabidopsis thaliana]
  misc_feature (95)..(411): NCBI GI NO: 34911620 NR Description: protein kinase -like
  misc_feature (7)..(34): NCBI GI NO: 34911620 NR Description: protein kinase -like
  misc_feature (98)..(411): NCBI GI NO: 29367399 NR Description: putative protein kinase
  misc_feature (6)..(42): NCBI GI NO: 29367399 NR Description: putative protein kinase
  misc_feature (90)..(411): NCBI GI NO: 15233574 NR Description: kinase like protein; protein id: At4g14780.1
MKEKAESGGGVGYVRADQIDLKSLDEQLQRHLSKAWTMEKRKSLSDGEDNVNNTRHNQNNFGHRQLVFQRPLLGGGYSNNNNSSKNDIIRSTEVEKSRREWEIDPSKLIIKSVIARGTFGTVHRGIYDGQDVAVKLLDWGEEGHRSDAEIASLRAAFTQEVAVWHKLDHPNVTKFIGAAMGTSEMSIQTENGQMGMPSNVCCVVVEYCPGGALKSFLIKTRRRKLAFKVVIQLSLDLARGLSYLHSQKIVHRDVKTENMLLDKSRTLKIADFGVARLEASNPNDMTGETGTLGYMAPEVLNGSPYNRKCDVYSFGICLWEIYCCDMPYPDLSFSEVTSAVVRQNLRPEIPRCCPSSLANVMKRCWDANPEKRPEMEEVVAMLEAIDTSKGGGMIPPDQQQGCFCFRRHRGP

SEQ ID NO: 1492 - protein, 374 aa, Arabidopsis thaliana
  peptide (1)..(374): Ceres Seq. ID no. 12481898
  misc_feature (71)..(345): Pfam Name: Pfam Description:  Protein kinase domain
  misc_feature (1)..(374): NCBI GI NO: 15232131 NR Description: putative protein kinase; protein id: At3g01490
  misc_feature (59)..(374): NCBI GI NO: 15240597 NR Description: protein kinase; protein id: At5g50000
  misc_feature (1)..(12): NCBI GI NO: 15240597 NR Description: protein kinase; protein id: At5g50000
  misc_feature (59)..(374): NCBI GI NO: 21553402 NR Description: protein kinase [Arabidopsis thaliana]
  misc_feature (1)..(12): NCBI GI NO: 21553402 NR Description: protein kinase [Arabidopsis thaliana]
  misc_feature (58)..(374): NCBI GI NO: 34911620 NR Description: protein kinase -like
  misc_feature (61)..(374): NCBI GI NO: 29367399 NR Description: putative protein kinase
  misc_feature (53)..(374): NCBI GI NO: 15233574 NR Description: kinase like protein; protein id: At4g14780.1
  misc_feature (1)..(374): NCBI GI NO: 18403507 NR Description: expressed protein; protein id: At3g22750
  misc_feature (62)..(374): NCBI GI NO: 15229398 NR Description: ATMRK1; protein id: At3g63260
MEKRKSLSDGEDNVNNTRHNQNNFGHRQLVFQRPLLGGGYSNNNNSSKNDIIRSTEVEKSRREWEIDPSKLIIKSVIARGTFGTVHRGIYDGQDVAVKLLDWGEEGHRSDAEIASLRAAFTQEVAVWHKLDHPNVTKFIGAAMGTSEMSIQTENGQMGMPSNVCCVVVEYCPGGALKSFLIKTRRRKLAFKVVIQLSLDLARGLSYLHSQKIVHRDVKTENMLLDKSRTLKIADFGVARLEASNPNDMTGETGTLGYMAPEVLNGSPYNRKCDVYSFGICLWEIYCCDMPYPDLSFSEVTSAVVRQNLRPEIPRCCPSSLANVMKRCWDANPEKRPEMEEVVAMLEAIDTSKGGGMIPPDQQQGCFCFRRHRGP

SEQ ID NO: 1493 - protein, 232 aa, Arabidopsis thaliana
  peptide (1)..(232): Ceres Seq. ID no. 12481899
  misc_feature (1)..(203): Pfam Name: Pfam Description:  Protein kinase domain
  misc_feature (1)..(232): NCBI GI NO: 15232131 NR Description: putative protein kinase; protein id: At3g01490
  misc_feature (1)..(232): NCBI GI NO: 15240597 NR Description: protein kinase; protein id: At5g50000
  misc_feature (1)..(232): NCBI GI NO: 21553402 NR Description: protein kinase [Arabidopsis thaliana]
  misc_feature (1)..(232): NCBI GI NO: 34911620 NR Description: protein kinase -like
  misc_feature (1)..(232): NCBI GI NO: 29367399 NR Description: putative protein kinase
  misc_feature (1)..(232): NCBI GI NO: 15233574 NR Description: kinase like protein; protein id: At4g14780.1
  misc_feature (1)..(232): NCBI GI NO: 18403507 NR Description: expressed protein; protein id: At3g22750
  misc_feature (1)..(232): NCBI GI NO: 15229398 NR Description: ATMRK1; protein id: At3g63260
  misc_feature (1)..(232): NCBI GI NO: 21554375 NR Description: ATMRK1 [Arabidopsis thaliana]
  misc_feature (1)..(231): NCBI GI NO: 14626298 NR Description: putative protein kinase
MGTSEMSIQTENGQMGMPSNVCCVVVEYCPGGALKSFLIKTRRRKLAFKVVIQLSLDLARGLSYLHSQKIVHRDVKTENMLLDKSRTLKIADFGVARLEASNPNDMTGETGTLGYMAPEVLNGSPYNRKCDVYSFGICLWEIYCCDMPYPDLSFSEVTSAVVRQNLRPEIPRCCPSSLANVMKRCWDANPEKRPEMEEVVAMLEAIDTSKGGGMIPPDQQQGCFCFRRHRGP

SEQ ID NO: 1494 - DNA, 1569 bp, Arabidopsis thaliana
  misc_feature (1)..(1569): Ceres Seq. ID no. 13646090
atcatcgtcttttctcttttgtttgtttgctcctaacgtttctctttcttggaacaatctccagcaaaccaaactaatccgtctgagagaagtagttttgactttctctactccgtgatcgcgatgtcggactctggtggtggttctcacaagtcctccacaacaaaaccttccgttttcggactaaacctttacttagtcatcgcgatttgttctgttttcatactcttgatctcactcttgatcttcctcttcgtctgcttgaatcgcgtctcacgcgctcgtagaatgcgcgttaaacacagctccggctcgatcccgctcgtctctaaagaaatctcggagatcaagacggtcggcaaattcataaactccgacgattccaagggtaaaatcggaaacgaagttgttgttgttgtctccgccacaagcaaagaagcgacaagtggttttgatactttgtcggtggcttcgagcggtgacgttggtacttctgaggcaatgggatggggaaaatggtacagcttgaaagatctggagattgcgacacgtggcttctctgatgataacatgatcggtgaaggagggtacggtgtcgtttacagagctgatttctctgacggttctgtcgccgccgtcaagaatctccttaacaacaagggtcaggcggagaaggagttcaaagttgaagtagaagcaattgggaaagtaagacataagaacttggttggtctgatgggatattgtgctgacagtgctcaaagtcaaaggatgcttgtgtatgaatatattgataatggaaacttggagcagtggttacacggtgatgtaggtccggtgagtcctcttacgtgggatatccgcatgaagatagccattggaacagcaaaaggattagcctatttacatgaagggcttgaacctaaggttgtgcaccgtgatgtgaaatctagtaacatcttgctcgataagaaatggaacgcgaaagtgtctgattttggtttggccaagttattaggatctgaaacaagctacgtgacaactcgtgtgatgggaacttttggatatgtttcaccggaatatgcaagtactggtatgctcaatgagtgtagtgatgtctacagtttcggtgttctgctcatggagatcattacaggaaggagcccagttgattattcaagaccgcctggcgagatgaacttagtggattggttcaaaggaatggttgcaagtagacgtggagaagaagttatagaccctaaaatcaagacatcacctcctccaagagctttgaaaagagctttgcttgtttgtttgcgttgcatagaccttgactctagtaaacgaccaaagatgggacaaatcattcacatgcttgaggctgaagattttccattccgtcctgtaagtgtgtcaaaagctaaaaagagatttgatcctttatgcaatttactgattttaagtttcatgttgtcacacaggaacacagatcaaaccaggaaagatcgaagtaagaaagattattgggcaaacaataatgtcttggggaagaccacacttgagcgttga

SEQ ID NO: 1495 - protein, 481 aa, Arabidopsis thaliana
  peptide (1)..(481): Ceres Seq. ID no. 13646091
  misc_feature (145)..(418): Pfam Name: Pfam Description:  Protein kinase domain
  misc_feature (1)..(481): NCBI GI NO: 7488207 NR Description: probable serine/threonine-specific protein kinase
  misc_feature (1)..(427): NCBI GI NO: 30690058 NR Description: protein kinase family [Arabidopsis thaliana]
  misc_feature (14)..(426): NCBI GI NO: 14194119 NR Description: At1g01540/F22L4_6 [Arabidopsis thaliana]
  misc_feature (14)..(426): NCBI GI NO: 15223428 NR Description: protein kinase family [Arabidopsis thaliana]
  misc_feature (179)..(426): NCBI GI NO: 25518287 NR Description: hypothetical protein F22L4
  misc_feature (14)..(179): NCBI GI NO: 25518287 NR Description: hypothetical protein F22L4
  misc_feature (3)..(426): NCBI GI NO: 34902334 NR Description: Putative serine/threonine protein kinase
  misc_feature (1)..(430): NCBI GI NO: 15234142 NR Description: protein kinase family [Arabidopsis thaliana]
  misc_feature (127)..(426): NCBI GI NO: 34897534 NR Description: OSJNBa0042L16.4
  misc_feature (1)..(422): NCBI GI NO: 15235432 NR Description: protein kinase family [Arabidopsis thaliana]
MSDSGGGSHKSSTTKPSVFGLNLYLVIAICSVFILLISLLIFLFVCLNRVSRARRMRVKHSSGSIPLVSKEISEIKTVGKFINSDDSKGKIGNEVVVVVSATSKEATSGFDTLSVASSGDVGTSEAMGWGKWYSLKDLEIATRGFSDDNMIGEGGYGVVYRADFSDGSVAAVKNLLNNKGQAEKEFKVEVEAIGKVRHKNLVGLMGYCADSAQSQRMLVYEYIDNGNLEQWLHGDVGPVSPLTWDIRMKIAIGTAKGLAYLHEGLEPKVVHRDVKSSNILLDKKWNAKVSDFGLAKLLGSETSYVTTRVMGTFGYVSPEYASTGMLNECSDVYSFGVLLMEIITGRSPVDYSRPPGEMNLVDWFKGMVASRRGEEVIDPKIKTSPPPRALKRALLVCLRCIDLDSSKRPKMGQIIHMLEAEDFPFRPVSVSKAKKRFDPLCNLLILSFMLSHRNTDQTRKDRSKKDYWANNNVLGKTTLER

SEQ ID NO: 1496 - protein, 426 aa, Arabidopsis thaliana
  peptide (1)..(426): Ceres Seq. ID no. 13646092
  misc_feature (90)..(363): Pfam Name: Pfam Description:  Protein kinase domain
  misc_feature (1)..(426): NCBI GI NO: 7488207 NR Description: probable serine/threonine-specific protein kinase
  misc_feature (1)..(372): NCBI GI NO: 30690058 NR Description: protein kinase family [Arabidopsis thaliana]
  misc_feature (1)..(371): NCBI GI NO: 14194119 NR Description: At1g01540/F22L4_6 [Arabidopsis thaliana]
  misc_feature (1)..(371): NCBI GI NO: 15223428 NR Description: protein kinase family [Arabidopsis thaliana]
  misc_feature (124)..(371): NCBI GI NO: 25518287 NR Description: hypothetical protein F22L4
  misc_feature (1)..(124): NCBI GI NO: 25518287 NR Description: hypothetical protein F22L4
  misc_feature (1)..(371): NCBI GI NO: 34902334 NR Description: Putative serine/threonine protein kinase
  misc_feature (1)..(375): NCBI GI NO: 15234142 NR Description: protein kinase family [Arabidopsis thaliana]
  misc_feature (72)..(371): NCBI GI NO: 34897534 NR Description: OSJNBa0042L16.4
  misc_feature (1)..(367): NCBI GI NO: 15235432 NR Description: protein kinase family [Arabidopsis thaliana]
MRVKHSSGSIPLVSKEISEIKTVGKFINSDDSKGKIGNEVVVVVSATSKEATSGFDTLSVASSGDVGTSEAMGWGKWYSLKDLEIATRGFSDDNMIGEGGYGVVYRADFSDGSVAAVKNLLNNKGQAEKEFKVEVEAIGKVRHKNLVGLMGYCADSAQSQRMLVYEYIDNGNLEQWLHGDVGPVSPLTWDIRMKIAIGTAKGLAYLHEGLEPKVVHRDVKSSNILLDKKWNAKVSDFGLAKLLGSETSYVTTRVMGTFGYVSPEYASTGMLNECSDVYSFGVLLMEIITGRSPVDYSRPPGEMNLVDWFKGMVASRRGEEVIDPKIKTSPPPRALKRALLVCLRCIDLDSSKRPKMGQIIHMLEAEDFPFRPVSVSKAKKRFDPLCNLLILSFMLSHRNTDQTRKDRSKKDYWANNNVLGKTTLER

SEQ ID NO: 1497 - protein, 355 aa, Arabidopsis thaliana
  peptide (1)..(355): Ceres Seq. ID no. 13646093
  misc_feature (19)..(292): Pfam Name: Pfam Description:  Protein kinase domain
  misc_feature (1)..(355): NCBI GI NO: 7488207 NR Description: probable serine/threonine-specific protein kinase
  misc_feature (1)..(301): NCBI GI NO: 30690058 NR Description: protein kinase family [Arabidopsis thaliana]
  misc_feature (1)..(300): NCBI GI NO: 14194119 NR Description: At1g01540/F22L4_6 [Arabidopsis thaliana]
  misc_feature (1)..(300): NCBI GI NO: 15223428 NR Description: protein kinase family [Arabidopsis thaliana]
  misc_feature (53)..(300): NCBI GI NO: 25518287 NR Description: hypothetical protein F22L4
  misc_feature (1)..(53): NCBI GI NO: 25518287 NR Description: hypothetical protein F22L4
  misc_feature (1)..(300): NCBI GI NO: 34902334 NR Description: Putative serine/threonine protein kinase
  misc_feature (1)..(304): NCBI GI NO: 15234142 NR Description: protein kinase family [Arabidopsis thaliana]
  misc_feature (1)..(300): NCBI GI NO: 34897534 NR Description: OSJNBa0042L16.4
  misc_feature (1)..(296): NCBI GI NO: 15235432 NR Description: protein kinase family [Arabidopsis thaliana]
MGWGKWYSLKDLEIATRGFSDDNMIGEGGYGVVYRADFSDGSVAAVKNLLNNKGQAEKEFKVEVEAIGKVRHKNLVGLMGYCADSAQSQRMLVYEYIDNGNLEQWLHGDVGPVSPLTWDIRMKIAIGTAKGLAYLHEGLEPKVVHRDVKSSNILLDKKWNAKVSDFGLAKLLGSETSYVTTRVMGTFGYVSPEYASTGMLNECSDVYSFGVLLMEIITGRSPVDYSRPPGEMNLVDWFKGMVASRRGEEVIDPKIKTSPPPRALKRALLVCLRCIDLDSSKRPKMGQIIHMLEAEDFPFRPVSVSKAKKRFDPLCNLLILSFMLSHRNTDQTRKDRSKKDYWANNNVLGKTTLER

SEQ ID NO: 1498 - DNA, 473 bp, Arabidopsis thaliana
  misc_feature (1)..(473): Ceres Seq. ID no. 11032658
atcctatataacaaactcaattttcatttcgatcaatcaacacaatttggtaaaatcaaatagtctttttactattttctaaggttcgaatttaatttcccaagagaaaaatgtcaggccgaggaaagggaggaaaaggattaggaaagggaggagccaagaggcatcggaaagttctccgagacaacatccaagggattaccaaacctgcgattcgtcgtctcgcgagaagaggaggcgtgaagcgtatcagtggtttgatctatgaagagactcgcggcgttctcaagatctttctcgagaacgtgattcgtgacgccgttacttacacggagcacgctcgccggaaaactgttacggcgatggatgtcgtttacgctctcaagagacaaggacgaactttgtatggattcggcggctaaatccttatgatttcaacttcggattttgtaaactctttaatttcaagttct

SEQ ID NO: 1499 - protein, 103 aa, Arabidopsis thaliana
  peptide (1)..(103): Ceres Seq. ID no. 11032659
  misc_feature (1)..(103): NCBI GI NO: 34876368 NR Description: similar to germinal histone H4 gene
  misc_feature (1)..(103): NCBI GI NO: 15226944 NR Description: histone H4; protein id: At2g28740
  misc_feature (1)..(103): NCBI GI NO: 27692960 NR Description: Similar to germinal histone H4 gene [Mus musculus]
  misc_feature (1)..(103): NCBI GI NO: 462243 NR Description: Histone H4
  misc_feature (1)..(103): NCBI GI NO: 1806283 NR Description: Histone H4 homologue [Sesbania rostrata]
  misc_feature (1)..(103): NCBI GI NO: 4504301 NR Description: H4 histone family, member A [Homo sapiens]
  misc_feature (1)..(103): NCBI GI NO: 27692935 NR Description: Similar to germinal histone H4 gene [Mus musculus]
  misc_feature (1)..(103): NCBI GI NO: 34858262 NR Description: similar to germinal histone H4 gene
  misc_feature (1)..(103): NCBI GI NO: 37590121 NR Description: Hist1h4h protein [Mus musculus]
  misc_feature (1)..(103): NCBI GI NO: 462242 NR Description: Histone H4
MSGRGKGGKGLGKGGAKRHRKVLRDNIQGITKPAIRRLARRGGVKRISGLIYEETRGVLKIFLENVIRDAVTYTEHARRKTVTAMDVVYALKRQGRTLYGFGG

SEQ ID NO: 1500 - DNA, 1237 bp, Arabidopsis thaliana
  misc_feature (1)..(1237): Ceres Seq. ID no. 13575166
aaaaattaagagcaaaagtcatttaactttcctaaaacaatggctttaaaacatatgcaaatctttctcttcgtcgctatattttcatcattctgtttctccatcactctttctcgtccactcgacaatgaactcatcatgcaaaagaggcacatcgagtggatgactaaacacggccgtgtctacgcggatgtgaaggaggaaaacaatcgctacgttgtgttcaaaaacaacgtcgaacgcattgaacatttaaatagcattcctgccggaagaactttcaaacttgcggtaaatcagtttgctgatttaaccaatgacgaatttcgttccatgtacactggtttcaaaggtgtctcggcattatctagccaaagccaaactaaaatgtcgccgtttaggtaccaaaacgtttcttctggtgctttgccggtttctgttgactggaggaagaaaggagctgtgacccctatcaagaatcaaggcagctgcggatgttgttgggcgttttcagcggttgcggctattgaaggagcaacacaaataaagaaagggaaacttatatctttgtcagaacaacagcttgttgattgcgacacaaacgattttggctgcgaaggcggtttaatggatactgcgtttgagcatataaaagcgactggcggcttgacaactgagtcaaattatccttacaaaggcgaagacgctacttgcaattccaaaaagaccaatccaaaagcaacttctattacaggttatgaggatgtcccggttaatgatgagcaagcactgatgaaggcagtggcacaccaaccggttagcgttggaattgaaggaggtggttttgatttccaattctattcgtctggtgtgttcactggagagtgcactacgtatcttgatcatgcagtaactgcgattggatacggcgaatctactaacggatcaaagtattggatcatcaagaattcatggggaacaaaatggggagaaagtggatatatgaggattcaaaaagatgtcaaggataaacaaggactatgtggtcttgccatgaaagcttcttacccaactatatgaattcaaaaccgtgttaagcttttaattgtgtatgtttgtgtgggattgatgtctaaaaataatttgaattgttttatgtaaaaaaattgtatttagactgttgtatgcattttatgaaattgtaagcttatgtaatgcaaaggattgataattttcg

SEQ ID NO: 1501 - protein, 346 aa, Arabidopsis thaliana
  peptide (1)..(346): Ceres Seq. ID no. 13575167
  misc_feature (130)..(345): Pfam Name: Pfam Description:  Papain family cysteine protease
  misc_feature (1)..(346): NCBI GI NO: 18422605 NR Description: senescence-specific cysteine protease SAG12
  misc_feature (1)..(346): NCBI GI NO: 1046373 NR Description: SAG12 protein
  misc_feature (1)..(346): NCBI GI NO: 5823018 NR Description: senescence-specific cysteine protease
  misc_feature (1)..(346): NCBI GI NO: 5823020 NR Description: senescence-specific cysteine protease
  misc_feature (1)..(346): NCBI GI NO: 21666724 NR Description: cysteine proteinase [Brassica napus]
  misc_feature (1)..(345): NCBI GI NO: 24285904 NR Description: cysteine proteinase precursor [Ipomoea batatas]
  misc_feature (1)..(345): NCBI GI NO: 13491750 NR Description: cysteine protease [Ipomoea batatas]
  misc_feature (7)..(345): NCBI GI NO: 535454 NR Description: cysteine proteinase
  misc_feature (7)..(345): NCBI GI NO: 34329348 NR Description: putative cysteine proteinase [Medicago truncatula]
  misc_feature (1)..(344): NCBI GI NO: 1169186 NR Description: Thiol protease SEN102 precursor
MALKHMQIFLFVAIFSSFCFSITLSRPLDNELIMQKRHIEWMTKHGRVYADVKEENNRYVVFKNNVERIEHLNSIPAGRTFKLAVNQFADLTNDEFRSMYTGFKGVSALSSQSQTKMSPFRYQNVSSGALPVSVDWRKKGAVTPIKNQGSCGCCWAFSAVAAIEGATQIKKGKLISLSEQQLVDCDTNDFGCEGGLMDTAFEHIKATGGLTTESNYPYKGEDATCNSKKTNPKATSITGYEDVPVNDEQALMKAVAHQPVSVGIEGGGFDFQFYSSGVFTGECTTYLDHAVTAIGYGESTNGSKYWIIKNSWGTKWGESGYMRIQKDVKDKQGLCGLAMKASYPTI

SEQ ID NO: 1502 - protein, 341 aa, Arabidopsis thaliana
  peptide (1)..(341): Ceres Seq. ID no. 13575168
  misc_feature (125)..(340): Pfam Name: Pfam Description:  Papain family cysteine protease
  misc_feature (1)..(341): NCBI GI NO: 18422605 NR Description: senescence-specific cysteine protease SAG12
  misc_feature (1)..(341): NCBI GI NO: 1046373 NR Description: SAG12 protein
  misc_feature (1)..(341): NCBI GI NO: 5823018 NR Description: senescence-specific cysteine protease
  misc_feature (1)..(341): NCBI GI NO: 5823020 NR Description: senescence-specific cysteine protease
  misc_feature (1)..(341): NCBI GI NO: 21666724 NR Description: cysteine proteinase [Brassica napus]
  misc_feature (1)..(340): NCBI GI NO: 24285904 NR Description: cysteine proteinase precursor [Ipomoea batatas]
  misc_feature (1)..(340): NCBI GI NO: 13491750 NR Description: cysteine protease [Ipomoea batatas]
  misc_feature (2)..(340): NCBI GI NO: 535454 NR Description: cysteine proteinase
  misc_feature (2)..(340): NCBI GI NO: 34329348 NR Description: putative cysteine proteinase [Medicago truncatula]
  misc_feature (1)..(339): NCBI GI NO: 1169186 NR Description: Thiol protease SEN102 precursor
MQIFLFVAIFSSFCFSITLSRPLDNELIMQKRHIEWMTKHGRVYADVKEENNRYVVFKNNVERIEHLNSIPAGRTFKLAVNQFADLTNDEFRSMYTGFKGVSALSSQSQTKMSPFRYQNVSSGALPVSVDWRKKGAVTPIKNQGSCGCCWAFSAVAAIEGATQIKKGKLISLSEQQLVDCDTNDFGCEGGLMDTAFEHIKATGGLTTESNYPYKGEDATCNSKKTNPKATSITGYEDVPVNDEQALMKAVAHQPVSVGIEGGGFDFQFYSSGVFTGECTTYLDHAVTAIGYGESTNGSKYWIIKNSWGTKWGESGYMRIQKDVKDKQGLCGLAMKASYPTI

SEQ ID NO: 1503 - protein, 313 aa, Arabidopsis thaliana
  peptide (1)..(313): Ceres Seq. ID no. 13575169
  misc_feature (97)..(312): Pfam Name: Pfam Description:  Papain family cysteine protease
  misc_feature (1)..(313): NCBI GI NO: 18422605 NR Description: senescence-specific cysteine protease SAG12
  misc_feature (1)..(313): NCBI GI NO: 1046373 NR Description: SAG12 protein
  misc_feature (1)..(313): NCBI GI NO: 5823018 NR Description: senescence-specific cysteine protease
  misc_feature (1)..(313): NCBI GI NO: 5823020 NR Description: senescence-specific cysteine protease
  misc_feature (1)..(313): NCBI GI NO: 21666724 NR Description: cysteine proteinase [Brassica napus]
  misc_feature (1)..(312): NCBI GI NO: 24285904 NR Description: cysteine proteinase precursor [Ipomoea batatas]
  misc_feature (1)..(312): NCBI GI NO: 13491750 NR Description: cysteine protease [Ipomoea batatas]
  misc_feature (1)..(312): NCBI GI NO: 535454 NR Description: cysteine proteinase
  misc_feature (1)..(312): NCBI GI NO: 34329348 NR Description: putative cysteine proteinase [Medicago truncatula]
  misc_feature (1)..(311): NCBI GI NO: 1169186 NR Description: Thiol protease SEN102 precursor
MQKRHIEWMTKHGRVYADVKEENNRYVVFKNNVERIEHLNSIPAGRTFKLAVNQFADLTNDEFRSMYTGFKGVSALSSQSQTKMSPFRYQNVSSGALPVSVDWRKKGAVTPIKNQGSCGCCWAFSAVAAIEGATQIKKGKLISLSEQQLVDCDTNDFGCEGGLMDTAFEHIKATGGLTTESNYPYKGEDATCNSKKTNPKATSITGYEDVPVNDEQALMKAVAHQPVSVGIEGGGFDFQFYSSGVFTGECTTYLDHAVTAIGYGESTNGSKYWIIKNSWGTKWGESGYMRIQKDVKDKQGLCGLAMKASYPTI

SEQ ID NO: 1504 - DNA, 1328 bp, Arabidopsis thaliana
  misc_feature (1)..(1328): Ceres Seq. ID no. 12421197
tttcttcttcttcttcatttttctattcacattctctgaaactcataccatattttcaaagctcttaacccaaaaaccctaagtcttttttttcttcaaattattggttatattaatgttttaagctatgatggatatgactcctacaataacaacaacaacaacaccaactcctaaatcacccgaacccgaatccgaaactccgacccggatccaaccggcgaaacccatttcctttagcaacggcatcatcaaacgccaccaccaccaccaccatcctctcctctttacttacaaagaatgtctcaaaaaccacgcggcggctttaggtggtcacgctctcgacggttgcggcgaattcatgccgtctccgtcgtcaatctcctccgatccaacttctctcaaatgtgctgcttgtggctgccaccgtaatttccaccgccgtgatccagataacaacaacgactcttcccaaatccctcctcctccttccaccgccgtagagtatcaacctcaccaccgtcatcatccaccaccaccaccacctcctccaccaccacgtagtcctaactcagcttctcctccaccaatctcttcctcttacatgctcttatctctctccggtactaataacaacaacaacaacttagcttctttctccgatcttaacttctccgccggaaacaaccaccaccaccaccaccaacatactcttcacggatctcgtaaaagattccgaacaaaattcagccagtttcagaaagagaagatgcatgaattcgccgaacgtgttggttggaagatgcaaaaacgtgacgaagacgatgttcgtgatttttgccggcagatcggagttgataaaagtgttctcaaagtttggatgcataacaacaaaaacacctttaaccgccgtgatatcgccggaaacgagatccggcaaatcgataacggcggaggaaaccacactccgattctcgccggcgagattaataaccataacaatggacaccacggtgtcggaggaggaggagagcttcaccagagtgttagtagcggcggtggtggcggaggatttgatagtgatagcggcggagctaacggtggtaacgttaacggatcatcgtcgtcgtgaagttaaagatgagagtgtcaggttaataagaagcttagagtaagcttattcgtattatcatcgttaataactttctattaaatattaattaagatctttagctttgtttgtttttgcattattattagttttgatttaatgttctttaccacgtcggtgtctcgctcgatgaggaataataccataacaatgttcg

SEQ ID NO: 1505 - protein, 334 aa, Arabidopsis thaliana
  peptide (1)..(334): Ceres Seq. ID no. 12421198
  misc_feature (51)..(112): Pfam Name: Pfam Description:  ZF-HD protein dimerisation region
  misc_feature (1)..(334): NCBI GI NO: 18421904 NR Description: putative protein; protein id: At5g39760
  misc_feature (2)..(334): NCBI GI NO: 21592512 NR Description: unknown [Arabidopsis thaliana]
  misc_feature (15)..(334): NCBI GI NO: 15228530 NR Description: unknown protein; protein id: At3g28920
  misc_feature (5)..(324): NCBI GI NO: 13277220 NR Description: ZF-HD homeobox protein [Flaveria bidentis]
  misc_feature (78)..(334): NCBI GI NO: 13277222 NR Description: ZF-HD homeobox protein [Flaveria bidentis]
  misc_feature (2)..(182): NCBI GI NO: 15242243 NR Description: putative protein; protein id: At5g15210.1
  misc_feature (21)..(279): NCBI GI NO: 15226993 NR Description: hypothetical protein; protein id: At2g02540
  misc_feature (21)..(279): NCBI GI NO: 20148768 NR Description: hypothetical protein At2g02540/T822.16
  misc_feature (54)..(158): NCBI GI NO: 15238445 NR Description: hypothetical protein common family
  misc_feature (198)..(261): NCBI GI NO: 15238445 NR Description: hypothetical protein common family
MMDMTPTITTTTTPTPKSPEPESETPTRIQPAKPISFSNGIIKRHHHHHHPLLFTYKECLKNHAAALGGHALDGCGEFMPSPSSISSDPTSLKCAACGCHRNFHRRDPDNNNDSSQIPPPPSTAVEYQPHHRHHPPPPPPPPPPRSPNSASPPPISSSYMLLSLSGTNNNNNNLASFSDLNFSAGNNHHHHHQHTLHGSRKRFRTKFSQFQKEKMHEFAERVGWKMQKRDEDDVRDFCRQIGVDKSVLKVWMHNNKNTFNRRDIAGNEIRQIDNGGGNHTPILAGEINNHNNGHHGVGGGGELHQSVSSGGGGGGFDSDSGGANGGNVNGSSSS

SEQ ID NO: 1506 - protein, 333 aa, Arabidopsis thaliana
  peptide (1)..(333): Ceres Seq. ID no. 12421199
  misc_feature (50)..(111): Pfam Name: Pfam Description:  ZF-HD protein dimerisation region
  misc_feature (1)..(333): NCBI GI NO: 18421904 NR Description: putative protein; protein id: At5g39760
  misc_feature (1)..(333): NCBI GI NO: 21592512 NR Description: unknown [Arabidopsis thaliana]
  misc_feature (14)..(333): NCBI GI NO: 15228530 NR Description: unknown protein; protein id: At3g28920
  misc_feature (4)..(323): NCBI GI NO: 13277220 NR Description: ZF-HD homeobox protein [Flaveria bidentis]
  misc_feature (77)..(333): NCBI GI NO: 13277222 NR Description: ZF-HD homeobox protein [Flaveria bidentis]
  misc_feature (1)..(181): NCBI GI NO: 15242243 NR Description: putative protein; protein id: At5g15210.1
  misc_feature (20)..(278): NCBI GI NO: 15226993 NR Description: hypothetical protein; protein id: At2g02540
  misc_feature (20)..(278): NCBI GI NO: 20148768 NR Description: hypothetical protein At2g02540/T822.16
  misc_feature (53)..(157): NCBI GI NO: 15238445 NR Description: hypothetical protein common family
  misc_feature (197)..(260): NCBI GI NO: 15238445 NR Description: hypothetical protein common family
MDMTPTITTTTTPTPKSPEPESETPTRIQPAKPISFSNGIIKRHHHHHHPLLFTYKECLKNHAAALGGHALDGCGEFMPSPSSISSDPTSLKCAACGCHRNFHRRDPDNNNDSSQIPPPPSTAVEYQPHHRHHPPPPPPPPPPRSPNSASPPPISSSYMLLSLSGTNNNNNNLASFSDLNFSAGNNHHHHHQHTLHGSRKRFRTKFSQFQKEKMHEFAERVGWKMQKRDEDDVRDFCRQIGVDKSVLKVWMHNNKNTFNRRDIAGNEIRQIDNGGGNHTPILAGEINNHNNGHHGVGGGGELHQSVSSGGGGGGFDSDSGGANGGNVNGSSSS

SEQ ID NO: 1507 - protein, 331 aa, Arabidopsis thaliana
  peptide (1)..(331): Ceres Seq. ID no. 12421200
  misc_feature (48)..(109): Pfam Name: Pfam Description:  ZF-HD protein dimerisation region
  misc_feature (1)..(331): NCBI GI NO: 18421904 NR Description: putative protein; protein id: At5g39760
  misc_feature (1)..(331): NCBI GI NO: 21592512 NR Description: unknown [Arabidopsis thaliana]
  misc_feature (12)..(331): NCBI GI NO: 15228530 NR Description: unknown protein; protein id: At3g28920
  misc_feature (2)..(321): NCBI GI NO: 13277220 NR Description: ZF-HD homeobox protein [Flaveria bidentis]
  misc_feature (75)..(331): NCBI GI NO: 13277222 NR Description: ZF-HD homeobox protein [Flaveria bidentis]
  misc_feature (1)..(179): NCBI GI NO: 15242243 NR Description: putative protein; protein id: At5g15210.1
  misc_feature (18)..(276): NCBI GI NO: 15226993 NR Description: hypothetical protein; protein id: At2g02540
  misc_feature (18)..(276): NCBI GI NO: 20148768 NR Description: hypothetical protein At2g02540/T822.16
  misc_feature (51)..(155): NCBI GI NO: 15238445 NR Description: hypothetical protein common family
  misc_feature (195)..(258): NCBI GI NO: 15238445 NR Description: hypothetical protein common family
MTPTITTTTTPTPKSPEPESETPTRIQPAKPISFSNGIIKRHHHHHHPLLFTYKECLKNHAAALGGHALDGCGEFMPSPSSISSDPTSLKCAACGCHRNFHRRDPDNNNDSSQIPPPPSTAVEYQPHHRHHPPPPPPPPPPRSPNSASPPPISSSYMLLSLSGTNNNNNNLASFSDLNFSAGNNHHHHHQHTLHGSRKRFRTKFSQFQKEKMHEFAERVGWKMQKRDEDDVRDFCRQIGVDKSVLKVWMHNNKNTFNRRDIAGNEIRQIDNGGGNHTPILAGEINNHNNGHHGVGGGGELHQSVSSGGGGGGFDSDSGGANGGNVNGSSSS

SEQ ID NO: 1508 - DNA, 1277 bp, Arabidopsis thaliana
  misc_feature (1)..(1277): Ceres Seq. ID no. 12738378
atttcttcttcaccgttagatttttcctcgcttaatttctcaataacgctctcagagagaccatttgatgaagcttctcgcttctggaatttgaaaaggatttgataagacgagttcatagaagattaccgcaagttcatcaactttttgaacttgttatggagataatctcactgaacgttgtgccccagtgctctgtggttacttggagtagtaaattagcaacgataagattggtcccaaatcggtcaagtttgttattctcaggggtcaaaaaatccagacttgtgattcgaagtggaaattccgatggttatgttgttggtgagaatgatgacttgggtcgtatagccagaagaggagaatcaacgtcaaaggttttgattcctggtttgcctgatgaatcaaatggtgaaattgctgctcgaatcagtcattctcactgcgagtggaagcccaagcttagagtacattatgagaaagccggttgtgacaatctcgatgctcctgcggtgttgtttcttcctggctttggcgttggttcatttcactatgagaagcagcttaccgatttgggaagggattatcgagtatgggctattgattttcttggacagggtttatctctccctactgaagatcctactaccatgactgaagaaaccagttcctcggaagataaggaaccattttggggatttggtgacaaaactgaaccgtgggctgatcaacttgtattctctctggatctctggagggatcaagttcagtattttgtagaagaggttatcggtgagcctgtgtacattgctgggaactcacttggagggtatgtagctctctactttgcagcaacccatcctcacctggttaagggtgttaccttgcttaatgcaacacctttctggggtttcttccctaatccagtaagatccccaaagctagcacgtctctttccatggcccggagcattccctctgccggaaagagtgaaaaaaaatcacagaattggtgtggcaaaagataagtgatcctgaaagcatagctgagatacttaaacaggtctacacagaccattctaccaatgtggataaagtattctcacgtattgtggaggtcacacagcatccggctgctgcagcatcgtttgcttcaattatgcttgctcctggtggagagctatctttctccgaagctttatctaggtgtaaggaaaacaatgttcagatatgtctcatgtatggaagagaagatccatgggtgagaccgttatgggg

SEQ ID NO: 1509 - protein, 290 aa, Arabidopsis thaliana
  peptide (1)..(290): Ceres Seq. ID no. 12738379
  misc_feature (143)..(280): Pfam Name: Pfam Description:  alpha/beta hydrolase fold
  misc_feature (1)..(280): NCBI GI NO: 15240707 NR Description: putative protein; protein id: At5g13800
  misc_feature (180)..(266): NCBI GI NO: 23040754 NR Description: hypothetical protein
  misc_feature (94)..(156): NCBI GI NO: 23040754 NR Description: hypothetical protein
  misc_feature (180)..(249): NCBI GI NO: 16330114 NR Description: unknown protein [Synechocystis sp. PCC 6803]
  misc_feature (94)..(156): NCBI GI NO: 16330114 NR Description: unknown protein [Synechocystis sp. PCC 6803]
  misc_feature (174)..(262): NCBI GI NO: 37521904 NR Description: hypothetical protein gll2335
  misc_feature (180)..(277): NCBI GI NO: 17229548 NR Description: hypothetical protein [Nostoc sp. PCC 7120]
  misc_feature (91)..(156): NCBI GI NO: 17229548 NR Description: hypothetical protein [Nostoc sp. PCC 7120]
  misc_feature (180)..(249): NCBI GI NO: 23126297 NR Description: hypothetical protein [Nostoc punctiforme]
  misc_feature (91)..(156): NCBI GI NO: 23126297 NR Description: hypothetical protein [Nostoc punctiforme]
MEIISLNVVPQCSVVTWSSKLATIRLVPNRSSLLFSGVKKSRLVIRSGNSDGYVVGENDDLGRIARRGESTSKVLIPGLPDESNGEIAARISHSHCEWKPKLRVHYEKAGCDNLDAPAVLFLPGFGVGSFHYEKQLTDLGRDYRVWAIDFLGQGLSLPTEDPTTMTEETSSSEDKEPFWGFGDKTEPWADQLVFSLDLWRDQVQYFVEEVIGEPVYIAGNSLGGYVALYFAATHPHLVKGVTLLNATPFWGFFPNPVRSPKLARLFPWPGAFPLPERVKKNHRIGVAKDK

SEQ ID NO: 1510 - DNA, 1737 bp, Arabidopsis thaliana
  misc_feature (1)..(1737): Ceres Seq. ID no. 12395169
aatttgacagattcattcattagaagaagaagacaacaatccatcttcttctccccattcctcgtttcaattttgcagatctcgtctccttctcgatttattattaatatagagatggcaagttcaaaggggtctcagaatcatagaaatctgggatgcaatgggaaacaagctttactgcctccgaaaagtccgtttacgggtggtccaacgtttagtgcagattttgttccaagtagtgtgattggatccaaggctgttcagaagcttggagaaggaaatgccaatcatcatcgaacttcatctgagagttttcttattgaggaacagccttcttggcttgacgatcttctcaacgaacctgaaacacctgtacggaaaggagggcatcgacggtcatcgagtgattcatttgcatatgtagatgttcctgttggttttgatgttgattacacgctttgggatggtggtagatataataacaataatggtttctctaatcacgttagaggtcccaaggagtctgattaccttagaagccagcctgttcctttctacccttcagctcatttgtccaaacagaaaataagaccgtgggattcattaccagattccggtgctcgcccgaacagtagttctggttgttaggagagcagctctatcacaagatcagggtcttctggtagcctacgtgatacagaaaaggcttattctgctgctgatagcaagaaagatttcataaataatttcgcaaagtcgtcattcgaaaaacgggataatcctctggctaagtctgctacttccgaggctgatacgaaacgtgctagacagcagtttgcacagcgctctcgagtccgtaaaattcagtacatagctgaactggaaaggaacgttcagatgttacaagtagagggttctgaagtgtctgcggagcttgagtttctcaatcagcagaatctaattctcagcttggagaacaagtcccttaagaatcggttggaaagcttagcacaagagcagcttataaagtacttagaacatgatgtattggagaaagagattgtgaggctaagggctttataccagcttcaacagcagcaagagccgcagcagcaacatcagacaaaaaagcaaggatcatctagccaccagcgttcgaagagtagagatctagagtcgcaattcacgaatctgtccttgaggccttaacggttcaaagttcctgccgaaaatatttttatgcttatggctagagcttgagctgtcttcatggttccaggccagcttcttgtgtgtctttccctatcgcattagtagctgctcagtttgtgcttatgcttcttagtttattttcatctttgttgacccggtttgacatctcgatgagcaagtgccagcgattgatgggaaaacggcataaatgaaacaacgagttcgctggaggcggtttggtctgtctctgcgcacatcaggtatttatgataagatattattaactcatttgttcatgtctgctcaatagactgcaatccttatcacgatagtggcttcattctagggctctcaaatctcgggctgtgtctcgcttgtattgtgtgtctgaagagaatgttccctgtaaaacgtgtagtggtgtaagctttgtatcaactgtcgtttgtcttgctcatctgtttgtgtaaccaaattctcatcatttatcagaaacttgaacaccttaagaaatattttggttct

SEQ ID NO: 1511 - protein, 215 aa, Arabidopsis thaliana
  peptide (1)..(215): Ceres Seq. ID no. 12395170
  misc_feature (1)..(215): NCBI GI NO: 30680232 NR Description: bZIP transcriptional activator protein -related
  misc_feature (39)..(215): NCBI GI NO: 27311723 NR Description: Unknown protein [Arabidopsis thaliana]
  misc_feature (39)..(215): NCBI GI NO: 28393180 NR Description: putative bZIP family transcription factor
  misc_feature (39)..(215): NCBI GI NO: 25404190 NR Description: hypothetical protein T18I24.3
  misc_feature (39)..(215): NCBI GI NO: 30696210 NR Description: bZIP family transcription factor
  misc_feature (94)..(142): NCBI GI NO: 18399693 NR Description: bZIP family transcription factor
  misc_feature (94)..(142): NCBI GI NO: 25403436 NR Description: protein F15O4.49 [imported] - Arabidopsis thaliana
  misc_feature (94)..(142): NCBI GI NO: 21592919 NR Description: unknown [Arabidopsis thaliana]
  misc_feature (58)..(215): NCBI GI NO: 15230964 NR Description: putative protein; protein id: At3g58120
  misc_feature (109)..(215): NCBI GI NO: 18491297 NR Description: At2g42380/MHK10.10 [Arabidopsis thaliana]
NLTDSFIRRRRQQSIFFSPFLVSILQISSPSRFIINIEMASSKGSQNHRNLGCNGKQALLPPKSPFTGGPTFSADFVPSSVIGSKAVQKLGEGNANHHRTSSESFLIEEQPSWLDDLLNEPETPVRKGGHRRSSSDSFAYVDVPVGFDVDYTLWDGGRYNNNNGFSNHVRGPKESDYLRSQPVPFYPSAHLSKQKIRPWDSLPDSGARPNSSSGC

SEQ ID NO: 1512 - protein, 177 aa, Arabidopsis thaliana
  peptide (1)..(177): Ceres Seq. ID no. 12395171
  misc_feature (1)..(177): NCBI GI NO: 30680232 NR Description: bZIP transcriptional activator protein -related
  misc_feature (1)..(177): NCBI GI NO: 27311723 NR Description: Unknown protein [Arabidopsis thaliana]
  misc_feature (1)..(177): NCBI GI NO: 28393180 NR Description: putative bZIP family transcription factor
  misc_feature (1)..(177): NCBI GI NO: 25404190 NR Description: hypothetical protein T18I24.3
  misc_feature (1)..(177): NCBI GI NO: 30696210 NR Description: bZIP family transcription factor
  misc_feature (56)..(104): NCBI GI NO: 18399693 NR Description: bZIP family transcription factor
  misc_feature (56)..(104): NCBI GI NO: 25403436 NR Description: protein F15O4.49 [imported] - Arabidopsis thaliana
  misc_feature (56)..(104): NCBI GI NO: 21592919 NR Description: unknown [Arabidopsis thaliana]
  misc_feature (20)..(177): NCBI GI NO: 15230964 NR Description: putative protein; protein id: At3g58120
  misc_feature (71)..(177): NCBI GI NO: 18491297 NR Description: At2g42380/MHK10.10 [Arabidopsis thaliana]
MASSKGSQNHRNLGCNGKQALLPPKSPFTGGPTFSADFVPSSVIGSKAVQKLGEGNANHHRTSSESFLIEEQPSWLDDLLNEPETPVRKGGHRRSSSDSFAYVDVPVGFDVDYTLWDGGRYNNNNGFSNHVRGPKESDYLRSQPVPFYPSAHLSKQKIRPWDSLPDSGARPNSSSGC

SEQ ID NO: 1513 - DNA, 1910 bp, Arabidopsis thaliana
  misc_feature (1)..(1910): Ceres Seq. ID no. 12370285
atttaaaaaagaaaaaagaagaaaagagagagagagactcacaaatcataatatctccttcattaactcataatcactttaaagaacattggaatcagattcattacatagggattgatatggaaaagtcaaaccaaccagttcatgtaaccttgtccgaattgaaggacggagataaagaaatcgttgatgctgaatttttggttgatcttcttgagagctatagatttggtaaagataatgttcccgcccgagaatttcgatccaaggcggcagcgacggctccggcgccggtcaacaccaccgagatagagttggaagaggataatgatggatctcaagctcaaggtaacaattctgttagtgaaagtacatcatcgctattttccgattcagatccaatagtacttgagagtactgtgagcgaaaccggttcaaacgaagaatctgaaaccggttcaaacgaagaaaatggtaataattggttagagtcgagctccacaaacttgccaaatgtagagaacaaaaggcaacggaatggagaagattgtgagatagaagaggaagaagaaaataacgagagatcattatcggattcagaagagaagtcaaacctagagaagttgcttgggacacaagaaaactatgagcttggaaatgaggatgaagaaaagaacgagagatcatcgtcagattcagaagagaagtcaaacctagagaattttcttgcgacacaagaaaactacgagctttactgtcctagctgtagcacatgtatcaccagaaatgtggttctcaagaaaagaaaacgagggaagcacgttaattcatctctggatctgaaacccgatataccggttgttgaaccggacgaaccaagcgacattgaggagatggaatcaccagttaaggtttatgtccctgagactcggattgaggatgatcaagaagataaagagggaactatctttacttgcttggtttgtgatctaaagtacttcatccggttaggaacaaagttcttacaacttgattatatcaggggaaaaccggttgagaaatcagttgaagaatatatagatgtgaggaagagtataaacaccacacaatcaccaccacaaattcaaccggacggagaaagattcgccattgagttgttaaagagcaccgtctacggcggtctcactgagaccatcaccagcctcggcgttgtatcatctgcttctgcctctggttcctccaccatgaatatattggctcttgctgtcgcaaatttggccggtgggctcatcgtcctcgctcaaaactttcaagatctaagaaacagttcagatcaagagaaagataggtacgaggaattgttagggagacgtactaaatcccggatacatatcttagtagcggtcatgtcttacattttcttcggcctaattcctccgttagtttacgcattttccttctacgaaaccggaatcaagaactacaagctcatctcggttttcttgggttctctggtttgcgtaattttgctcggttcgatcaaggtctatgtccgaaaaccaaccaattcatgtggatcgactaaagcttatctcaaatctgcggcttattatacgtctattgttgttgcttcttgcggaatctcatacgttgtcggagatattatgggagagtatatcgagaagctcagtttggttggtttagaccagatcagtataacttcaccatgttatggaattaaacccgaggagtgccggtttacttccttttaatatacagtgggactaagaaccggtctgaccaacgttgtataatttctgttctaattacttactaaatctctgtatcttttctagtaaaaaatcaaaactaatgctttcatagaataaatgtgttttgaggtttttctc

SEQ ID NO: 1514 - protein, 589 aa, Arabidopsis thaliana
  peptide (1)..(589): Ceres Seq. ID no. 12370286
  misc_feature (40)..(589): NCBI GI NO: 21592516 NR Description: unknown [Arabidopsis thaliana]
  misc_feature (40)..(589): NCBI GI NO: 30689367 NR Description: expressed protein [Arabidopsis thaliana]
  misc_feature (40)..(589): NCBI GI NO: 30689371 NR Description: expressed protein [Arabidopsis thaliana]
  misc_feature (41)..(270): NCBI GI NO: 30687764 NR Description: expressed protein [Arabidopsis thaliana]
  misc_feature (383)..(561): NCBI GI NO: 30687764 NR Description: expressed protein [Arabidopsis thaliana]
  misc_feature (383)..(561): NCBI GI NO: 7487471 NR Description: hypothetical protein T27E11
  misc_feature (165)..(270): NCBI GI NO: 7487471 NR Description: hypothetical protein T27E11
  misc_feature (87)..(340): NCBI GI NO: 24413974 NR Description: contains ESTs C71658
  misc_feature (349)..(552): NCBI GI NO: 24413974 NR Description: contains ESTs C71658
  misc_feature (383)..(561): NCBI GI NO: 15912253 NR Description: AT4g27870/T27E11_110 [Arabidopsis thaliana]
LKKKKEEKRERDSQIIISPSLTHNHFKEHWNQIHYIGIDMEKSNQPVHVTLSELKDGDKEIVDAEFLVDLLESYRFGKDNVPAREFRSKAAATAPAPVNTTEIELEEDNDGSQAQGNNSVSESTSSLFSDSDPIVLESTVSETGSNEESETGSNEENGNNWLESSSTNLPNVENKRQRNGEDCEIEEEEENNERSLSDSEEKSNLEKLLGTQENYELGNEDEEKNERSSSDSEEKSNLENFLATQENYELYCPSCSTCITRNVVLKKRKRGKHVNSSLDLKPDIPVVEPDEPSDIEEMESPVKVYVPETRIEDDQEDKEGTIFTCLVCDLKYFIRLGTKFLQLDYIRGKPVEKSVEEYIDVRKSINTTQSPPQIQPDGERFAIELLKSTVYGGLTETITSLGVVSSASASGSSTMNILALAVANLAGGLIVLAQNFQDLRNSSDQEKDRYEELLGRRTKSRIHILVAVMSYIFFGLIPPLVYAFSFYETGIKNYKLISVFLGSLVCVILLGSIKVYVRKPTNSCGSTKAYLKSAAYYTSIVVASCGISYVVGDIMGEYIEKLSLVGLDQISITSPCYGIKPEECRFTSF

SEQ ID NO: 1515 - protein, 550 aa, Arabidopsis thaliana
  peptide (1)..(550): Ceres Seq. ID no. 12370287
  misc_feature (1)..(550): NCBI GI NO: 21592516 NR Description: unknown [Arabidopsis thaliana]
  misc_feature (1)..(550): NCBI GI NO: 30689367 NR Description: expressed protein [Arabidopsis thaliana]
  misc_feature (1)..(550): NCBI GI NO: 30689371 NR Description: expressed protein [Arabidopsis thaliana]
  misc_feature (2)..(231): NCBI GI NO: 30687764 NR Description: expressed protein [Arabidopsis thaliana]
  misc_feature (344)..(522): NCBI GI NO: 30687764 NR Description: expressed protein [Arabidopsis thaliana]
  misc_feature (344)..(522): NCBI GI NO: 7487471 NR Description: hypothetical protein T27E11
  misc_feature (126)..(231): NCBI GI NO: 7487471 NR Description: hypothetical protein T27E11
  misc_feature (48)..(301): NCBI GI NO: 24413974 NR Description: contains ESTs C71658
  misc_feature (310)..(513): NCBI GI NO: 24413974 NR Description: contains ESTs C71658
  misc_feature (344)..(522): NCBI GI NO: 15912253 NR Description: AT4g27870/T27E11_110 [Arabidopsis thaliana]
MEKSNQPVHVTLSELKDGDKEIVDAEFLVDLLESYRFGKDNVPAREFRSKAAATAPAPVNTTEIELEEDNDGSQAQGNNSVSESTSSLFSDSDPIVLESTVSETGSNEESETGSNEENGNNWLESSSTNLPNVENKRQRNGEDCEIEEEEENNERSLSDSEEKSNLEKLLGTQENYELGNEDEEKNERSSSDSEEKSNLENFLATQENYELYCPSCSTCITRNVVLKKRKRGKHVNSSLDLKPDIPVVEPDEPSDIEEMESPVKVYVPETRIEDDQEDKEGTIFTCLVCDLKYFIRLGTKFLQLDYIRGKPVEKSVEEYIDVRKSINTTQSPPQIQPDGERFAIELLKSTVYGGLTETITSLGVVSSASASGSSTMNILALAVANLAGGLIVLAQNFQDLRNSSDQEKDRYEELLGRRTKSRIHILVAVMSYIFFGLIPPLVYAFSFYETGIKNYKLISVFLGSLVCVILLGSIKVYVRKPTNSCGSTKAYLKSAAYYTSIVVASCGISYVVGDIMGEYIEKLSLVGLDQISITSPCYGIKPEECRFTSF

SEQ ID NO: 1516 - DNA, 1616 bp, Arabidopsis thaliana
  misc_feature (1)..(1616): Ceres Seq. ID no. 13493832
ccacgcgtccgcatctcttgttctctccgcccatctctgctctcttttattttcccagaaagtttttttttttttttttttccgaattccgttaatctcattggggtttccattgatagcaatggcgacggctttcgctcccactaagctcactgccacggttcctctgcatggatcccatgagaatcgtctcttgctcccgatccgattggctcctccttcttctttcctcggatccacccgttccctctcccttcgcagactcaatcactccaacgccacccgtcgatctcccgtcgtctctgtccaggaagttgtcaaggagaagcaatccaccaataataccagcctgttgataaccaaagaggaaggattggagttgtatgaagatatgatactaggtagatctttcgaagacatgtgtgctcaaatgtattaccgaggcaagatgtttggttttgttcacttgtacaatggccaagaggctgtttctactggctttatcaagctccttaccaagtctgactctgtcgttagtacctaccgtgaccatgtccatgccctcagcaaaggtgtctctgctcgtgctgttatgagcgagctcttcggcaaggttactggatgctgcagaggccaaggtggatccatgcacatgttctccaaagaacacaacatgcttggtggctttgcttttattggtgaaggcattcctgtcgccactggtgctgcctttagctccaagtacaggagggaagtcttgaaacaggattgtgatgatgtcactgtcgcctttttcggagatggaacttgtaacaacggacagttcttcgagtgtctcaacatggctgctctctataaactgcctattatctttgttgtcgagaataacttgtgggccattgggatgtctcacttgagagccacttctgaccccgagatttggaagaaaggtcctgcatttgggatgcctggtgttcatgttgacggtatggatgtcttgaaggtcagggaagtcgctaaagaagctgtcactagagctagaagaggagaaggtccaaccttggttgaatgtgagacttatagattcagaggacactccttggctgatcccgatgagctccgtgatgctgctgagaaagccaaatacgcggctagagacccaatcgcagcattgaagaagtatttgatagagaacaagcttgcaaaggaagcagagctaaagtcaatagagaaaaagatagacgagttggtggaggaagcggttgagtttgcagacgctagtccacagcccggtcgcagtcagttgctagagaatgtgtttgctgatccaaaaggatttggaattggacctgatggacggtacagatgtgaggaccccaagtttaccgaaggcacagctcaagtctgagaagacaagtttaaccataagctgtctactgtctcttcgatgtttctatatatcttattaagttaaatgctacagagaatcagtttgaatcatttgcactttttgctttttgtttggtgttactaaactatcacaaggttcttcttgtagttcgttgggttttcattggttaccacttaccagagaattgtatttttttttttaaagg

SEQ ID NO: 1517 - protein, 468 aa, Arabidopsis thaliana
  peptide (1)..(468): Ceres Seq. ID no. 13493833
  misc_feature (129)..(433): Pfam Name: Pfam Description:  Dehydrogenase E1 component
  misc_feature (41)..(468): NCBI GI NO: 15223294 NR Description: pyruvate dehydrogenase E1 alpha subunit
  misc_feature (41)..(457): NCBI GI NO: 6715645 NR Description: T25K16.8 [Arabidopsis thaliana]
  misc_feature (119)..(468): NCBI GI NO: 38344868 NR Description: OSJNBa0020P07.11
  misc_feature (102)..(442): NCBI GI NO: 23041416 NR Description: hypothetical protein
  misc_feature (102)..(442): NCBI GI NO: 17230200 NR Description: pyruvate dehydrogenase E1 component
  misc_feature (113)..(442): NCBI GI NO: 23128827 NR Description: hypothetical protein [Nostoc punctiforme]
  misc_feature (113)..(442): NCBI GI NO: 16331186 NR Description: pyruvate dehydrogenase E1 component, alpha subunit
  misc_feature (112)..(442): NCBI GI NO: 11465733 NR Description: pyruvate dehydrogenase E1 component alpha subunit
  misc_feature (119)..(442): NCBI GI NO: 22298712 NR Description: pyruvate dehydrogenase E1 component, alpha subunit
  misc_feature (119)..(442): NCBI GI NO: 33861844 NR Description: Pyruvate dehydrogenase E1 alpha subunit
HASASLVLSAHLCSLLFSQKVFFFFFFRIPLISLGFPLIAMATAFAPTKLTATVPLHGSHENRLLLPIRLAPPSSFLGSTRSLSLRRLNHSNATRRSPVVSVQEVVKEKQSTNNTSLLITKEEGLELYEDMILGRSFEDMCAQMYYRGKMFGFVHLYNGQEAVSTGFIKLLTKSDSVVSTYRDHVHALSKGVSARAVMSELFGKVTGCCRGQGGSMHMFSKEHNMLGGFAFIGEGIPVATGAAFSSKYRREVLKQDCDDVTVAFFGDGTCNNGQFFECLNMAALYKLPIIFVVENNLWAIGMSHLRATSDPEIWKKGPAFGMPGVHVDGMDVLKVREVAKEAVTRARRGEGPTLVECETYRFRGHSLADPDELRDAAEKAKYAARDPIAALKKYLIENKLAKEAELKSIEKKIDELVEEAVEFADASPQPGRSQLLENVFADPKGFGIGPDGRYRCEDPKFTEGTAQV

SEQ ID NO: 1518 - protein, 428 aa, Arabidopsis thaliana
  peptide (1)..(428): Ceres Seq. ID no. 13493834
  misc_feature (89)..(393): Pfam Name: Pfam Description:  Dehydrogenase E1 component
  misc_feature (1)..(428): NCBI GI NO: 15223294 NR Description: pyruvate dehydrogenase E1 alpha subunit
  misc_feature (1)..(417): NCBI GI NO: 6715645 NR Description: T25K16.8 [Arabidopsis thaliana]
  misc_feature (79)..(428): NCBI GI NO: 38344868 NR Description: OSJNBa0020P07.11
  misc_feature (62)..(402): NCBI GI NO: 23041416 NR Description: hypothetical protein
  misc_feature (62)..(402): NCBI GI NO: 17230200 NR Description: pyruvate dehydrogenase E1 component
  misc_feature (73)..(402): NCBI GI NO: 23128827 NR Description: hypothetical protein [Nostoc punctiforme]
  misc_feature (73)..(402): NCBI GI NO: 16331186 NR Description: pyruvate dehydrogenase E1 component, alpha subunit
  misc_feature (72)..(402): NCBI GI NO: 11465733 NR Description: pyruvate dehydrogenase E1 component alpha subunit
  misc_feature (79)..(402): NCBI GI NO: 22298712 NR Description: pyruvate dehydrogenase E1 component, alpha subunit
  misc_feature (79)..(402): NCBI GI NO: 33861844 NR Description: Pyruvate dehydrogenase E1 alpha subunit
MATAFAPTKLTATVPLHGSHENRLLLPIRLAPPSSFLGSTRSLSLRRLNHSNATRRSPVVSVQEVVKEKQSTNNTSLLITKEEGLELYEDMILGRSFEDMCAQMYYRGKMFGFVHLYNGQEAVSTGFIKLLTKSDSVVSTYRDHVHALSKGVSARAVMSELFGKVTGCCRGQGGSMHMFSKEHNMLGGFAFIGEGIPVATGAAFSSKYRREVLKQDCDDVTVAFFGDGTCNNGQFFECLNMAALYKLPIIFVVENNLWAIGMSHLRATSDPEIWKKGPAFGMPGVHVDGMDVLKVREVAKEAVTRARRGEGPTLVECETYRFRGHSLADPDELRDAAEKAKYAARDPIAALKKYLIENKLAKEAELKSIEKKIDELVEEAVEFADASPQPGRSQLLENVFADPKGFGIGPDGRYRCEDPKFTEGTAQV

SEQ ID NO: 1519 - protein, 338 aa, Arabidopsis thaliana
  peptide (1)..(338): Ceres Seq. ID no. 13493835
  misc_feature (1)..(303): Pfam Name: Pfam Description:  Dehydrogenase E1 component
  misc_feature (1)..(338): NCBI GI NO: 15223294 NR Description: pyruvate dehydrogenase E1 alpha subunit
  misc_feature (1)..(327): NCBI GI NO: 6715645 NR Description: T25K16.8 [Arabidopsis thaliana]
  misc_feature (1)..(338): NCBI GI NO: 38344868 NR Description: OSJNBa0020P07.11
  misc_feature (1)..(312): NCBI GI NO: 23041416 NR Description: hypothetical protein
  misc_feature (1)..(312): NCBI GI NO: 17230200 NR Description: pyruvate dehydrogenase E1 component
  misc_feature (1)..(312): NCBI GI NO: 23128827 NR Description: hypothetical protein [Nostoc punctiforme]
  misc_feature (1)..(312): NCBI GI NO: 16331186 NR Description: pyruvate dehydrogenase E1 component, alpha subunit
  misc_feature (1)..(312): NCBI GI NO: 11465733 NR Description: pyruvate dehydrogenase E1 component alpha subunit
  misc_feature (1)..(312): NCBI GI NO: 22298712 NR Description: pyruvate dehydrogenase E1 component, alpha subunit
  misc_feature (1)..(312): NCBI GI NO: 33861844 NR Description: Pyruvate dehydrogenase E1 alpha subunit
MILGRSFEDMCAQMYYRGKMFGFVHLYNGQEAVSTGFIKLLTKSDSVVSTYRDHVHALSKGVSARAVMSELFGKVTGCCRGQGGSMHMFSKEHNMLGGFAFIGEGIPVATGAAFSSKYRREVLKQDCDDVTVAFFGDGTCNNGQFFECLNMAALYKLPIIFVVENNLWAIGMSHLRATSDPEIWKKGPAFGMPGVHVDGMDVLKVREVAKEAVTRARRGEGPTLVECETYRFRGHSLADPDELRDAAEKAKYAARDPIAALKKYLIENKLAKEAELKSIEKKIDELVEEAVEFADASPQPGRSQLLENVFADPKGFGIGPDGRYRCEDPKFTEGTAQV

SEQ ID NO: 1520 - DNA, 956 bp, Arabidopsis thaliana
  misc_feature (1)..(956): Ceres Seq. ID no. 12395374
aaatgaaatgtatagagaggtaaagtgggaattttgacattggtgggtttagggaaaaaacagagagaaagagatggattcgtcgtcagtagggaacaccaacaggtactgggtcctccgccacggcaagagcattcccaacgagagaggcctcgtcgtctcttccatggaaaatggtgtcctccccgagtaccagttagcccctgatggtgtcgctcaggctcgtctcgccggcgaatcgttcctccagcaacttaaggaaagtaacatagaactggacaaggttcgcatttgctactcccccttctccagaaccactcacaccgctagggttgttgctgaggtcctcaatctcccctttgatgctcctcaatgcaagatgatggaagatctgcgcgaacgctattttggacctacatttgaactcaagtcccatgacaagtacccagagatatgggctcttgatgaaaaagatccttttatgggaccagaaggaggtgaaagtgctgatgatgttgtttcccgacttgccactgccatgaaatccatggaagctgaatatcaaaggtgtgcaattctggtggtgagtcatggagatcctctgcagatgttgcagaacgttttccattcagcaaagcaacaggaaggagatggtttggcagagaagtttcagttgagcagagttgcttctgtcttgtcacagcaccgcaagtttgctttgctcactggggaactccgacccctcatctgattggcaatcaatgtattcagcttttggaatgtctttccttgaactcttttgttatcaattcctatttctctcccattggcattcttgcaattgccaaacttggattagcctgtttattatcacctctgtttgttagagaaaacatgaagatttactcctgtaataagaaatcatgctcatttatgttatatgtatcttcaaatct

SEQ ID NO: 1521 - protein, 225 aa, Arabidopsis thaliana
  peptide (1)..(225): Ceres Seq. ID no. 12395375
  misc_feature (10)..(220): Pfam Name: Pfam Description:  Phosphoglycerate mutase family
  misc_feature (1)..(225): NCBI GI NO: 21592519 NR Description: unknown [Arabidopsis thaliana]
  misc_feature (1)..(225): NCBI GI NO: 18420226 NR Description: expressed protein; protein id: At4g38370
  misc_feature (102)..(225): NCBI GI NO: 7485952 NR Description: hypothetical protein F22I13
  misc_feature (1)..(108): NCBI GI NO: 7485952 NR Description: hypothetical protein F22I13
  misc_feature (10)..(225): NCBI GI NO: 38344128 NR Description: OSJNBb0072N21.7
MDSSSVGNTNRYWVLRHGKSIPNERGLVVSSMENGVLPEYQLAPDGVAQARLAGESFLQQLKESNIELDKVRICYSPFSRTTHTARVVAEVLNLPFDAPQCKMMEDLRERYFGPTFELKSHDKYPEIWALDEKDPFMGPEGGESADDVVSRLATAMKSMEAEYQRCAILVVSHGDPLQMLQNVFHSAKQQEGDGLAEKFQLSRVASVLSQHRKFALLTGELRPLI

SEQ ID NO: 1522 - protein, 194 aa, Arabidopsis thaliana
  peptide (1)..(194): Ceres Seq. ID no. 12395376
  misc_feature (1)..(189): Pfam Name: Pfam Description:  Phosphoglycerate mutase family
  misc_feature (1)..(194): NCBI GI NO: 21592519 NR Description: unknown [Arabidopsis thaliana]
  misc_feature (1)..(194): NCBI GI NO: 18420226 NR Description: expressed protein; protein id: At4g38370
  misc_feature (71)..(194): NCBI GI NO: 7485952 NR Description: hypothetical protein F22I13
  misc_feature (1)..(77): NCBI GI NO: 7485952 NR Description: hypothetical protein F22I13
  misc_feature (1)..(194): NCBI GI NO: 38344128 NR Description: OSJNBb0072N21.7
MENGVLPEYQLAPDGVAQARLAGESFLQQLKESNIELDKVRICYSPFSRTTHTARVVAEVLNLPFDAPQCKMMEDLRERYFGPTFELKSHDKYPEIWALDEKDPFMGPEGGESADDVVSRLATAMKSMEAEYQRCAILVVSHGDPLQMLQNVFHSAKQQEGDGLAEKFQLSRVASVLSQHRKFALLTGELRPLI

SEQ ID NO: 1523 - protein, 123 aa, Arabidopsis thaliana
  peptide (1)..(123): Ceres Seq. ID no. 12395377
  misc_feature (1)..(118): Pfam Name: Pfam Description:  Phosphoglycerate mutase family
  misc_feature (1)..(123): NCBI GI NO: 21592519 NR Description: unknown [Arabidopsis thaliana]
  misc_feature (1)..(123): NCBI GI NO: 18420226 NR Description: expressed protein; protein id: At4g38370
  misc_feature (1)..(123): NCBI GI NO: 7485952 NR Description: hypothetical protein F22I13
  misc_feature (1)..(123): NCBI GI NO: 38344128 NR Description: OSJNBb0072N21.7
MMEDLRERYFGPTFELKSHDKYPEIWALDEKDPFMGPEGGESADDVVSRLATAMKSMEAEYQRCAILVVSHGDPLQMLQNVFHSAKQQEGDGLAEKFQLSRVASVLSQHRKFALLTGELRPLI

SEQ ID NO: 1524 - DNA, 1348 bp, Arabidopsis thaliana
  misc_feature (1)..(1348): Ceres Seq. ID no. 13497108
cttcaccttccgtcgtagttccccgacaagctaactactgttgagccccgccgcatccgaagccgacttttcaaatcgtcgagcttcaacaatgacgtctcttctccttccttcatctcaatttctccagactcgaacccaaaacaatggccaaccattccttctccctctaacaccactgttcgcaccactaccttctctccgtcagttgagaccgaaacacatctctatttccgccgcagcgccgaagaaaaaatcggagactgtcacggcgccgacaccggcagcgaagaagaattcgagcgtggaggaggaaacagaagaggaagtagaggaagatatgccgtggattcaagagaaggcgttagacctagtcgagttcactggatcggtgagtcaggcgattcctggtcctcgagttggaagtagcaaattgccgtggatgctcgccgttccgttagcttacgccggcgtcactttcgtcactgctttcgtcaaaaccgttcagaagttctcttctcctaaagctcagcgcaagaaactggtgaatcagaatgctatgctttgcagatctatagatgagctattaaggaaagctggaacagtgcatagctctgagcttaaggcacttgaacaaaagacagagtttaacatggaggagatattgcggaaatacattcgttatgcgttgaatgagaaaccgtttaatcccgaccttgttgctgatctcattcatctaagaaaagcttctggtttgaatgattctcagattcctgagattttaaatgagatctctcgtcgtattgtcaaggaaaaaggtccggtagtgatgaaaatgcaaggctttaccgaaaaaggattcaagagaaaactcgccgtgcaagcgctttttggaaagatttactatctttctgagcttcctgacttctgctcaaaagacaactccttaatcgtcaaggaaatattcggcgttacagatgaagacgcagagaagctgcggatacacgctcttgctgaagctggagacatagaggcacttgagaaaatggtggaatttgagaaaactgcggagtcttcttcggataaagaagaagattcaaatgaagaagatgactctaacaccacttcctaagatgtttgttcaacgaccaactttcaacagtagattctttccaaagggggttttcttcttctgttctttgacttataccccaagttgtgttgtttacagcagaagacgtctgattccaacagaaattgtcttttgcaaaaaaccatgacacagctcgtaatacaaattaactgcatctatagtgcagcacagcaatacaagttggggcttatattc

SEQ ID NO: 1525 - protein, 346 aa, Arabidopsis thaliana
  peptide (1)..(346): Ceres Seq. ID no. 13497109
  misc_feature (1)..(346): NCBI GI NO: 18415850 NR Description: expressed protein [Arabidopsis thaliana]
  misc_feature (1)..(346): NCBI GI NO: 21592521 NR Description: unknown [Arabidopsis thaliana]
  misc_feature (40)..(296): NCBI GI NO: 9759348 NR Description: gene_id:MAH20
  misc_feature (30)..(321): NCBI GI NO: 38344450 NR Description: OSJNBa0038O10.22
  misc_feature (261)..(346): NCBI GI NO: 9759348 NR Description: gene_id:MAH20
MTSLLLPSSQFLQTRTQNNGQPFLLPLTPLFAPLPSLRQLRPKHISISAAAPKKKSETVTAPTPAAKKNSSVEEETEEEVEEDMPWIQEKALDLVEFTGSVSQAIPGPRVGSSKLPWMLAVPLAYAGVTFVTAFVKTVQKFSSPKAQRKKLVNQNAMLCRSIDELLRKAGTVHSSELKALEQKTEFNMEEILRKYIRYALNEKPFNPDLVADLIHLRKASGLNDSQIPEILNEISRRIVKEKGPVVMKMQGFTEKGFKRKLAVQALFGKIYYLSELPDFCSKDNSLIVKEIFGVTDEDAEKLRIHALAEAGDIEALEKMVEFEKTAESSSDKEEDSNEEDDSNTTS

SEQ ID NO: 1526 - protein, 263 aa, Arabidopsis thaliana
  peptide (1)..(263): Ceres Seq. ID no. 13497110
  misc_feature (1)..(263): NCBI GI NO: 18415850 NR Description: expressed protein [Arabidopsis thaliana]
  misc_feature (1)..(263): NCBI GI NO: 21592521 NR Description: unknown [Arabidopsis thaliana]
  misc_feature (1)..(213): NCBI GI NO: 9759348 NR Description: gene_id:MAH20
  misc_feature (1)..(238): NCBI GI NO: 38344450 NR Description: OSJNBa0038O10.22
  misc_feature (178)..(263): NCBI GI NO: 9759348 NR Description: gene_id:MAH20
MPWIQEKALDLVEFTGSVSQAIPGPRVGSSKLPWMLAVPLAYAGVTFVTAFVKTVQKFSSPKAQRKKLVNQNAMLCRSIDELLRKAGTVHSSELKALEQKTEFNMEEILRKYIRYALNEKPFNPDLVADLIHLRKASGLNDSQIPEILNEISRRIVKEKGPVVMKMQGFTEKGFKRKLAVQALFGKIYYLSELPDFCSKDNSLIVKEIFGVTDEDAEKLRIHALAEAGDIEALEKMVEFEKTAESSSDKEEDSNEEDDSNTTS

SEQ ID NO: 1527 - protein, 229 aa, Arabidopsis thaliana
  peptide (1)..(229): Ceres Seq. ID no. 13497111
  misc_feature (1)..(229): NCBI GI NO: 18415850 NR Description: expressed protein [Arabidopsis thaliana]
  misc_feature (1)..(229): NCBI GI NO: 21592521 NR Description: unknown [Arabidopsis thaliana]
  misc_feature (1)..(179): NCBI GI NO: 9759348 NR Description: gene_id:MAH20
  misc_feature (1)..(204): NCBI GI NO: 38344450 NR Description: OSJNBa0038O10.22
  misc_feature (144)..(229): NCBI GI NO: 9759348 NR Description: gene_id:MAH20
MLAVPLAYAGVTFVTAFVKTVQKFSSPKAQRKKLVNQNAMLCRSIDELLRKAGTVHSSELKALEQKTEFNMEEILRKYIRYALNEKPFNPDLVADLIHLRKASGLNDSQIPEILNEISRRIVKEKGPVVMKMQGFTEKGFKRKLAVQALFGKIYYLSELPDFCSKDNSLIVKEIFGVTDEDAEKLRIHALAEAGDIEALEKMVEFEKTAESSSDKEEDSNEEDDSNTTS

SEQ ID NO: 1528 - DNA, 1350 bp, Arabidopsis thaliana
  misc_feature (1)..(1350): Ceres Seq. ID no. 12421311
  misc_feature (482)..(482): n is a, c, t, g, unknown, or other
acatagccatatatttttttggtcgtactttgtatctttggcaaaacacaaaaaacaaaaacaaaaaaaaactccttatatttttgtatttgatgctaattgtcgtatagatgcccaaattcaattcaacccaagctcccaatttatttcttctccttctcctccttctcgttatccttctttgttcaacgcaaacacaatgccacaccaaaggtctacgattacgaccaagaaaccagaagaatatgaacacgacgagagatcggacacaaaacccggaagatgagttcatgaaatgggtgagattcgttggaagccttaaacactcagtgttcaaggcagccaagaacaaactcttcccttcttatacactaactgtccacaagaaatccaataaaggtgacttcactaaaatccaagacgccattgattctctccctctcatcaactttgttcgtgtcgtcatcaaggttcatgccggngtttacaaggagaaggtgagcatacccccactgaaggcatttataacaatagaaggagaaggagcagagaagacaacagtggaatggggagacacagcacaaacccctgactcaaaaggcaaccccatgggcacttacaactcggcctcgttcgcggtcaactctcctttctttgtcgctaagaatatcacattcaggaacacgaccccagtccccttgcccggtgcagttggtaaacaggcggtagcattgagggtgtcggcagacaatgccgcgttttttgggtgtagaatgcttggtgctcaagacactctctatgaccatttgggaagacattattacaaagattgttacattgagggatcagtggacttcatctttggaaatgccctttctctttatgaagggtgccacgtgcatgcgatagcggataagctaggagcagtgacggcacaggggaggagcagtgttctagaggacaccggattctcgttcgtaaagtgtaaggtgacagggacaggggttttgtatcttgggagggcatggggtcccttctcaagagtcgtttttgcttacacttacatggacaacatcatcctccctagaggctggtacaattggggagacccttcccgtgagatgacggtgttctatgggcagtacaagtgcacgggagcaggagcaaactatggagggagggtggcttgggcaagagagctcaccgacgaagaagctaagccttttctttctcttacctttatcgacggctctgaatggatcaaactctaaccatatacacctttttttattttctttccacctaattaataatgtacattttccctgtaataaaataaaaatatttttt

SEQ ID NO: 1529 - protein, 386 aa, Arabidopsis thaliana
  peptide (1)..(386): Ceres Seq. ID no. 12421312
  misc_feature (96)..(381): Pfam Name: Pfam Description:  Pectinesterase
  misc_feature (1)..(386): NCBI GI NO: 15241163 NR Description: pectinesterase family; protein id: At5g19730
  misc_feature (32)..(386): NCBI GI NO: 34909402 NR Description: putative pectin methylesterase
  misc_feature (94)..(384): NCBI GI NO: 38345478 NR Description: OSJNBa0010H02.16
  misc_feature (99)..(384): NCBI GI NO: 15238111 NR Description: pectinesterase family; protein id: At5g47500
  misc_feature (99)..(384): NCBI GI NO: 9758778 NR Description: pectin methylesterase-like [Arabidopsis thaliana]
  misc_feature (97)..(385): NCBI GI NO: 15228023 NR Description: pectinesterase family; protein id: At2g36710.1
  misc_feature (97)..(385): NCBI GI NO: 27754550 NR Description: putative pectinesterase family protein
  misc_feature (98)..(385): NCBI GI NO: 15220471 NR Description: pectinesterase family; protein id: At1g05310.1
  misc_feature (93)..(386): NCBI GI NO: 15240544 NR Description: pectinesterase family; protein id: At5g55590.1
  misc_feature (98)..(385): NCBI GI NO: 25325338 NR Description: hypothetical protein
  misc_feature (124)..(124): Xaa is any aa, unknown or other
MPKFNSTQAPNLFLLLLLLLVILLCSTQTQCHTKGLRLRPRNQKNMNTTRDRTQNPEDEFMKWVRFVGSLKHSVFKAAKNKLFPSYTLTVHKKSNKGDFTKIQDAIDSLPLINFVRVVIKVHAXVYKEKVSIPPLKAFITIEGEGAEKTTVEWGDTAQTPDSKGNPMGTYNSASFAVNSPFFVAKNITFRNTTPVPLPGAVGKQAVALRVSADNAAFFGCRMLGAQDTLYDHLGRHYYKDCYIEGSVDFIFGNALSLYEGCHVHAIADKLGAVTAQGRSSVLEDTGFSFVKCKVTGTGVLYLGRAWGPFSRVVFAYTYMDNIILPRGWYNWGDPSREMTVFYGQYKCTGAGANYGGRVAWARELTDEEAKPFLSLTFIDGSEWIKL

SEQ ID NO: 1530 - protein, 341 aa, Arabidopsis thaliana
  peptide (1)..(341): Ceres Seq. ID no. 12421313
  misc_feature (51)..(336): Pfam Name: Pfam Description:  Pectinesterase
  misc_feature (1)..(341): NCBI GI NO: 15241163 NR Description: pectinesterase family; protein id: At5g19730
  misc_feature (1)..(341): NCBI GI NO: 34909402 NR Description: putative pectin methylesterase
  misc_feature (49)..(339): NCBI GI NO: 38345478 NR Description: OSJNBa0010H02.16
  misc_feature (54)..(339): NCBI GI NO: 15238111 NR Description: pectinesterase family; protein id: At5g47500
  misc_feature (54)..(339): NCBI GI NO: 9758778 NR Description: pectin methylesterase-like [Arabidopsis thaliana]
  misc_feature (52)..(340): NCBI GI NO: 15228023 NR Description: pectinesterase family; protein id: At2g36710.1
  misc_feature (52)..(340): NCBI GI NO: 27754550 NR Description: putative pectinesterase family protein
  misc_feature (53)..(340): NCBI GI NO: 15220471 NR Description: pectinesterase family; protein id: At1g05310.1
  misc_feature (48)..(341): NCBI GI NO: 15240544 NR Description: pectinesterase family; protein id: At5g55590.1
  misc_feature (53)..(340): NCBI GI NO: 25325338 NR Description: hypothetical protein
  misc_feature (79)..(79): Xaa is any aa, unknown or other
MNTTRDRTQNPEDEFMKWVRFVGSLKHSVFKAAKNKLFPSYTLTVHKKSNKGDFTKIQDAIDSLPLINFVRVVIKVHAXVYKEKVSIPPLKAFITIEGEGAEKTTVEWGDTAQTPDSKGNPMGTYNSASFAVNSPFFVAKNITFRNTTPVPLPGAVGKQAVALRVSADNAAFFGCRMLGAQDTLYDHLGRHYYKDCYIEGSVDFIFGNALSLYEGCHVHAIADKLGAVTAQGRSSVLEDTGFSFVKCKVTGTGVLYLGRAWGPFSRVVFAYTYMDNIILPRGWYNWGDPSREMTVFYGQYKCTGAGANYGGRVAWARELTDEEAKPFLSLTFIDGSEWIKL

SEQ ID NO: 1531 - protein, 326 aa, Arabidopsis thaliana
  peptide (1)..(326): Ceres Seq. ID no. 12421314
  misc_feature (36)..(321): Pfam Name: Pfam Description:  Pectinesterase
  misc_feature (1)..(326): NCBI GI NO: 15241163 NR Description: pectinesterase family; protein id: At5g19730
  misc_feature (1)..(326): NCBI GI NO: 34909402 NR Description: putative pectin methylesterase
  misc_feature (34)..(324): NCBI GI NO: 38345478 NR Description: OSJNBa0010H02.16
  misc_feature (39)..(324): NCBI GI NO: 15238111 NR Description: pectinesterase family; protein id: At5g47500
  misc_feature (39)..(324): NCBI GI NO: 9758778 NR Description: pectin methylesterase-like [Arabidopsis thaliana]
  misc_feature (37)..(325): NCBI GI NO: 15228023 NR Description: pectinesterase family; protein id: At2g36710.1
  misc_feature (37)..(325): NCBI GI NO: 27754550 NR Description: putative pectinesterase family protein
  misc_feature (38)..(325): NCBI GI NO: 15220471 NR Description: pectinesterase family; protein id: At1g05310.1
  misc_feature (33)..(326): NCBI GI NO: 15240544 NR Description: pectinesterase family; protein id: At5g55590.1
  misc_feature (38)..(325): NCBI GI NO: 25325338 NR Description: hypothetical protein
  misc_feature (64)..(64): Xaa is any aa, unknown or other
MKWVRFVGSLKHSVFKAAKNKLFPSYTLTVHKKSNKGDFTKIQDAIDSLPLINFVRVVIKVHAXVYKEKVSIPPLKAFITIEGEGAEKTTVEWGDTAQTPDSKGNPMGTYNSASFAVNSPFFVAKNITFRNTTPVPLPGAVGKQAVALRVSADNAAFFGCRMLGAQDTLYDHLGRHYYKDCYIEGSVDFIFGNALSLYEGCHVHAIADKLGAVTAQGRSSVLEDTGFSFVKCKVTGTGVLYLGRAWGPFSRVVFAYTYMDNIILPRGWYNWGDPSREMTVFYGQYKCTGAGANYGGRVAWARELTDEEAKPFLSLTFIDGSEWIKL

SEQ ID NO: 1532 - DNA, 1993 bp, Arabidopsis thaliana
  misc_feature (1)..(1993): Ceres Seq. ID no. 13497104
cataaaactcaaaaatctttggtcttcaaacttcaaacacttgagaaaaaagcttttgatttcacatcttaatctaacaagtcaaacacttttcaaaccacaaaattcgtcaaagctctgaaacaaataaacattttttaatttctccctttttaatggaaatctcttctttcccatttccatacctacaagacgacgagtgttcccatttccttggtctatttcaagacatggactcttctccttctactttcggattagaaggttttaatagcaacgacaataatactaatcaaaagaaacgcccaagaaaagacgacgaaggcggtggtggtggcggcggaggaacagaagttctaggagctgttaatggtaataataaggctgcttttggagatatactcgcgacgcttctgttgttagacgaggaagctaaacagcaacaagaacagtgggattttgaatttattaaagagaagtctttacttgaagctaatcataagaagaaagtgaaaacaatggatggttattacaatcaaatgcaagatcattactctgcagctggtgaaaccgatggttcgcgttcaaaacgcgcacggaaaaccgcggttgcggctgtggtttccgcggtagcttccggggcggacacaaccggtttagctgctccggttccgaccgcggatatcgctagcggttccgggtcaggaccgagtcataggaggttatgggttaaagaacgaaccacggactggtgggacagagtaagccggcctgattttccagaagacgagtttcggcgagagttccgtatgagcaaatcgacgtttaacctaatatgcgaggagctagatacgacggtgacgaagaaaaacacgatgttaagagacgcgattccagctccaaaacgcgtaggcgtttgcgtttggcgtttggcgacaggagctccgcttcgccacgtgtcggagcgtttcggtctgggaatctcaacttgccacaaactagtcatcgaagtctgccgcgcgatctacgacgttctcatgcccaagtatctcctctggccgtcggattcagagataaactcaacgaaagccaaattcgaatcggtccacaaaataccaaacgtcgtcggatcaatctacaccacacatattccgatcatcgctccgaaagtccacgtggcggcgtattttaacaagagacacacggagaggaatcagaagacgtcgtactcgataacagtacaaggagtggtcaacgccgacgggatcttcaccgacgtttgtatcggaaacccaggatctctcaccgacgatcagatcctggagaaatcttcgctttcacggcaaagagcggcgcgtgggatgttacgtgacagctggatagttggaaactctgggtttccgttgactgattatcttcttgtaccgtacacgagacagaatctgacgtggacgcagcacgcgtttaacgagagtatcggagagattcaggggattgcgacggctgcgtttgagaggctcaaaggacggtgggcttgtttgcagaaacggacggaggtgaagcttcaggatctgccgtacgtgcttggagcttgttgtgtgttgcataacatttgtgagatgaggaaggaggagatgttgccggagttgaagtttgaggtttttgatgatgtggcggtgccggagaataatatccgatctgctagtgcggttaatacgagggatcatatctctcacaatctcttgcatcgtggacttgccgggacaagaactctataggctctgtttttcaccttttcttattttgaaactgattttttattgcaaattctttttccaaattaggaataaaaacattttagggattggttggatacagaaagaatagttgaattgagagtagaagtggctgatgatattgtttgtgttacttattagcattgtgtaatctttagttcatgtattttctatacaaattgaatctgaaacctctt

SEQ ID NO: 1533 - protein, 540 aa, Arabidopsis thaliana
  peptide (1)..(540): Ceres Seq. ID no. 13497105
  misc_feature (1)..(540): NCBI GI NO: 30688449 NR Description: expressed protein [Arabidopsis thaliana]
  misc_feature (26)..(540): NCBI GI NO: 7452044 NR Description: hypothetical protein F27B13
  misc_feature (26)..(540): NCBI GI NO: 21592524 NR Description: unknown [Arabidopsis thaliana]
  misc_feature (38)..(540): NCBI GI NO: 15239835 NR Description: expressed protein [Arabidopsis thaliana]
  misc_feature (13)..(537): NCBI GI NO: 21902022 NR Description: B1097D05.23
  misc_feature (137)..(533): NCBI GI NO: 34906342 NR Description: unnamed protein product
  misc_feature (143)..(529): NCBI GI NO: 15233248 NR Description: expressed protein [Arabidopsis thaliana]
  misc_feature (199)..(486): NCBI GI NO: 18412695 NR Description: expressed protein [Arabidopsis thaliana]
  misc_feature (198)..(486): NCBI GI NO: 34908114 NR Description: P0031D11.14
  misc_feature (203)..(510): NCBI GI NO: 25553597 NR Description: OJ1656_E11.28
MEISSFPFPYLQDDECSHFLGLFQDMDSSPSTFGLEGFNSNDNNTNQKKRPRKDDEGGGGGGGGTEVLGAVNGNNKAAFGDILATLLLLDEEAKQQQEQWDFEFIKEKSLLEANHKKKVKTMDGYYNQMQDHYSAAGETDGSRSKRARKTAVAAVVSAVASGADTTGLAAPVPTADIASGSGSGPSHRRLWVKERTTDWWDRVSRPDFPEDEFRREFRMSKSTFNLICEELDTTVTKKNTMLRDAIPAPKRVGVCVWRLATGAPLRHVSERFGLGISTCHKLVIEVCRAIYDVLMPKYLLWPSDSEINSTKAKFESVHKIPNVVGSIYTTHIPIIAPKVHVAAYFNKRHTERNQKTSYSITVQGVVNADGIFTDVCIGNPGSLTDDQILEKSSLSRQRAARGMLRDSWIVGNSGFPLTDYLLVPYTRQNLTWTQHAFNESIGEIQGIATAAFERLKGRWACLQKRTEVKLQDLPYVLGACCVLHNICEMRKEEMLPELKFEVFDDVAVPENNIRSASAVNTRDHISHNLLHRGLAGTRTL

SEQ ID NO: 1534 - protein, 515 aa, Arabidopsis thaliana
  peptide (1)..(515): Ceres Seq. ID no. 13497106
  misc_feature (1)..(515): NCBI GI NO: 30688449 NR Description: expressed protein [Arabidopsis thaliana]
  misc_feature (1)..(515): NCBI GI NO: 7452044 NR Description: hypothetical protein F27B13
  misc_feature (1)..(515): NCBI GI NO: 21592524 NR Description: unknown [Arabidopsis thaliana]
  misc_feature (13)..(515): NCBI GI NO: 15239835 NR Description: expressed protein [Arabidopsis thaliana]
  misc_feature (1)..(512): NCBI GI NO: 21902022 NR Description: B1097D05.23
  misc_feature (112)..(508): NCBI GI NO: 34906342 NR Description: unnamed protein product
  misc_feature (118)..(504): NCBI GI NO: 15233248 NR Description: expressed protein [Arabidopsis thaliana]
  misc_feature (174)..(461): NCBI GI NO: 18412695 NR Description: expressed protein [Arabidopsis thaliana]
  misc_feature (173)..(461): NCBI GI NO: 34908114 NR Description: P0031D11.14
  misc_feature (178)..(485): NCBI GI NO: 25553597 NR Description: OJ1656_E11.28
MDSSPSTFGLEGFNSNDNNTNQKKRPRKDDEGGGGGGGGTEVLGAVNGNNKAAFGDILATLLLLDEEAKQQQEQWDFEFIKEKSLLEANHKKKVKTMDGYYNQMQDHYSAAGETDGSRSKRARKTAVAAVVSAVASGADTTGLAAPVPTADIASGSGSGPSHRRLWVKERTTDWWDRVSRPDFPEDEFRREFRMSKSTFNLICEELDTTVTKKNTMLRDAIPAPKRVGVCVWRLATGAPLRHVSERFGLGISTCHKLVIEVCRAIYDVLMPKYLLWPSDSEINSTKAKFESVHKIPNVVGSIYTTHIPIIAPKVHVAAYFNKRHTERNQKTSYSITVQGVVNADGIFTDVCIGNPGSLTDDQILEKSSLSRQRAARGMLRDSWIVGNSGFPLTDYLLVPYTRQNLTWTQHAFNESIGEIQGIATAAFERLKGRWACLQKRTEVKLQDLPYVLGACCVLHNICEMRKEEMLPELKFEVFDDVAVPENNIRSASAVNTRDHISHNLLHRGLAGTRTL

SEQ ID NO: 1535 - protein, 419 aa, Arabidopsis thaliana
  peptide (1)..(419): Ceres Seq. ID no. 13497107
  misc_feature (1)..(419): NCBI GI NO: 30688449 NR Description: expressed protein [Arabidopsis thaliana]
  misc_feature (1)..(419): NCBI GI NO: 7452044 NR Description: hypothetical protein F27B13
  misc_feature (1)..(419): NCBI GI NO: 21592524 NR Description: unknown [Arabidopsis thaliana]
  misc_feature (1)..(419): NCBI GI NO: 15239835 NR Description: expressed protein [Arabidopsis thaliana]
  misc_feature (1)..(416): NCBI GI NO: 21902022 NR Description: B1097D05.23
  misc_feature (16)..(412): NCBI GI NO: 34906342 NR Description: unnamed protein product
  misc_feature (22)..(408): NCBI GI NO: 15233248 NR Description: expressed protein [Arabidopsis thaliana]
  misc_feature (78)..(365): NCBI GI NO: 18412695 NR Description: expressed protein [Arabidopsis thaliana]
  misc_feature (77)..(365): NCBI GI NO: 34908114 NR Description: P0031D11.14
  misc_feature (82)..(389): NCBI GI NO: 25553597 NR Description: OJ1656_E11.28
MDGYYNQMQDHYSAAGETDGSRSKRARKTAVAAVVSAVASGADTTGLAAPVPTADIASGSGSGPSHRRLWVKERTTDWWDRVSRPDFPEDEFRREFRMSKSTFNLICEELDTTVTKKNTMLRDAIPAPKRVGVCVWRLATGAPLRHVSERFGLGISTCHKLVIEVCRAIYDVLMPKYLLWPSDSEINSTKAKFESVHKIPNVVGSIYTTHIPIIAPKVHVAAYFNKRHTERNQKTSYSITVQGVVNADGIFTDVCIGNPGSLTDDQILEKSSLSRQRAARGMLRDSWIVGNSGFPLTDYLLVPYTRQNLTWTQHAFNESIGEIQGIATAAFERLKGRWACLQKRTEVKLQDLPYVLGACCVLHNICEMRKEEMLPELKFEVFDDVAVPENNIRSASAVNTRDHISHNLLHRGLAGTRTL

SEQ ID NO: 1536 - DNA, 1429 bp, Arabidopsis thaliana
  misc_feature (1)..(1429): Ceres Seq. ID no. 12489625
aaaatctcctccaactccgagttatggctacatgttccctcttaccaccaccgtctttttctccgcgccggcgattctgtagtttttctcacaatcgccggtctctaccttcaatattcagtttcaacaaagagcgtgtctcacgaagagtcttctgtagctccaaagagaacgatataaacagagatcggaatcagtctacaggaattcaagtctacggcgaaatcgagaggttattaacagagactgtaaaaaattctcagagtagctccggtggatcctctgattggtcagaagttgagggagcatgggtgctgaaaccaagaaactcgaaaccgaagatggttgttcatttcattggcggtatatttgtcggtgcagcaccacagcttacttatcgattgtttctcgagagattagcggagaaggatgttttggttattgcgacaccatatgctagtggttttgaccacttcaatattgcagatgaagtacaatttaagtatgatagatgttgccgatctctacaagaagaagtgcaggatcttccgtcttttgggatcggtcattcactgggatctgttattcaccttctgattggatcaaggtatgctgttcagcgaaatgggaacgtatttatggcattcaacaacaaggaagcaagcttagctattcctttgttctccccagttcttgtcccgatggctcaaagccttggaccactgttgtcacaggtggcaacatccccaacaatccgccttggggcagagatgacgcgaaagcaattagaaacgcttagccctcccatcatgaagcaaattctgcctttagtggaacagctccctcccttgtacatggacttagtaaagggaagagaagattttgttccaaaaccagaagaaacaagacgccttataagatcctactatggaatctctaggaatctgttgataaaattcgaggatgattcaatagatgaaacatcaatcctagctcaggtgcttggtgtggaatcatccataagctcaaagctagacatgtctatccgtacactgcccggagatcacggtctccctctgcaacaggctcttccggatgttccaccaggaatggcagaagcggtgaatcgaggaagtgagtttttagcgaatattgctgtcgggactccgtgggaatctatggctaaagaggttggaggttcgctgggaatggactcgaagatccttcgtgctgacatgtccaaagatcttgcgcagctcgttgatgcaatcacttcttggatgatttcaaatatgggtccaaagcttctgagaccataatgttttctcatgtacacaaaacatacaaaaatctattaacacagggcgattgcatactatttaatgtaatgtaactgtatatattataacatgaagagtttggttataca

SEQ ID NO: 1537 - protein, 438 aa, Arabidopsis thaliana
  peptide (1)..(438): Ceres Seq. ID no. 12489626
  misc_feature (8)..(438): NCBI GI NO: 15238825 NR Description: putative protein; protein id: At5g47860
  misc_feature (15)..(256): NCBI GI NO: 38347589 NR Description: OSJNBa0042I15.2
  misc_feature (264)..(437): NCBI GI NO: 38347589 NR Description: OSJNBa0042I15.2
  misc_feature (177)..(425): NCBI GI NO: 38569178 NR Description: OJ000315_02.20
  misc_feature (95)..(225): NCBI GI NO: 16329812 NR Description: hypothetical protein [Synechocystis sp. PCC 6803]
  misc_feature (251)..(361): NCBI GI NO: 16329812 NR Description: hypothetical protein [Synechocystis sp. PCC 6803]
  misc_feature (95)..(230): NCBI GI NO: 23039808 NR Description: hypothetical protein
  misc_feature (271)..(363): NCBI GI NO: 23039808 NR Description: hypothetical protein
  misc_feature (95)..(288): NCBI GI NO: 17228580 NR Description: hypothetical protein [Nostoc sp. PCC 7120]
  misc_feature (95)..(288): NCBI GI NO: 23129803 NR Description: hypothetical protein [Nostoc punctiforme]
NLLQLRVMATCSLLPPPSFSPRRRFCSFSHNRRSLPSIFSFNKERVSRRVFCSSKENDINRDRNQSTGIQVYGEIERLLTETVKNSQSSSGGSSDWSEVEGAWVLKPRNSKPKMVVHFIGGIFVGAAPQLTYRLFLERLAEKDVLVIATPYASGFDHFNIADEVQFKYDRCCRSLQEEVQDLPSFGIGHSLGSVIHLLIGSRYAVQRNGNVFMAFNNKEASLAIPLFSPVLVPMAQSLGPLLSQVATSPTIRLGAEMTRKQLETLSPPIMKQILPLVEQLPPLYMDLVKGREDFVPKPEETRRLIRSYYGISRNLLIKFEDDSIDETSILAQVLGVESSISSKLDMSIRTLPGDHGLPLQQALPDVPPGMAEAVNRGSEFLANIAVGTPWESMAKEVGGSLGMDSKILRADMSKDLAQLVDAITSWMISNMGPKLLRP

SEQ ID NO: 1538 - protein, 431 aa, Arabidopsis thaliana
  peptide (1)..(431): Ceres Seq. ID no. 12489627
  misc_feature (1)..(431): NCBI GI NO: 15238825 NR Description: putative protein; protein id: At5g47860
  misc_feature (8)..(249): NCBI GI NO: 38347589 NR Description: OSJNBa0042I15.2
  misc_feature (257)..(430): NCBI GI NO: 38347589 NR Description: OSJNBa0042I15.2
  misc_feature (170)..(418): NCBI GI NO: 38569178 NR Description: OJ000315_02.20
  misc_feature (88)..(218): NCBI GI NO: 16329812 NR Description: hypothetical protein [Synechocystis sp. PCC 6803]
  misc_feature (244)..(354): NCBI GI NO: 16329812 NR Description: hypothetical protein [Synechocystis sp. PCC 6803]
  misc_feature (88)..(223): NCBI GI NO: 23039808 NR Description: hypothetical protein
  misc_feature (264)..(356): NCBI GI NO: 23039808 NR Description: hypothetical protein
  misc_feature (88)..(281): NCBI GI NO: 17228580 NR Description: hypothetical protein [Nostoc sp. PCC 7120]
  misc_feature (88)..(281): NCBI GI NO: 23129803 NR Description: hypothetical protein [Nostoc punctiforme]
MATCSLLPPPSFSPRRRFCSFSHNRRSLPSIFSFNKERVSRRVFCSSKENDINRDRNQSTGIQVYGEIERLLTETVKNSQSSSGGSSDWSEVEGAWVLKPRNSKPKMVVHFIGGIFVGAAPQLTYRLFLERLAEKDVLVIATPYASGFDHFNIADEVQFKYDRCCRSLQEEVQDLPSFGIGHSLGSVIHLLIGSRYAVQRNGNVFMAFNNKEASLAIPLFSPVLVPMAQSLGPLLSQVATSPTIRLGAEMTRKQLETLSPPIMKQILPLVEQLPPLYMDLVKGREDFVPKPEETRRLIRSYYGISRNLLIKFEDDSIDETSILAQVLGVESSISSKLDMSIRTLPGDHGLPLQQALPDVPPGMAEAVNRGSEFLANIAVGTPWESMAKEVGGSLGMDSKILRADMSKDLAQLVDAITSWMISNMGPKLLRP

SEQ ID NO: 1539 - protein, 325 aa, Arabidopsis thaliana
  peptide (1)..(325): Ceres Seq. ID no. 12489628
  misc_feature (1)..(325): NCBI GI NO: 15238825 NR Description: putative protein; protein id: At5g47860
  misc_feature (1)..(143): NCBI GI NO: 38347589 NR Description: OSJNBa0042I15.2
  misc_feature (151)..(324): NCBI GI NO: 38347589 NR Description: OSJNBa0042I15.2
  misc_feature (64)..(312): NCBI GI NO: 38569178 NR Description: OJ000315_02.20
  misc_feature (1)..(112): NCBI GI NO: 16329812 NR Description: hypothetical protein [Synechocystis sp. PCC 6803]
  misc_feature (138)..(248): NCBI GI NO: 16329812 NR Description: hypothetical protein [Synechocystis sp. PCC 6803]
  misc_feature (1)..(117): NCBI GI NO: 23039808 NR Description: hypothetical protein
  misc_feature (158)..(250): NCBI GI NO: 23039808 NR Description: hypothetical protein
  misc_feature (1)..(175): NCBI GI NO: 17228580 NR Description: hypothetical protein [Nostoc sp. PCC 7120]
  misc_feature (1)..(175): NCBI GI NO: 23129803 NR Description: hypothetical protein [Nostoc punctiforme]
MVVHFIGGIFVGAAPQLTYRLFLERLAEKDVLVIATPYASGFDHFNIADEVQFKYDRCCRSLQEEVQDLPSFGIGHSLGSVIHLLIGSRYAVQRNGNVFMAFNNKEASLAIPLFSPVLVPMAQSLGPLLSQVATSPTIRLGAEMTRKQLETLSPPIMKQILPLVEQLPPLYMDLVKGREDFVPKPEETRRLIRSYYGISRNLLIKFEDDSIDETSILAQVLGVESSISSKLDMSIRTLPGDHGLPLQQALPDVPPGMAEAVNRGSEFLANIAVGTPWESMAKEVGGSLGMDSKILRADMSKDLAQLVDAITSWMISNMGPKLLRP

SEQ ID NO: 1540 - DNA, 618 bp, Arabidopsis thaliana
  misc_feature (1)..(618): Ceres Seq. ID no. 12603263
atcctaatcgaaaaattggttggatcatacacattgtgacaagaaacagttatttggctcatgagagaagaatgttgctttttgtgctttagagtaaacatatcttgattctctataccatcagataacgattttggttatcactagcattgatattctacgattttagatagttcaagtggtcaatgactcgacatgggactctctagttcttaaagcaactgggcctgtagttgtcgacttttgggcaccatggtgtggaccttgcaagatgattgatccgcttgtaaacgatctagcacagcattacactgggaagatcaagttctacaaattaaacactgatgaatctcctaatactcccggccagtacggagttagaagcatcccaacgatcatgatctttgtcggtggcgagaagaaggatacaatcataggtgcagtgcccaaaaccacactcacatctagcctcgacaagttcttgccatgaaatatcacttgtggagtctgtaagatctcgtatctctctgtctctcgttcttgttctcattatctctgtaactcattatcactgaacatctagacctggataaataatatgatgtcatgtcttatgtc

SEQ ID NO: 1541 - protein, 72 aa, Arabidopsis thaliana
  peptide (1)..(72): Ceres Seq. ID no. 12603264
  misc_feature (1)..(72): NCBI GI NO: 15236327 NR Description: putative M-type thioredoxin; protein id: At4g03520
  misc_feature (1)..(72): NCBI GI NO: 6539610 NR Description: thioredoxin m2 [Arabidopsis thaliana]
  misc_feature (1)..(72): NCBI GI NO: 21618235 NR Description: putative M-type thioredoxin [Arabidopsis thaliana]
  misc_feature (1)..(71): NCBI GI NO: 11135407 NR Description: Thioredoxin M-type, chloroplast precursor (TRX-M)
  misc_feature (1)..(71): NCBI GI NO: 30678634 NR Description: thioredoxin M-type 1, chloroplast precursor
  misc_feature (1)..(71): NCBI GI NO: 1351239 NR Description: Thioredoxin M-type, chloroplast precursor (TRX-M)
  misc_feature (1)..(71): NCBI GI NO: 1388088 NR Description: thioredoxin m
  misc_feature (1)..(71): NCBI GI NO: 6539614 NR Description: thioredoxin m4 [Arabidopsis thaliana]
  misc_feature (1)..(71): NCBI GI NO: 15232567 NR Description: thioredoxin m4; protein id: At3g15360
  misc_feature (1)..(71): NCBI GI NO: 21354 NR Description: thioredoxin M precursor (AA -67 to 114)
MIDPLVNDLAQHYTGKIKFYKLNTDESPNTPGQYGVRSIPTIMIFVGGEKKDTIIGAVPKTTLTSSLDKFLP

SEQ ID NO: 1542 - DNA, 1226 bp, Arabidopsis thaliana
  misc_feature (1)..(1226): Ceres Seq. ID no. 12330458
aacttaatttattttaggcccatgggaagaaaagtcttctgcgttaataatttctagatctttccacaacattcatacgcaactcccttaaatcttgaaacgaccaatttcttcaaaacaatagtttgtttgcgatggcgacagaacaagaagctgaagttggaacagagacatcctctgtttccggaaggtttttgaggaacagagatttatatctcttcttgccttttctcttaggcttctctgatcaagaatcatcaaacggagatgatgatgatgttgcttcatcgcgtgagagaatcattttagtcaacccttttacacaaggaatgattgtgctcgaaggctcatcaggaatgaatcctctgcttcgtagcttactggagtcacgtgaggaaggtcgtcctcctgcgtccaaggcttccatcgatgcgatgccgatcgttgagattgatggctgtgaaggagagtgtgtgatctgtttggaggagtggaagtccgaggagacggtgaaggagatgccgtgtaagcataggtttcacggtggatgtatagagaaatggttagggtttcatgggtcgtgtcctgtttgtaggtacgagatgcctgttgatggagatgagattgggaagaaaagaaacgatgggaatgagatttgggttaggttcagtttcaacgatggtcggagaattagagatttttctgcgcaggacggtggaaacagtgatggtgttgagtccgagaattaggatttacataagaagcttttgtaaaaaaaacttgtgcctttttttgttcttgttctgggaaaaggttgatgaactttttttgtcttaagatggtacaaagtaagctcaggaatctccataatcctcatcaaaccctgaggcatcacttctgatatcacacataacaaagagaaaaaaatgaaaaaacaatcaagaaatgtgcataagaccaaaccacaaacacttcttgattccttgattaagagttttcagaaggacaaagaagatagagacgaactttctggcccaccaagttgattaacagcatcgatgaatctgttttgaagctcacaactccatttcaatctctccttagattcctttgacttatggttcttatcatttaccatgttctgtagtaacaatcaagaatgatcccaaacgcaaaaacattactctggccacaataaagattaaaaagaaggattttattttcac

SEQ ID NO: 1543 - protein, 204 aa, Arabidopsis thaliana
  peptide (1)..(204): Ceres Seq. ID no. 12330459
  misc_feature (113)..(153): Pfam Name: RING finger Pfam Description: Zinc finger, C3HC4 type
  misc_feature (1)..(204): NCBI GI NO: 18396059 NR Description: expressed protein; protein id: At1g26800
  misc_feature (1)..(204): NCBI GI NO: 21554312 NR Description: unknown [Arabidopsis thaliana]
  misc_feature (12)..(185): NCBI GI NO: 15223679 NR Description: unknown protein; protein id: At1g14200.1
  misc_feature (74)..(204): NCBI GI NO: 15241188 NR Description: putative protein; protein id: At5g56340
  misc_feature (1)..(82): NCBI GI NO: 15241188 NR Description: putative protein; protein id: At5g56340
  misc_feature (74)..(173): NCBI GI NO: 15231003 NR Description: unknown protein; protein id: At3g19950
  misc_feature (84)..(195): NCBI GI NO: 34903272 NR Description: unnamed protein product
  misc_feature (74)..(173): NCBI GI NO: 11994207 NR Description: gene_id:MPN9.20~unknown protein
  misc_feature (89)..(158): NCBI GI NO: 18921323 NR Description: putative zinc finger protein [Oryza sativa]
  misc_feature (74)..(172): NCBI GI NO: 15231238 NR Description: unknown protein; protein id: At3g13430.1
MATEQEAEVGTETSSVSGRFLRNRDLYLFLPFLLGFSDQESSNGDDDDVASSRERIILVNPFTQGMIVLEGSSGMNPLLRSLLESREEGRPPASKASIDAMPIVEIDGCEGECVICLEEWKSEETVKEMPCKHRFHGGCIEKWLGFHGSCPVCRYEMPVDGDEIGKKRNDGNEIWVRFSFNDGRRIRDFSAQDGGNSDGVESEN

SEQ ID NO: 1544 - protein, 139 aa, Arabidopsis thaliana
  peptide (1)..(139): Ceres Seq. ID no. 12330460
  misc_feature (48)..(88): Pfam Name: RING finger Pfam Description: Zinc finger, C3HC4 type
  misc_feature (1)..(139): NCBI GI NO: 18396059 NR Description: expressed protein; protein id: At1g26800
  misc_feature (1)..(139): NCBI GI NO: 21554312 NR Description: unknown [Arabidopsis thaliana]
  misc_feature (1)..(120): NCBI GI NO: 15223679 NR Description: unknown protein; protein id: At1g14200.1
  misc_feature (9)..(139): NCBI GI NO: 15241188 NR Description: putative protein; protein id: At5g56340
  misc_feature (1)..(17): NCBI GI NO: 15241188 NR Description: putative protein; protein id: At5g56340
  misc_feature (9)..(108): NCBI GI NO: 15231003 NR Description: unknown protein; protein id: At3g19950
  misc_feature (19)..(130): NCBI GI NO: 34903272 NR Description: unnamed protein product
  misc_feature (9)..(108): NCBI GI NO: 11994207 NR Description: gene_id:MPN9.20~unknown protein
  misc_feature (24)..(93): NCBI GI NO: 18921323 NR Description: putative zinc finger protein [Oryza sativa]
  misc_feature (9)..(107): NCBI GI NO: 15231238 NR Description: unknown protein; protein id: At3g13430.1
MIVLEGSSGMNPLLRSLLESREEGRPPASKASIDAMPIVEIDGCEGECVICLEEWKSEETVKEMPCKHRFHGGCIEKWLGFHGSCPVCRYEMPVDGDEIGKKRNDGNEIWVRFSFNDGRRIRDFSAQDGGNSDGVESEN

SEQ ID NO: 1545 - protein, 130 aa, Arabidopsis thaliana
  peptide (1)..(130): Ceres Seq. ID no. 12330461
  misc_feature (39)..(79): Pfam Name: RING finger Pfam Description: Zinc finger, C3HC4 type
  misc_feature (1)..(130): NCBI GI NO: 18396059 NR Description: expressed protein; protein id: At1g26800
  misc_feature (1)..(130): NCBI GI NO: 21554312 NR Description: unknown [Arabidopsis thaliana]
  misc_feature (1)..(111): NCBI GI NO: 15223679 NR Description: unknown protein; protein id: At1g14200.1
  misc_feature (1)..(130): NCBI GI NO: 15241188 NR Description: putative protein; protein id: At5g56340
  misc_feature (1)..(99): NCBI GI NO: 15231003 NR Description: unknown protein; protein id: At3g19950
  misc_feature (10)..(121): NCBI GI NO: 34903272 NR Description: unnamed protein product
  misc_feature (1)..(99): NCBI GI NO: 11994207 NR Description: gene_id:MPN9.20~unknown protein
  misc_feature (15)..(84): NCBI GI NO: 18921323 NR Description: putative zinc finger protein [Oryza sativa]
  misc_feature (1)..(98): NCBI GI NO: 15231238 NR Description: unknown protein; protein id: At3g13430.1
  misc_feature (1)..(86): NCBI GI NO: 34906008 NR Description: putative RING-H2 finger protein RHC2a
MNPLLRSLLESREEGRPPASKASIDAMPIVEIDGCEGECVICLEEWKSEETVKEMPCKHRFHGGCIEKWLGFHGSCPVCRYEMPVDGDEIGKKRNDGNEIWVRFSFNDGRRIRDFSAQDGGNSDGVESEN

SEQ ID NO: 1546 - DNA, 862 bp, Arabidopsis thaliana
  misc_feature (1)..(862): Ceres Seq. ID no. 12337124
attgtcaatttccctttattttctcgacggaatcataaataaaaaccctaaacctaaagtcacaaattcattcttcatctgttattcacgatttgtgttgtcttttcttttgcagtaagatttcgactttagaattgggagatctttccattatgggttctgagcaaaacgacagcacaagcttctctccttcagagccaaagctctgcgtcaaaggatgtggcttcttcggatctccatcgaacatgaacctctgctctaaatgctaccagagacatccgagccacggaggaacaaaccgcttccgctaaagccgccgtcgagaaatctctaaaccctaataaacccaaaactcaaccacaacagagccaagaaatcactcaaggcgtcctcggatctggatcgtcttcctcatcaacgagagggggtgattcggctgctgctccgttggatccaccgaaatcgacggctacgagatgcttgagctgtaacaagaaagttggcgtgacgggtttcaagtgtaggtgtggaagcactttctgtggaactcatagatatccagagagtcacgagtgccaattcgatttcaaaggagttgcgagagaagctattgctaaagctaatcctgtggtgaaggctgataaggttgataggatatgaattggtgaagaaactgttgtgttctcttttgtttttttattttcaagtctcgtgatgttggtggtttggctctctgttttctgctcttattatggttttatttgcttttagggtttcttaggaaaggccttagattctgctattatgtggtttcatgttttgcaacattggatttgttgttctgtaataaagtgttggttat

SEQ ID NO: 1547 - protein, 52 aa, Arabidopsis thaliana
  peptide (1)..(52): Ceres Seq. ID no. 12337125
  misc_feature (16)..(40): Pfam Name: Pfam Description:  A20-like zinc finger
  misc_feature (1)..(40): NCBI GI NO: 8778645 NR Description: F5O11.17 [Arabidopsis thaliana]
  misc_feature (1)..(40): NCBI GI NO: 15221329 NR Description: hypothetical protein; protein id: At1g12440.1
  misc_feature (1)..(40): NCBI GI NO: 15234402 NR Description: putative protein; protein id: At4g12040
  misc_feature (1)..(40): NCBI GI NO: 15235819 NR Description: similar to zinc finger - like protein
  misc_feature (4)..(40): NCBI GI NO: 28269431 NR Description: putative zinc finger protein
  misc_feature (5)..(40): NCBI GI NO: 30908921 NR Description: putative zinc finger transcription factor ZFP33
  misc_feature (6)..(40): NCBI GI NO: 18403408 NR Description: expressed protein; protein id: At1g51200
  misc_feature (1)..(42): NCBI GI NO: 34909836 NR Description: P0403C05.26
  misc_feature (12)..(39): NCBI GI NO: 18404102 NR Description: expressed protein; protein id: At2g36320
  misc_feature (12)..(39): NCBI GI NO: 15231686 NR Description: zinc finger - like protein; protein id: At3g52800
MGSEQNDSTSFSPSEPKLCVKGCGFFGSPSNMNLCSKCYQRHPSHGGTNRFR

SEQ ID NO: 1548 - protein, 38 aa, Arabidopsis thaliana
  peptide (1)..(38): Ceres Seq. ID no. 12337126
LSISLYFLDGIINKNPKPKVTNSFFICYSRFVLSFLLQ

SEQ ID NO: 1549 - DNA, 913 bp, Arabidopsis thaliana
  misc_feature (1)..(913): Ceres Seq. ID no. 12338821
gagagaatccattttcttttaatcgccatgggtttcgctttgtgcattcgtagatcagcttctactttagcttccgtgtgtggtcgtgtggctcgagctcaagccgtctccgctatcgttaatcgctcgtctcttgttcccaagccatctctgcttcggcccttcgtctctcgtggctttccttattcgacggccactgagccgttaaagtccgatcagacgcttatacaagtgattgactctgagatcaaggattctttcgaagcagatgatcacgatgcggatgaagagacgatagactctagtgactttcctttcaaaatcgaagataatcctggacacaggactgtgacattgactagagaatacaatggagagcagattaaagtagaagtaagcatgcctggtcttgccatggatgaaaatgaagatgatgtggatgacgatgaagatggtgatggtcgtcatgagaaatcgaatgaatcaagcattccacttgttgtcactgtgaccaagaagagtggacttagcctagagtttagctgcactgctttccctgatgagattgtcattgatggtttgtctgtgaaccgtccagatgattcttctgaagaacagttgacttatgatgggccagattttcaggagttggatgagaatatgcgcaagtcgttccacaagtttctagagacgagaggaatcaaagcaagcgcaacggatttcttgtatgagtacatgatgaagaaagatagcagagagtacttactatggttgaagaagctcaaaacctttgtccaagaatgaaggagacacgcttaagtagagtaagagctagattgttttatgtttgcagatttcatttgtaatgacttttgagttcacaatggggttttgaatgtgaaatgccgatttg

SEQ ID NO: 1550 - protein, 267 aa, Arabidopsis thaliana
  peptide (1)..(267): Ceres Seq. ID no. 12338822
  misc_feature (79)..(265): Pfam Name: Pfam Description:  Mitochondrial glycoprotein
  misc_feature (10)..(267): NCBI GI NO: 18410318 NR Description: Expressed protein; protein id: At3g55605
  misc_feature (15)..(267): NCBI GI NO: 11357566 NR Description: hypothetical protein F1I16
  misc_feature (10)..(267): NCBI GI NO: 18405164 NR Description: Expressed protein; protein id: At2g39795
  misc_feature (10)..(267): NCBI GI NO: 21593469 NR Description: unknown [Arabidopsis thaliana]
  misc_feature (18)..(267): NCBI GI NO: 7487698 NR Description: hypothetical protein At2g39790
  misc_feature (12)..(266): NCBI GI NO: 34895730 NR Description: P0019D06.23
  misc_feature (13)..(266): NCBI GI NO: 15239320 NR Description: putative protein; protein id: At5g05990
  misc_feature (10)..(265): NCBI GI NO: 18405162 NR Description: hypothetical protein; protein id: At2g39790.1
  misc_feature (10)..(267): NCBI GI NO: 15241669 NR Description: putative protein; protein id: At5g02050
  misc_feature (10)..(267): NCBI GI NO: 21592321 NR Description: unknown [Arabidopsis thaliana]
ERIHFLLIAMGFALCIRRSASTLASVCGRVARAQAVSAIVNRSSLVPKPSLLRPFVSRGFPYSTATEPLKSDQTLIQVIDSEIKDSFEADDHDADEETIDSSDFPFKIEDNPGHRTVTLTREYNGEQIKVEVSMPGLAMDENEDDVDDDEDGDGRHEKSNESSIPLVVTVTKKSGLSLEFSCTAFPDEIVIDGLSVNRPDDSSEEQLTYDGPDFQELDENMRKSFHKFLETRGIKASATDFLYEYMMKKDSREYLLWLKKLKTFVQE

SEQ ID NO: 1551 - protein, 258 aa, Arabidopsis thaliana
  peptide (1)..(258): Ceres Seq. ID no. 12338823
  misc_feature (70)..(256): Pfam Name: Pfam Description:  Mitochondrial glycoprotein
  misc_feature (1)..(258): NCBI GI NO: 18410318 NR Description: Expressed protein; protein id: At3g55605
  misc_feature (6)..(258): NCBI GI NO: 11357566 NR Description: hypothetical protein F1I16
  misc_feature (1)..(258): NCBI GI NO: 18405164 NR Description: Expressed protein; protein id: At2g39795
  misc_feature (1)..(258): NCBI GI NO: 21593469 NR Description: unknown [Arabidopsis thaliana]
  misc_feature (9)..(258): NCBI GI NO: 7487698 NR Description: hypothetical protein At2g39790
  misc_feature (3)..(257): NCBI GI NO: 34895730 NR Description: P0019D06.23
  misc_feature (4)..(257): NCBI GI NO: 15239320 NR Description: putative protein; protein id: At5g05990
  misc_feature (1)..(256): NCBI GI NO: 18405162 NR Description: hypothetical protein; protein id: At2g39790.1
  misc_feature (1)..(258): NCBI GI NO: 15241669 NR Description: putative protein; protein id: At5g02050
  misc_feature (1)..(258): NCBI GI NO: 21592321 NR Description: unknown [Arabidopsis thaliana]
MGFALCIRRSASTLASVCGRVARAQAVSAIVNRSSLVPKPSLLRPFVSRGFPYSTATEPLKSDQTLIQVIDSEIKDSFEADDHDADEETIDSSDFPFKIEDNPGHRTVTLTREYNGEQIKVEVSMPGLAMDENEDDVDDDEDGDGRHEKSNESSIPLVVTVTKKSGLSLEFSCTAFPDEIVIDGLSVNRPDDSSEEQLTYDGPDFQELDENMRKSFHKFLETRGIKASATDFLYEYMMKKDSREYLLWLKKLKTFVQE

SEQ ID NO: 1552 - protein, 134 aa, Arabidopsis thaliana
  peptide (1)..(134): Ceres Seq. ID no. 12338824
  misc_feature (1)..(132): Pfam Name: Pfam Description:  Mitochondrial glycoprotein
  misc_feature (1)..(134): NCBI GI NO: 18410318 NR Description: Expressed protein; protein id: At3g55605
  misc_feature (1)..(134): NCBI GI NO: 11357566 NR Description: hypothetical protein F1I16
  misc_feature (1)..(134): NCBI GI NO: 18405164 NR Description: Expressed protein; protein id: At2g39795
  misc_feature (1)..(134): NCBI GI NO: 21593469 NR Description: unknown [Arabidopsis thaliana]
  misc_feature (1)..(134): NCBI GI NO: 7487698 NR Description: hypothetical protein At2g39790
  misc_feature (1)..(133): NCBI GI NO: 34895730 NR Description: P0019D06.23
  misc_feature (1)..(133): NCBI GI NO: 15239320 NR Description: putative protein; protein id: At5g05990
  misc_feature (1)..(132): NCBI GI NO: 18405162 NR Description: hypothetical protein; protein id: At2g39790.1
  misc_feature (1)..(134): NCBI GI NO: 15241669 NR Description: putative protein; protein id: At5g02050
  misc_feature (1)..(134): NCBI GI NO: 21592321 NR Description: unknown [Arabidopsis thaliana]
MPGLAMDENEDDVDDDEDGDGRHEKSNESSIPLVVTVTKKSGLSLEFSCTAFPDEIVIDGLSVNRPDDSSEEQLTYDGPDFQELDENMRKSFHKFLETRGIKASATDFLYEYMMKKDSREYLLWLKKLKTFVQE

SEQ ID NO: 1553 - DNA, 1551 bp, Arabidopsis thaliana
  misc_feature (1)..(1551): Ceres Seq. ID no. 12367021
atttcttcattcgtaaacaaacacacacgaagcaaaaacaaaaatgaaaactactcatttctcttcctcttcttcttccgatcgcaggatcggtgctctgctccgtcatctcaattccggctcagattcggacaacctgagctctctttatgcatctccgacatcgggaggcaccggtggttctgttttctctcatcttgttcaagctccagaggatcctattcttggggtgacagttgcatacaacaaagatcctagcccagttaagctgaatttaggagttggtgcttaccgaactgaggagggaaaacctttggttcttaatgttgtgaggaaagctgagcagcagcttatcaatgacagaacaagaatcaaggagtatcttcccattgttggattggttgagttcaacaagttaagcgctaagctcatactaggcgctgacagtcctgctattcgggagaatcggattaccaccgtggagtgtttgtctggtactggttctctgagagttggaggagagtttttggctaaacattatcatcagaaaacaatttacatcactcagccaacatggggaaatcatccaaagattttcacgctcgctggtttgacagtgaaaacttaccgatactacgatccagcgacgcgtgggttgaactttcaaggtttattagaagaccttggtgctgccgcacctggttctatagtgcttctccatgcctgtgcccataaccctactggtgttgatccaaccattcaacaatgggagcaaatcaggaagttgatgcgatcaaagggattgatgcccttcttcgatagtgcttatcagggctttgcaagtggaagtcttgatacagatgcgaaacctattaggatgtttgttgctgatggcggagaatgcctcgttgctcaaagttatgcgaagaacatgggactctatggagaacgagttggagctctcagcattgtatgcaaatcagcagatgttgcggggagagttgaaagccaactgaaactagtgataaggccaatgtactcgagtcctccaatccatggtgcatcaatcgtggctgtaatcctccgtgacaagaatttgttcaacgaatggactctggaactgaaggccatggctgatcgtatcatcagcatgaggaaacagcttttcgaggcattacgtactcgaggcactcctggagactggagtcacatcataaagcagattggtatgtttaccttcacagggttaaacccagctcaagtctccttcatgactaaagagtaccacatctacatgacatctgacgggaggataagcatggctggtctgagttcgaagactgtacctcaccttgcagacgctatccatgctgttgtcaccaaagccgtctgagaaactgaacaccaccatgacaccaaagcttcataataaagattttgttcttttctttctattatagcatttccggcagtgacaagataaatgtcgttactattattattgtttcatcccagtatcaataaagtacgcaagaaagcttttgtgctccc

SEQ ID NO: 1554 - protein, 449 aa, Arabidopsis thaliana
  peptide (1)..(449): Ceres Seq. ID no. 12367022
  misc_feature (128)..(445): Pfam Name: Pfam Description:  Aminotransferase class I and II
  misc_feature (1)..(449): NCBI GI NO: 15239078 NR Description: aspartate aminotransferase
  misc_feature (1)..(449): NCBI GI NO: 7434106 NR Description: aspartate transaminase (EC 2
  misc_feature (34)..(449): NCBI GI NO: 2654095 NR Description: aspartate aminotransferase cytosolic isozyme AAT2
  misc_feature (34)..(449): NCBI GI NO: 388896 NR Description: aspartate aminotransferase P1
  misc_feature (34)..(449): NCBI GI NO: 168324 NR Description: aspartate aminotransferase P1
  misc_feature (28)..(448): NCBI GI NO: 1122288 NR Description: aspartate aminotransferase [Lotus japonicus]
  misc_feature (38)..(447): NCBI GI NO: 19571 NR Description: aspartate aminotransferase [Medicago sativa]
  misc_feature (32)..(447): NCBI GI NO: 2506178 NR Description: ASPARTATE AMINOTRANSFERASE 1 (TRANSAMINASE A)
  misc_feature (47)..(446): NCBI GI NO: 112972 NR Description: ASPARTATE AMINOTRANSFERASE, CYTOPLASMIC
  misc_feature (47)..(441): NCBI GI NO: 485495 NR Description: aspartate transaminase (EC 2
MKTTHFSSSSSSDRRIGALLRHLNSGSDSDNLSSLYASPTSGGTGGSVFSHLVQAPEDPILGVTVAYNKDPSPVKLNLGVGAYRTEEGKPLVLNVVRKAEQQLINDRTRIKEYLPIVGLVEFNKLSAKLILGADSPAIRENRITTVECLSGTGSLRVGGEFLAKHYHQKTIYITQPTWGNHPKIFTLAGLTVKTYRYYDPATRGLNFQGLLEDLGAAAPGSIVLLHACAHNPTGVDPTIQQWEQIRKLMRSKGLMPFFDSAYQGFASGSLDTDAKPIRMFVADGGECLVAQSYAKNMGLYGERVGALSIVCKSADVAGRVESQLKLVIRPMYSSPPIHGASIVAVILRDKNLFNEWTLELKAMADRIISMRKQLFEALRTRGTPGDWSHIIKQIGMFTFTGLNPAQVSFMTKEYHIYMTSDGRISMAGLSSKTVPHLADAIHAVVTKAV

SEQ ID NO: 1555 - DNA, 1041 bp, Arabidopsis thaliana
  misc_feature (1)..(1041): Ceres Seq. ID no. 12377452
atggcgctcaaatcaaaactcgtctctcttctcttcctcatagcaacactatcatccacattcgcagcttcgttttccgattcggattccgattcagatcttctcaacgaacttgtatctctcagatcaacaagcgaatcaggcgtaatccatctcgatgaccatggaatctcaaaattcctaacctccgcttccacgcctcgtccttactcgttactcgtcttcttcgacgctactcaactccacagcaaaaacgagcttcgtcttcaagagctccgtcgcgaattcggcatcgtctccgcttcattcctcgctaacaacaatggatctgaaggaactaagcttttcttctgtgagatcgagttttcgaagtctcaatcttcgttccagctctttggcgttaacgctttacctcacattcgtcttgtaagtccttcgatatcgaatctacgtgatgaatctggtcaaatggatcaatcggattactctagattagctgaatcaatggctgagtttgttgagcaacgaactaaactcaaggtcggtcctattcaacgtccaccgctactttcgaaaccacagatcggtattatcgttgcgttgatcgttatcgctactccgtttatcatcaaaagagttttgaaaggagaaactattcttcatgatactagactttggttatctggtgctatcttcatttacttctttagtgttgctggtacaatgcacaacattatcaggaaaatgccgatgtttcttcaagatcgtaacgatccgaataagcttgtgtttttctaccaaggatctggaatgcagcttggagctgaaggatttgctgttggattcttgtatactgttgttggattgcttttggcgtttgttaccaatgtgcttgttcgagtgaagaatattactgcacaaaggttgattatgcttttggctttgttcatatcgttctgggctgtgaagaaagttgtttacttggataactggaagactggatatggaattcatccgtattggccatcgagttggcgttga

SEQ ID NO: 1556 - protein, 346 aa, Arabidopsis thaliana
  peptide (1)..(346): Ceres Seq. ID no. 12377453
  misc_feature (17)..(339): Pfam Name: Pfam Description:  OST3 / OST6 family
  misc_feature (1)..(346): NCBI GI NO: 15220609 NR Description: hypothetical protein; protein id: At1g61790.1
  misc_feature (1)..(346): NCBI GI NO: 15220421 NR Description: hypothetical protein; protein id: At1g11560.1
  misc_feature (13)..(346): NCBI GI NO: 14091860 NR Description: Putative protein with similarity to putative prostatecancer tumor suppressor
  misc_feature (1)..(321): NCBI GI NO: 25402667 NR Description: protein T23J18.22
MALKSKLVSLLFLIATLSSTFAASFSDSDSDSDLLNELVSLRSTSESGVIHLDDHGISKFLTSASTPRPYSLLVFFDATQLHSKNELRLQELRREFGIVSASFLANNNGSEGTKLFFCEIEFSKSQSSFQLFGVNALPHIRLVSPSISNLRDESGQMDQSDYSRLAESMAEFVEQRTKLKVGPIQRPPLLSKPQIGIIVALIVIATPFIIKRVLKGETILHDTRLWLSGAIFIYFFSVAGTMHNIIRKMPMFLQDRNDPNKLVFFYQGSGMQLGAEGFAVGFLYTVVGLLLAFVTNVLVRVKNITAQRLIMLLALFISFWAVKKVVYLDNWKTGYGIHPYWPSSWR

SEQ ID NO: 1557 - protein, 190 aa, Arabidopsis thaliana
  peptide (1)..(190): Ceres Seq. ID no. 12377454
  misc_feature (1)..(183): Pfam Name: Pfam Description:  OST3 / OST6 family
  misc_feature (1)..(190): NCBI GI NO: 15220609 NR Description: hypothetical protein; protein id: At1g61790.1
  misc_feature (1)..(190): NCBI GI NO: 15220421 NR Description: hypothetical protein; protein id: At1g11560.1
  misc_feature (1)..(190): NCBI GI NO: 14091860 NR Description: Putative protein with similarity to putative prostatecancer tumor suppressor
  misc_feature (1)..(165): NCBI GI NO: 25402667 NR Description: protein T23J18.22
MDQSDYSRLAESMAEFVEQRTKLKVGPIQRPPLLSKPQIGIIVALIVIATPFIIKRVLKGETILHDTRLWLSGAIFIYFFSVAGTMHNIIRKMPMFLQDRNDPNKLVFFYQGSGMQLGAEGFAVGFLYTVVGLLLAFVTNVLVRVKNITAQRLIMLLALFISFWAVKKVVYLDNWKTGYGIHPYWPSSWR

SEQ ID NO: 1558 - protein, 178 aa, Arabidopsis thaliana
  peptide (1)..(178): Ceres Seq. ID no. 12377455
  misc_feature (1)..(171): Pfam Name: Pfam Description:  OST3 / OST6 family
  misc_feature (1)..(178): NCBI GI NO: 15220609 NR Description: hypothetical protein; protein id: At1g61790.1
  misc_feature (1)..(178): NCBI GI NO: 15220421 NR Description: hypothetical protein; protein id: At1g11560.1
  misc_feature (1)..(178): NCBI GI NO: 14091860 NR Description: Putative protein with similarity to putative prostatecancer tumor suppressor
  misc_feature (1)..(153): NCBI GI NO: 25402667 NR Description: protein T23J18.22
MAEFVEQRTKLKVGPIQRPPLLSKPQIGIIVALIVIATPFIIKRVLKGETILHDTRLWLSGAIFIYFFSVAGTMHNIIRKMPMFLQDRNDPNKLVFFYQGSGMQLGAEGFAVGFLYTVVGLLLAFVTNVLVRVKNITAQRLIMLLALFISFWAVKKVVYLDNWKTGYGIHPYWPSSWR

SEQ ID NO: 1559 - DNA, 676 bp, Arabidopsis thaliana
  misc_feature (1)..(676): Ceres Seq. ID no. 13496974
cctctcctcctcgtcctcaatcatcatcatctgagaattcgcagcttttgcttcttcgatagaaaatctaattatcatcaatcatgtctaagttcacgggattctcatctctcgctatctcttattttctcttggtttcaacgattgttgcagccaccgatgttcactactgcgataataacgaagagtatgaagtaaaagtacaaggagttgatataactccttatcctatagctagaggcgagccagctactttcagaatttctgctaacacagacactgagatctcgagcggcaagttggtgatcgaagtttcctactttggatggcatattcattctgagacacatgatctttgtgatgagacaagttgtcctgtggccattggagatttcttggtagcgcactcgcaagttcttcccggatatacccctcctggttcatactcactaaaaatgaagatgcttgatggacgcaagaaggagttaacttgcatcaagttctcatttgatattggatttggatcctccgtggccgacatgtagagctgatttgctcgacgggatacaccatcttgttctataccatggaaccactctcatttattttgtataaaatacactctcctgctatacataattgttgatcaaaaaccctttgaaaattctcattctgg

SEQ ID NO: 1560 - protein, 153 aa, Arabidopsis thaliana
  peptide (1)..(153): Ceres Seq. ID no. 13496975
  misc_feature (23)..(144): Pfam Name: Pfam Description:  ML domain
  misc_feature (1)..(153): NCBI GI NO: 18399355 NR Description: expressed protein [Arabidopsis thaliana]
  misc_feature (1)..(153): NCBI GI NO: 21554315 NR Description: unknown [Arabidopsis thaliana]
  misc_feature (1)..(153): NCBI GI NO: 15240063 NR Description: expressed protein [Arabidopsis thaliana]
  misc_feature (1)..(153): NCBI GI NO: 21593850 NR Description: unknown [Arabidopsis thaliana]
  misc_feature (23)..(151): NCBI GI NO: 34899866 NR Description: OJ1714_H10.15
  misc_feature (10)..(150): NCBI GI NO: 15229872 NR Description: expressed protein [Arabidopsis thaliana]
  misc_feature (10)..(140): NCBI GI NO: 21618166 NR Description: unknown [Arabidopsis thaliana]
  misc_feature (10)..(140): NCBI GI NO: 18397991 NR Description: expressed protein [Arabidopsis thaliana]
  misc_feature (27)..(146): NCBI GI NO: 4322563 NR Description: phosphatidylglycerol/ phosphatidylinositol transfer
MSKFTGFSSLAISYFLLVSTIVAATDVHYCDNNEEYEVKVQGVDITPYPIARGEPATFRISANTDTEISSGKLVIEVSYFGWHIHSETHDLCDETSCPVAIGDFLVAHSQVLPGYTPPGSYSLKMKMLDGRKKELTCIKFSFDIGFGSSVADM

SEQ ID NO: 1561 - DNA, 1135 bp, Arabidopsis thaliana
  misc_feature (1)..(1135): Ceres Seq. ID no. 13491495
agaaccaaggaaaaggaaagagtcggcgaaaaagatataaaaaagccagcgagagagacaaagggtttttgagtatctcgcgaggttttacatagatttctccattatggattcgatgatgaatcagaagactgttttggctgtgacggatgatgtggtgttacctgttagctctgttttagctataatgaaagagcttggaaaggaagtgattgagagttttgatcctctgattattactcaagcatccacaataaatcagtttcctttggatgcttcctctgtggaggcggtattagccatttccaaaacatctgatttcccaagtgataaaatatgtggtgagttctcaagaatcttgaagcctggcggcacggtttctgtgtgcaaagttttggagggtgaaacgggagaaattcaacagaccattcaaaggagagtgacattggctggttttcttgagccacagtgtcttgatttgaaatcaattaaattgtctacgttcagtttatcctttgggattaaggcaaagaaaccttcttggaagattggttcatcatttgctctcaaaaagcctgtaacaaatctctttaagattgatctagatgacgacgtggatcttattgatgaagattctcttttaacagaggaggacttgatgaagccacagcttcctgttgccagcggttgtgagaccactaaaaaagcttgcaagaactgcgtctgtggtagagctgaaattgaggagaaagctgtgaagctgggcctcacagaggatcaaatcgagaatccacaatcatcatgcggcagctgtgggctcggtgatgccttccgctgcggtacatgcccttacaagggtctgccacccttcaaattaggcgagaaggtaaccctatctcaaaacttccttgaagctgacatataagcatgtgaaaggcatcttcatacatgggtgtttctcgccgaggccaaaaccttttgctaatcgcagagtagtttcatcatttactttgtgccttttcgtataatttgtttgttggtacttcttttattttgtggctctaaaagcttgtagaatattgtttgggttgcccacaaagcacacaccttagtatcaatgaagaacggttttgcc

SEQ ID NO: 1562 - protein, 272 aa, Arabidopsis thaliana
  peptide (1)..(272): Ceres Seq. ID no. 13491496
  misc_feature (114)..(265): Pfam Name: DUF689 Pfam Description: Protein of unknown function
  misc_feature (1)..(272): NCBI GI NO: 18418605 NR Description: expressed protein [Arabidopsis thaliana]
  misc_feature (4)..(272): NCBI GI NO: 30686798 NR Description: expressed protein [Arabidopsis thaliana]
  misc_feature (4)..(272): NCBI GI NO: 19424097 NR Description: unknown protein [Arabidopsis thaliana]
  misc_feature (11)..(272): NCBI GI NO: 38344920 NR Description: OSJNBa0018M05.11
  misc_feature (5)..(272): NCBI GI NO: 2293332 NR Description: unknown [Dictyostelium discoideum]
  misc_feature (111)..(272): NCBI GI NO: 17933742 NR Description: lethal (2) 35Bg CG4180-PA
  misc_feature (13)..(272): NCBI GI NO: 29841358 NR Description: hypothetical protein in Schizosaccharomyces pombe
  misc_feature (131)..(268): NCBI GI NO: 3252825 NR Description: Unknown gene product [Homo sapiens]
  misc_feature (169)..(264): NCBI GI NO: 17555168 NR Description: Lethal 35Bg like (25.6 kD)
  misc_feature (167)..(268): NCBI GI NO: 7959722 NR Description: PRO0915 [Homo sapiens]
MDSMMNQKTVLAVTDDVVLPVSSVLAIMKELGKEVIESFDPLIITQASTINQFPLDASSVEAVLAISKTSDFPSDKICGEFSRILKPGGTVSVCKVLEGETGEIQQTIQRRVTLAGFLEPQCLDLKSIKLSTFSLSFGIKAKKPSWKIGSSFALKKPVTNLFKIDLDDDVDLIDEDSLLTEEDLMKPQLPVASGCETTKKACKNCVCGRAEIEEKAVKLGLTEDQIENPQSSCGSCGLGDAFRCGTCPYKGLPPFKLGEKVTLSQNFLEADI

SEQ ID NO: 1563 - protein, 269 aa, Arabidopsis thaliana
  peptide (1)..(269): Ceres Seq. ID no. 13491497
  misc_feature (111)..(262): Pfam Name: DUF689 Pfam Description: Protein of unknown function
  misc_feature (1)..(269): NCBI GI NO: 18418605 NR Description: expressed protein [Arabidopsis thaliana]
  misc_feature (1)..(269): NCBI GI NO: 30686798 NR Description: expressed protein [Arabidopsis thaliana]
  misc_feature (1)..(269): NCBI GI NO: 19424097 NR Description: unknown protein [Arabidopsis thaliana]
  misc_feature (8)..(269): NCBI GI NO: 38344920 NR Description: OSJNBa0018M05.11
  misc_feature (2)..(269): NCBI GI NO: 2293332 NR Description: unknown [Dictyostelium discoideum]
  misc_feature (108)..(269): NCBI GI NO: 17933742 NR Description: lethal (2) 35Bg CG4180-PA
  misc_feature (10)..(269): NCBI GI NO: 29841358 NR Description: hypothetical protein in Schizosaccharomyces pombe
  misc_feature (128)..(265): NCBI GI NO: 3252825 NR Description: Unknown gene product [Homo sapiens]
  misc_feature (166)..(261): NCBI GI NO: 17555168 NR Description: Lethal 35Bg like (25.6 kD)
  misc_feature (164)..(265): NCBI GI NO: 7959722 NR Description: PRO0915 [Homo sapiens]
MMNQKTVLAVTDDVVLPVSSVLAIMKELGKEVIESFDPLIITQASTINQFPLDASSVEAVLAISKTSDFPSDKICGEFSRILKPGGTVSVCKVLEGETGEIQQTIQRRVTLAGFLEPQCLDLKSIKLSTFSLSFGIKAKKPSWKIGSSFALKKPVTNLFKIDLDDDVDLIDEDSLLTEEDLMKPQLPVASGCETTKKACKNCVCGRAEIEEKAVKLGLTEDQIENPQSSCGSCGLGDAFRCGTCPYKGLPPFKLGEKVTLSQNFLEADI

SEQ ID NO: 1564 - protein, 268 aa, Arabidopsis thaliana
  peptide (1)..(268): Ceres Seq. ID no. 13491498
  misc_feature (110)..(261): Pfam Name: DUF689 Pfam Description: Protein of unknown function
  misc_feature (1)..(268): NCBI GI NO: 18418605 NR Description: expressed protein [Arabidopsis thaliana]
  misc_feature (1)..(268): NCBI GI NO: 30686798 NR Description: expressed protein [Arabidopsis thaliana]
  misc_feature (1)..(268): NCBI GI NO: 19424097 NR Description: unknown protein [Arabidopsis thaliana]
  misc_feature (7)..(268): NCBI GI NO: 38344920 NR Description: OSJNBa0018M05.11
  misc_feature (1)..(268): NCBI GI NO: 2293332 NR Description: unknown [Dictyostelium discoideum]
  misc_feature (107)..(268): NCBI GI NO: 17933742 NR Description: lethal (2) 35Bg CG4180-PA
  misc_feature (9)..(268): NCBI GI NO: 29841358 NR Description: hypothetical protein in Schizosaccharomyces pombe
  misc_feature (127)..(264): NCBI GI NO: 3252825 NR Description: Unknown gene product [Homo sapiens]
  misc_feature (165)..(260): NCBI GI NO: 17555168 NR Description: Lethal 35Bg like (25.6 kD)
  misc_feature (163)..(264): NCBI GI NO: 7959722 NR Description: PRO0915 [Homo sapiens]
MNQKTVLAVTDDVVLPVSSVLAIMKELGKEVIESFDPLIITQASTINQFPLDASSVEAVLAISKTSDFPSDKICGEFSRILKPGGTVSVCKVLEGETGEIQQTIQRRVTLAGFLEPQCLDLKSIKLSTFSLSFGIKAKKPSWKIGSSFALKKPVTNLFKIDLDDDVDLIDEDSLLTEEDLMKPQLPVASGCETTKKACKNCVCGRAEIEEKAVKLGLTEDQIENPQSSCGSCGLGDAFRCGTCPYKGLPPFKLGEKVTLSQNFLEADI

SEQ ID NO: 1565 - DNA, 1071 bp, Arabidopsis thaliana
  misc_feature (1)..(1071): Ceres Seq. ID no. 12337110
gttcttttccacagcattgcaacatgaagagacattcttgttgttacaaacaaaagctgagaaaaggtctttggtctcctgaagaagatgagaaacttctcaattacattaccaaacatggccatggttgctggagttctgtccctaaactcgggtctcgagagatgtggaaagagctgtagactcagatggatcaattacttaagacctgatttaaagagaggagctttctcttcagaggaacagaatctcattgtcgagcttcatgctgttcttggaaacagatggtcgcaaattgctgcgaggcttcccgggagaaccgacaacgagataaagaacttgtggaattcgtgcattaagaagaagctgatgaagaaaggcattgaccctattacacataaacccctctccgaggttggtaaagaaacaaacagaagcgacaataacaattccacaagtttttcctcagaaactaatcaagacttgtttgtcaagaaaacgtctgattttgccgagtattctgcgtttcagaaagaagaatccaactctgtttcactcagaaattcgctctcttccatgatcccaacgcaattcaacatcgacgatggttctgtctcaaatgcgggttttgatacacaagtatgcgtgaaaccctcgattattcttcttcctcctccaaacaacacttcaagcactgtctctggacaggatcatgtaaacgtgtcagagcctaattgtgaatcaaacagtggaaccacaagccacctcaacaatcccggtatggaagaaatgaaatggtccgaggagtacctaaacgaatcgttattctctacccaagtttacgtgaaatcagagacggatttcaactccaacattgcctttccttggagccaaagccaagcttgtgacgtattccccaaggatcttcagagaatggccttctcttttggtggtcagaccctttagtttctttttcttatcagatttagacatattgatacgtgtaatgaatggatcaaatgttctatttggccatacgttaaaaaaataaaaaagcacaatcctttcctg

SEQ ID NO: 1566 - protein, 292 aa, Arabidopsis thaliana
  peptide (1)..(292): Ceres Seq. ID no. 12337111
  misc_feature (1)..(292): NCBI GI NO: 15223612 NR Description: myb family transcription factor
  misc_feature (53)..(292): NCBI GI NO: 3941464 NR Description: putative transcription factor
  misc_feature (22)..(269): NCBI GI NO: 22329445 NR Description: myb family transcription factor
  misc_feature (22)..(269): NCBI GI NO: 25294104 NR Description: hypothetical protein
  misc_feature (22)..(130): NCBI GI NO: 34902542 NR Description: putative transcription factor (myb)
  misc_feature (22)..(129): NCBI GI NO: 15234262 NR Description: myb family transcription factor
  misc_feature (23)..(129): NCBI GI NO: 7438352 NR Description: transcription factor MYB4 homolog T15B16
  misc_feature (23)..(107): NCBI GI NO: 7446174 NR Description: transcription factor MYB4 - Arabidopsis thaliana
  misc_feature (22)..(109): NCBI GI NO: 28628949 NR Description: MYB2 [Dendrobium sp. XMW-2002-2]
  misc_feature (23)..(88): NCBI GI NO: 9954739 NR Description: Putative myb transcription factor - partial protein
MRNFSITLPNMAMVAGVLSLNSGLERCGKSCRLRWINYLRPDLKRGAFSSEEQNLIVELHAVLGNRWSQIAARLPGRTDNEIKNLWNSCIKKKLMKKGIDPITHKPLSEVGKETNRSDNNNSTSFSSETNQDLFVKKTSDFAEYSAFQKEESNSVSLRNSLSSMIPTQFNIDDGSVSNAGFDTQVCVKPSIILLPPPNNTSSTVSGQDHVNVSEPNCESNSGTTSHLNNPGMEEMKWSEEYLNESLFSTQVYVKSETDFNSNIAFPWSQSQACDVFPKDLQRMAFSFGGQTL

SEQ ID NO: 1567 - protein, 282 aa, Arabidopsis thaliana
  peptide (1)..(282): Ceres Seq. ID no. 12337112
  misc_feature (1)..(282): NCBI GI NO: 15223612 NR Description: myb family transcription factor
  misc_feature (43)..(282): NCBI GI NO: 3941464 NR Description: putative transcription factor
  misc_feature (12)..(259): NCBI GI NO: 22329445 NR Description: myb family transcription factor
  misc_feature (12)..(259): NCBI GI NO: 25294104 NR Description: hypothetical protein
  misc_feature (12)..(120): NCBI GI NO: 34902542 NR Description: putative transcription factor (myb)
  misc_feature (12)..(119): NCBI GI NO: 15234262 NR Description: myb family transcription factor
  misc_feature (13)..(119): NCBI GI NO: 7438352 NR Description: transcription factor MYB4 homolog T15B16
  misc_feature (13)..(97): NCBI GI NO: 7446174 NR Description: transcription factor MYB4 - Arabidopsis thaliana
  misc_feature (12)..(99): NCBI GI NO: 28628949 NR Description: MYB2 [Dendrobium sp. XMW-2002-2]
  misc_feature (13)..(78): NCBI GI NO: 9954739 NR Description: Putative myb transcription factor - partial protein
MAMVAGVLSLNSGLERCGKSCRLRWINYLRPDLKRGAFSSEEQNLIVELHAVLGNRWSQIAARLPGRTDNEIKNLWNSCIKKKLMKKGIDPITHKPLSEVGKETNRSDNNNSTSFSSETNQDLFVKKTSDFAEYSAFQKEESNSVSLRNSLSSMIPTQFNIDDGSVSNAGFDTQVCVKPSIILLPPPNNTSSTVSGQDHVNVSEPNCESNSGTTSHLNNPGMEEMKWSEEYLNESLFSTQVYVKSETDFNSNIAFPWSQSQACDVFPKDLQRMAFSFGGQTL

SEQ ID NO: 1568 - protein, 280 aa, Arabidopsis thaliana
  peptide (1)..(280): Ceres Seq. ID no. 12337113
  misc_feature (1)..(280): NCBI GI NO: 15223612 NR Description: myb family transcription factor
  misc_feature (41)..(280): NCBI GI NO: 3941464 NR Description: putative transcription factor
  misc_feature (10)..(257): NCBI GI NO: 22329445 NR Description: myb family transcription factor
  misc_feature (10)..(257): NCBI GI NO: 25294104 NR Description: hypothetical protein
  misc_feature (10)..(118): NCBI GI NO: 34902542 NR Description: putative transcription factor (myb)
  misc_feature (10)..(117): NCBI GI NO: 15234262 NR Description: myb family transcription factor
  misc_feature (11)..(117): NCBI GI NO: 7438352 NR Description: transcription factor MYB4 homolog T15B16
  misc_feature (11)..(95): NCBI GI NO: 7446174 NR Description: transcription factor MYB4 - Arabidopsis thaliana
  misc_feature (10)..(97): NCBI GI NO: 28628949 NR Description: MYB2 [Dendrobium sp. XMW-2002-2]
  misc_feature (11)..(76): NCBI GI NO: 9954739 NR Description: Putative myb transcription factor - partial protein
MVAGVLSLNSGLERCGKSCRLRWINYLRPDLKRGAFSSEEQNLIVELHAVLGNRWSQIAARLPGRTDNEIKNLWNSCIKKKLMKKGIDPITHKPLSEVGKETNRSDNNNSTSFSSETNQDLFVKKTSDFAEYSAFQKEESNSVSLRNSLSSMIPTQFNIDDGSVSNAGFDTQVCVKPSIILLPPPNNTSSTVSGQDHVNVSEPNCESNSGTTSHLNNPGMEEMKWSEEYLNESLFSTQVYVKSETDFNSNIAFPWSQSQACDVFPKDLQRMAFSFGGQTL

SEQ ID NO: 1569 - DNA, 1432 bp, Arabidopsis thaliana
  misc_feature (1)..(1432): Ceres Seq. ID no. 12560406
atatgtatgtgtgtgttatacaaaccctactctggaaaagtcctaattcctaaagctactttcaacaaagacgcctgaagcatctgcctatagtgaaagatcagaagactcttcaaccaaaatcttattctcatccaccatggaagctctcttcacttcaacacacacacccaatttacagactaagcctctcctcaaatctccgctgcccacttcttcccagtcttcgtgttggttttgtaattcgctacccaaaacgcaattcccgaagctgagactcagtaatggatcaagtcacgggcttcgtatacaagctctcttacgtaacgagacgccaagtgaaggtgaagataataatgggtttggtttttttcctggggatatcttctctttatcacaggaaaagctcgggagtaatagcaatggtgaaacttctcatagtgtaatcgatgtggaggcatctcttgcacatcctcaaggtggtggaggaaatcgagctgggctttttagaactccaatatctggtggtgttcaaaatgctacatcagctcatgctttacctcggcctgctttagctgtacggaacttgttggaacaggctaggtttgctcatctgtgcacagtgatgtccaaaatgcaccaccgcagggaagggtacccatttggctcattggtagattttgcacctgatcggatggggcatccaatatttttgttttcaccgctggccatccacacacgaaatctcttgaatgaacctagatgcagcctcgttgttcagatacccggatggagtggcttatcgaatgcaagagtgacattatttggtgatgtgtacccattgtcagaggatgaacaggagtgggcccataagcaatatattgcaaagcacccgcacgggccttcagagcaatggggaaactttcattattttagaatgcagaacataagtgatatatatttcattggaggctttggcacggtcgcttgggttgatgtcaaagagtatgaaggtttacaaccagataagatagctgttgatggtggtgagcggaacctcaaggaactaaatgccatcttctcgaaaccgctgagagagctactgtctactgaatcagaggtagacgatgctgctctcatttcaatagatagcaaaggaatagatgtacgggttcgtcaaggtgctcagtttaacatacaaaggctagcatttgaggaaggtcatggtgttgagacactagaagaagctaagtctgcattatggaaagtgttggagaaggtcaagctgaatttgcagaaatgacaagccccttttgctactttatacgggtccttttaaaatagtaggaccaataaaatgttgtttggttcctcttttcttcttcttgactagctgaaattttgtagtttctttcttttatcttttgacctc

SEQ ID NO: 1570 - protein, 387 aa, Arabidopsis thaliana
  peptide (1)..(387): Ceres Seq. ID no. 12560407
  misc_feature (1)..(387): NCBI GI NO: 15232479 NR Description: unknown protein; protein id: At3g21140
  misc_feature (3)..(387): NCBI GI NO: 15217955 NR Description: unknown protein; protein id: At1g51560
  misc_feature (3)..(387): NCBI GI NO: 18377805 NR Description: unknown protein [Arabidopsis thaliana]
  misc_feature (114)..(379): NCBI GI NO: 34905136 NR Description: P0700D12.12
  misc_feature (271)..(387): NCBI GI NO: 11994274 NR Description: gb|AAF00629
  misc_feature (3)..(153): NCBI GI NO: 12321683 NR Description: unknown protein, 3' partial [Arabidopsis thaliana]
  misc_feature (107)..(384): NCBI GI NO: 18396698 NR Description: auxin-regulated protein; protein id: At3g03890
  misc_feature (107)..(358): NCBI GI NO: 30678976 NR Description: auxin-regulated protein [Arabidopsis thaliana]
  misc_feature (107)..(299): NCBI GI NO: 6006853 NR Description: unknown protein [Arabidopsis thaliana]
  misc_feature (107)..(382): NCBI GI NO: 34393557 NR Description: putative root border cell-specific protein
MEALFTSTHTPNLQTKPLLKSPLPTSSQSSCWFCNSLPKTQFPKLRLSNGSSHGLRIQALLRNETPSEGEDNNGFGFFPGDIFSLSQEKLGSNSNGETSHSVIDVEASLAHPQGGGGNRAGLFRTPISGGVQNATSAHALPRPALAVRNLLEQARFAHLCTVMSKMHHRREGYPFGSLVDFAPDRMGHPIFLFSPLAIHTRNLLNEPRCSLVVQIPGWSGLSNARVTLFGDVYPLSEDEQEWAHKQYIAKHPHGPSEQWGNFHYFRMQNISDIYFIGGFGTVAWVDVKEYEGLQPDKIAVDGGERNLKELNAIFSKPLRELLSTESEVDDAALISIDSKGIDVRVRQGAQFNIQRLAFEEGHGVETLEEAKSALWKVLEKVKLNLQK

SEQ ID NO: 1571 - protein, 225 aa, Arabidopsis thaliana
  peptide (1)..(225): Ceres Seq. ID no. 12560408
  misc_feature (1)..(225): NCBI GI NO: 15232479 NR Description: unknown protein; protein id: At3g21140
  misc_feature (1)..(225): NCBI GI NO: 15217955 NR Description: unknown protein; protein id: At1g51560
  misc_feature (1)..(225): NCBI GI NO: 18377805 NR Description: unknown protein [Arabidopsis thaliana]
  misc_feature (1)..(217): NCBI GI NO: 34905136 NR Description: P0700D12.12
  misc_feature (109)..(225): NCBI GI NO: 11994274 NR Description: gb|AAF00629
  misc_feature (1)..(222): NCBI GI NO: 18396698 NR Description: auxin-regulated protein; protein id: At3g03890
  misc_feature (1)..(196): NCBI GI NO: 30678976 NR Description: auxin-regulated protein [Arabidopsis thaliana]
  misc_feature (1)..(137): NCBI GI NO: 6006853 NR Description: unknown protein [Arabidopsis thaliana]
  misc_feature (1)..(220): NCBI GI NO: 34393557 NR Description: putative root border cell-specific protein
  misc_feature (1)..(186): NCBI GI NO: 15599584 NR Description: hypothetical protein [Pseudomonas aeruginosa PA01]
MSKMHHRREGYPFGSLVDFAPDRMGHPIFLFSPLAIHTRNLLNEPRCSLVVQIPGWSGLSNARVTLFGDVYPLSEDEQEWAHKQYIAKHPHGPSEQWGNFHYFRMQNISDIYFIGGFGTVAWVDVKEYEGLQPDKIAVDGGERNLKELNAIFSKPLRELLSTESEVDDAALISIDSKGIDVRVRQGAQFNIQRLAFEEGHGVETLEEAKSALWKVLEKVKLNLQK

SEQ ID NO: 1572 - protein, 222 aa, Arabidopsis thaliana
  peptide (1)..(222): Ceres Seq. ID no. 12560409
  misc_feature (1)..(222): NCBI GI NO: 15232479 NR Description: unknown protein; protein id: At3g21140
  misc_feature (1)..(222): NCBI GI NO: 15217955 NR Description: unknown protein; protein id: At1g51560
  misc_feature (1)..(222): NCBI GI NO: 18377805 NR Description: unknown protein [Arabidopsis thaliana]
  misc_feature (1)..(214): NCBI GI NO: 34905136 NR Description: P0700D12.12
  misc_feature (106)..(222): NCBI GI NO: 11994274 NR Description: gb|AAF00629
  misc_feature (1)..(219): NCBI GI NO: 18396698 NR Description: auxin-regulated protein; protein id: At3g03890
  misc_feature (1)..(193): NCBI GI NO: 30678976 NR Description: auxin-regulated protein [Arabidopsis thaliana]
  misc_feature (1)..(134): NCBI GI NO: 6006853 NR Description: unknown protein [Arabidopsis thaliana]
  misc_feature (1)..(217): NCBI GI NO: 34393557 NR Description: putative root border cell-specific protein
  misc_feature (1)..(183): NCBI GI NO: 15599584 NR Description: hypothetical protein [Pseudomonas aeruginosa PA01]
MHHRREGYPFGSLVDFAPDRMGHPIFLFSPLAIHTRNLLNEPRCSLVVQIPGWSGLSNARVTLFGDVYPLSEDEQEWAHKQYIAKHPHGPSEQWGNFHYFRMQNISDIYFIGGFGTVAWVDVKEYEGLQPDKIAVDGGERNLKELNAIFSKPLRELLSTESEVDDAALISIDSKGIDVRVRQGAQFNIQRLAFEEGHGVETLEEAKSALWKVLEKVKLNLQK

SEQ ID NO: 1573 - DNA, 1063 bp, Arabidopsis thaliana
  misc_feature (1)..(1063): Ceres Seq. ID no. 13592884
cctaatcgaaaagttttgttctttcatagtcttctagatctgtagtttttttccgcgaccgcccaaaaaattctctgatcagacggtcgattggatcggagatttaaggtaaagaaaaaatggcgcaacaatcgttgatctacagtttcgtagctcgccacggtgatcctcgttgagttcactgatttcaaaggtaatttcacctcaatcgctgctcagtgcctccagaagcttccgtcttcgaacaacaagttcacctacaactgcgacggtcataccttcaattaccttgtcgaagatggattcacctattgtgttgttgcggttgattctgctgggaggcaaattcccatgtcctttttggaaagagtaaaagaagattttaacaagcgatatggtggtggaaaagctgcaactgctcaagcaaacagcttgaataaggagtttggctctaaactgaaagagcatatgcagtattgcatggatcatcctgatgagattagcaagcttgctaaggtgaaggcgcaagtgtcagaagttaagggtgtaatgatgaaaacattgagaaggttcttgaccgtggtgagaaaattgagcttttggtggacaaaaccgaaaatcttcgctcacaggcacaagatttcagaacaacaggaacgcagatgagaagaaagatgtggcttcagaacatgaagataaaactcatagtgctcgccatcattatcgcactgattctcatcatcgtgctctcagtttgccatgggtttaagtgttaagcccagaaaattcaaaacttctgagatctttctcactcggtacatcgtagtgccttctcttttattgttcgatcttcaatctaatgtttctgcttgaattggttttgtatagatagacatatatgtatgctactcatttgctatattgcttgcatctgatgacattgatcccttgcgaaccagtcagtacttgacaagagatccgaaactattaaatgattttgttgactgaagattgcattgtggtggtgatgataaaaatttgagattgtattgacgattaaaat

SEQ ID NO: 1574 - protein, 104 aa, Arabidopsis thaliana
  peptide (1)..(104): Ceres Seq. ID no. 13592885
  misc_feature (1)..(75): NCBI GI NO: 15220943 NR Description: synaptobrevin 7B -related, 3' partial
  misc_feature (1)..(75): NCBI GI NO: 15225796 NR Description: synaptobrevin -related [Arabidopsis thaliana]
  misc_feature (1)..(75): NCBI GI NO: 600710 NR Description: formerly called HAT24
  misc_feature (1)..(75): NCBI GI NO: 27805753 NR Description: Vesicle-associated membrane protein 725
  misc_feature (1)..(75): NCBI GI NO: 30685375 NR Description: synaptobrevin -related [Arabidopsis thaliana]
  misc_feature (1)..(75): NCBI GI NO: 15220315 NR Description: synaptobrevin 7B -related [Arabidopsis thaliana]
  misc_feature (1)..(75): NCBI GI NO: 29150380 NR Description: synaptobrevin-like protein
  misc_feature (1)..(75): NCBI GI NO: 27805765 NR Description: Putative vesicle-associated membrane protein 726
  misc_feature (1)..(75): NCBI GI NO: 33347409 NR Description: synptobrevin-related protein [Pyrus pyrifolia]
  misc_feature (1)..(75): NCBI GI NO: 30685571 NR Description: synaptobrevin -related [Arabidopsis thaliana]
MSFLERVKEDFNKRYGGGKAATAQANSLNKEFGSKLKEHMQYCMDHPDEISKLAKVKAQVSEVKGVMMKTLRRFLTVVRKLSFWWTKPKIFAHRHKISEQQERR

SEQ ID NO: 1575 - protein, 65 aa, Arabidopsis thaliana
  peptide (1)..(65): Ceres Seq. ID no. 13592886
  misc_feature (1)..(36): NCBI GI NO: 15220943 NR Description: synaptobrevin 7B -related, 3' partial
  misc_feature (1)..(36): NCBI GI NO: 15225796 NR Description: synaptobrevin -related [Arabidopsis thaliana]
  misc_feature (1)..(36): NCBI GI NO: 600710 NR Description: formerly called HAT24
  misc_feature (1)..(36): NCBI GI NO: 27805753 NR Description: Vesicle-associated membrane protein 725
  misc_feature (1)..(36): NCBI GI NO: 30685375 NR Description: synaptobrevin -related [Arabidopsis thaliana]
  misc_feature (1)..(36): NCBI GI NO: 15220315 NR Description: synaptobrevin 7B -related [Arabidopsis thaliana]
  misc_feature (1)..(36): NCBI GI NO: 29150380 NR Description: synaptobrevin-like protein
  misc_feature (1)..(36): NCBI GI NO: 27805765 NR Description: Putative vesicle-associated membrane protein 726
  misc_feature (1)..(36): NCBI GI NO: 33347409 NR Description: synptobrevin-related protein [Pyrus pyrifolia]
  misc_feature (1)..(36): NCBI GI NO: 30685571 NR Description: synaptobrevin -related [Arabidopsis thaliana]
MQYCMDHPDEISKLAKVKAQVSEVKGVMMKTLRRFLTVVRKLSFWWTKPKIFAHRHKISEQQERR

SEQ ID NO: 1576 - protein, 61 aa, Arabidopsis thaliana
  peptide (1)..(61): Ceres Seq. ID no. 13592887
  misc_feature (1)..(32): NCBI GI NO: 15220943 NR Description: synaptobrevin 7B -related, 3' partial
  misc_feature (1)..(32): NCBI GI NO: 15225796 NR Description: synaptobrevin -related [Arabidopsis thaliana]
  misc_feature (1)..(32): NCBI GI NO: 600710 NR Description: formerly called HAT24
  misc_feature (1)..(32): NCBI GI NO: 27805753 NR Description: Vesicle-associated membrane protein 725
  misc_feature (1)..(32): NCBI GI NO: 30685375 NR Description: synaptobrevin -related [Arabidopsis thaliana]
  misc_feature (1)..(32): NCBI GI NO: 15220315 NR Description: synaptobrevin 7B -related [Arabidopsis thaliana]
  misc_feature (1)..(32): NCBI GI NO: 29150380 NR Description: synaptobrevin-like protein
  misc_feature (1)..(32): NCBI GI NO: 27805765 NR Description: Putative vesicle-associated membrane protein 726
  misc_feature (1)..(32): NCBI GI NO: 33347409 NR Description: synptobrevin-related protein [Pyrus pyrifolia]
  misc_feature (1)..(32): NCBI GI NO: 30685571 NR Description: synaptobrevin -related [Arabidopsis thaliana]
MDHPDEISKLAKVKAQVSEVKGVMMKTLRRFLTVVRKLSFWWTKPKIFAHRHKISEQQERR

SEQ ID NO: 1577 - DNA, 783 bp, Arabidopsis thaliana
  misc_feature (1)..(783): Ceres Seq. ID no. 12330563
aaaagacaaaagcagaggaaccgaagtttaagctaacaccgagaaaggatccgtctctccgacgacaaatcagaccacctgcgacctagaacgacacaaggagacatagagaaaatgggtttcttctcttttcttggaagagttctcttcgcttctttattcatcctctccgcttggcaaatgttcaatgactttggaactgacggtggtccagcagctaaagagttagctccaaagcttgatctgaccaaagcacatctctcttccatattgggagtatcattgcccaacttagaggtgaaacaagtcgtgtgggctattgttgctctgaaaggcctaggaggcttactctttgttatcggcaacatctttggtgcctatcttctggctgtctacttggtggttgtcagtcccattttatatgatttctacaactatggacccgaggaccgccaattctctcttctattgactgaattcttgcagagtgttgcgcttctcggggcattgctatttttcatcggaatgaagaattcaacaacgagctccaagaggattctgaagaagaggactcccaagcctaaagctgcttagagttcttctcttctcctccacacacaaaggcaggtaggcttcagaagagcttctgatgtctccaagcattacctttgtcattcttccttacaacttttggttccttatctattgtaggattctagaattagccacattttgtattttatcaattagtttttatatgattttgggatttaagccgttttc

SEQ ID NO: 1578 - protein, 159 aa, Arabidopsis thaliana
  peptide (1)..(159): Ceres Seq. ID no. 12330564
  misc_feature (1)..(138): Pfam Name: Pfam Description:  HR-like lesion-inducing
  misc_feature (1)..(159): NCBI GI NO: 15219714 NR Description: unknown protein; protein id: At1g04340
  misc_feature (1)..(159): NCBI GI NO: 21592798 NR Description: Nicotiana lesion-inducing like
  misc_feature (1)..(159): NCBI GI NO: 15239873 NR Description: Nicotiana lesion-inducing like
  misc_feature (1)..(159): NCBI GI NO: 40287494 NR Description: putative lesion-inducing protein [Capsicum annuum]
  misc_feature (1)..(157): NCBI GI NO: 27261473 NR Description: Unknown protein
  misc_feature (1)..(157): NCBI GI NO: 38346190 NR Description: OSJNBa0027O01.6
  misc_feature (1)..(158): NCBI GI NO: 15236497 NR Description: elicitor like protein; protein id: At4g14420
  misc_feature (1)..(157): NCBI GI NO: 7489144 NR Description: hypothetical protein (clone NF22) - common tobacco
  misc_feature (24)..(158): NCBI GI NO: 37534824 NR Description: putative RNA-binding protein
  misc_feature (1)..(24): NCBI GI NO: 37534824 NR Description: putative RNA-binding protein
MGFFSFLGRVLFASLFILSAWQMFNDFGTDGGPAAKELAPKLDLTKAHLSSILGVSLPNLEVKQVVWAIVALKGLGGLLFVIGNIFGAYLLAVYLVVVSPILYDFYNYGPEDRQFSLLLTEFLQSVALLGALLFFIGMKNSTTSSKRILKKRTPKPKAA

SEQ ID NO: 1579 - protein, 137 aa, Arabidopsis thaliana
  peptide (1)..(137): Ceres Seq. ID no. 12330565
  misc_feature (1)..(116): Pfam Name: Pfam Description:  HR-like lesion-inducing
  misc_feature (1)..(137): NCBI GI NO: 15219714 NR Description: unknown protein; protein id: At1g04340
  misc_feature (1)..(137): NCBI GI NO: 21592798 NR Description: Nicotiana lesion-inducing like
  misc_feature (1)..(137): NCBI GI NO: 15239873 NR Description: Nicotiana lesion-inducing like
  misc_feature (1)..(137): NCBI GI NO: 40287494 NR Description: putative lesion-inducing protein [Capsicum annuum]
  misc_feature (1)..(135): NCBI GI NO: 27261473 NR Description: Unknown protein
  misc_feature (1)..(135): NCBI GI NO: 38346190 NR Description: OSJNBa0027O01.6
  misc_feature (1)..(136): NCBI GI NO: 15236497 NR Description: elicitor like protein; protein id: At4g14420
  misc_feature (1)..(135): NCBI GI NO: 7489144 NR Description: hypothetical protein (clone NF22) - common tobacco
  misc_feature (2)..(136): NCBI GI NO: 37534824 NR Description: putative RNA-binding protein
  misc_feature (9)..(136): NCBI GI NO: 3885517 NR Description: similar to Nicotiana HR lesion-inducing ORF
MFNDFGTDGGPAAKELAPKLDLTKAHLSSILGVSLPNLEVKQVVWAIVALKGLGGLLFVIGNIFGAYLLAVYLVVVSPILYDFYNYGPEDRQFSLLLTEFLQSVALLGALLFFIGMKNSTTSSKRILKKRTPKPKAA

SEQ ID NO: 1580 - DNA, 728 bp, Arabidopsis thaliana
  misc_feature (1)..(728): Ceres Seq. ID no. 13504775
ggctgcaatttattctcaaaccttatgagtgagatctctcttaatcattctctctttcttctctcctctgtgatgtgaggtttcgaagatccttctctgattcctcatcaaactcagatcagtagcggacccaagtcattcctttagagagatatatggcagaggtgaaggatcaattagagattaagttccggcttaacgatggttctgatatcggtcctaaattgtttcctgatgctactaccgttgctacattgaaagaaaccgttgttgctcagtggccaagagataaggagaacgggccaaagacagtgaaagatgttaaactgataagcgcgggtagaatattggagaacaacaaaacggttggagattgcaggagtcccgtcggcaatttctcaggtgctgtcaccacaatgcatgttataattcaacatcaagttactgaaaaagaaaagaagaagaagaagcctaaaggtgatctgaaacagaacaaatgtgtctgtttatgttttggagctcgttgttaacaattgtgcaagacaagtagagagagttaaaaaagcttgggagattcacattctgttcttgagccttcttcaataccttttgctcttgttccttgtaattcttttttctgacatgacatgacatgattggctttttgatcgcttgaggtttggtttctattgtatttcggattcgcaacaccgtggaaattattaggt

SEQ ID NO: 1581 - protein, 124 aa, Arabidopsis thaliana; identical to SEQ ID NO: 1351
  peptide (1)..(124): Ceres Seq. ID no. 13504776
  misc_feature (8)..(93): Pfam Name: Pfam Description:  Ubiquitin family
  misc_feature (1)..(124): NCBI GI NO: 18417680 NR Description: expressed protein [Arabidopsis thaliana]
  misc_feature (1)..(99): NCBI GI NO: 11358132 NR Description: hypothetical protein T20K14_70 - Arabidopsis thaliana
  misc_feature (1)..(117): NCBI GI NO: 15232032 NR Description: ubiquitin family [Arabidopsis thaliana]
  misc_feature (5)..(117): NCBI GI NO: 21592966 NR Description: ubiquitin-fusion protein, putative
  misc_feature (4)..(117): NCBI GI NO: 4097587 NR Description: NTGP5 [Nicotiana tabacum]
  misc_feature (1)..(117): NCBI GI NO: 15219188 NR Description: ubiquitin family [Arabidopsis thaliana]
  misc_feature (5)..(117): NCBI GI NO: 15218145 NR Description: expressed protein [Arabidopsis thaliana]
  misc_feature (2)..(117): NCBI GI NO: 38347220 NR Description: OSJNBa0055C08.14
  misc_feature (5)..(117): NCBI GI NO: 15234839 NR Description: ubiquitin family [Arabidopsis thaliana]
  misc_feature (1)..(100): NCBI GI NO: 25402954 NR Description: protein F2E2.12 [imported] - Arabidopsis thaliana

SEQ ID NO: 1582 - DNA, 799 bp, Arabidopsis thaliana
  misc_feature (1)..(799): Ceres Seq. ID no. 12462083
aggtcggcggttccatcaccacaacgccggacgacaatgggtattgatctgatcgccggaggtaagagtaagaagaccaaaaggacagctccaaagtctgatgatgtctacctcaagcttactgtcaagctttaccggtttctggtaaggagaactaatagcaagttcaatggtgtgatattgaagaggcttttcatgagcaaagtcaacaaagctcctctttctctatctaggcttgtggagttcatgactggcaaggaagataagattgccgtcttggttggaactataactgatgatttgagggtacacgagattccagccatgaaagtgactgccttgaggttcacagagagagcaagggctcgcattgagaaagctggaggtgaatgcttaacctttgaccagctcgctctcagagctccattgggccagaacacggttcttcttagaggacctaagaattcacgtgaagcagtgaagcatttcggacctgctcctggtgtgccacacagtcactccaagccatatgttcgggccaagggaaggaagttcgagaaggccagaggaaagaggaagagtcgtggattcaaggtttaagaaagttgttgccgccattggacttgattctggagtactgttgcttcttggttgcttttgtaatcggatttttgttagggaactctgttttttctttcctctttcagacatgctactaagtttgcttctactggattcatcgtgtggttattacacttgcagctttactatgttaaacttaattcattatctttctacc

SEQ ID NO: 1583 - protein, 199 aa, Arabidopsis thaliana
  peptide (1)..(199): Ceres Seq. ID no. 12462084
  misc_feature (13)..(199): NCBI GI NO: 15230011 NR Description: putative 60S ribosomal protein L18
  misc_feature (13)..(199): NCBI GI NO: 606970 NR Description: cytoplasmic ribosomal protein L18
  misc_feature (13)..(199): NCBI GI NO: 15241061 NR Description: 60S ribosomal protein - like
  misc_feature (13)..(199): NCBI GI NO: 34897628 NR Description: cytoplasmic ribosomal protein L18 [Oryza sativa]
  misc_feature (13)..(199): NCBI GI NO: 34393858 NR Description: putative cytoplasmic ribosomal protein L18
  misc_feature (16)..(199): NCBI GI NO: 6094021 NR Description: 60S RIBOSOMAL PROTEIN L18
  misc_feature (14)..(199): NCBI GI NO: 7440855 NR Description: ribosomal protein L18
  misc_feature (13)..(175): NCBI GI NO: 28798549 NR Description: 60S ribosomal protein [Medicago sativa]
  misc_feature (13)..(198): NCBI GI NO: 28630356 NR Description: ribosomal protein L18 [Petromyzon marinus]
  misc_feature (13)..(198): NCBI GI NO: 13592057 NR Description: ribosomal protein L18 [Rattus norvegicus]
RSAVPSPQRRTTMGIDLIAGGKSKKTKRTAPKSDDVYLKLTVKLYRFLVRRTNSKFNGVILKRLFMSKVNKAPLSLSRLVEFMTGKEDKIAVLVGTITDDLRVHEIPAMKVTALRFTERARARIEKAGGECLTFDQLALRAPLGQNTVLLRGPKNSREAVKHFGPAPGVPHSHSKPYVRAKGRKFEKARGKRKSRGFKV

SEQ ID NO: 1584 - protein, 187 aa, Arabidopsis thaliana
  peptide (1)..(187): Ceres Seq. ID no. 12462085
  misc_feature (1)..(187): NCBI GI NO: 15230011 NR Description: putative 60S ribosomal protein L18
  misc_feature (1)..(187): NCBI GI NO: 606970 NR Description: cytoplasmic ribosomal protein L18
  misc_feature (1)..(187): NCBI GI NO: 15241061 NR Description: 60S ribosomal protein - like
  misc_feature (1)..(187): NCBI GI NO: 34897628 NR Description: cytoplasmic ribosomal protein L18 [Oryza sativa]
  misc_feature (1)..(187): NCBI GI NO: 34393858 NR Description: putative cytoplasmic ribosomal protein L18
  misc_feature (4)..(187): NCBI GI NO: 6094021 NR Description: 60S RIBOSOMAL PROTEIN L18
  misc_feature (2)..(187): NCBI GI NO: 7440855 NR Description: ribosomal protein L18
  misc_feature (1)..(163): NCBI GI NO: 28798549 NR Description: 60S ribosomal protein [Medicago sativa]
  misc_feature (1)..(186): NCBI GI NO: 28630356 NR Description: ribosomal protein L18 [Petromyzon marinus]
  misc_feature (1)..(186): NCBI GI NO: 13592057 NR Description: ribosomal protein L18 [Rattus norvegicus]
MGIDLIAGGKSKKTKRTAPKSDDVYLKLTVKLYRFLVRRTNSKFNGVILKRLFMSKVNKAPLSLSRLVEFMTGKEDKIAVLVGTITDDLRVHEIPAMKVTALRFTERARARIEKAGGECLTFDQLALRAPLGQNTVLLRGPKNSREAVKHFGPAPGVPHSHSKPYVRAKGRKFEKARGKRKSRGFKV

SEQ ID NO: 1585 - protein, 134 aa, Arabidopsis thaliana
  peptide (1)..(134): Ceres Seq. ID no. 12462086
  misc_feature (1)..(134): NCBI GI NO: 15230011 NR Description: putative 60S ribosomal protein L18
  misc_feature (1)..(134): NCBI GI NO: 606970 NR Description: cytoplasmic ribosomal protein L18
  misc_feature (1)..(134): NCBI GI NO: 15241061 NR Description: 60S ribosomal protein - like
  misc_feature (1)..(134): NCBI GI NO: 34897628 NR Description: cytoplasmic ribosomal protein L18 [Oryza sativa]
  misc_feature (1)..(134): NCBI GI NO: 34393858 NR Description: putative cytoplasmic ribosomal protein L18
  misc_feature (1)..(134): NCBI GI NO: 6094021 NR Description: 60S RIBOSOMAL PROTEIN L18
  misc_feature (1)..(134): NCBI GI NO: 7440855 NR Description: ribosomal protein L18
  misc_feature (1)..(110): NCBI GI NO: 28798549 NR Description: 60S ribosomal protein [Medicago sativa]
  misc_feature (1)..(133): NCBI GI NO: 28630356 NR Description: ribosomal protein L18 [Petromyzon marinus]
  misc_feature (1)..(133): NCBI GI NO: 13592057 NR Description: ribosomal protein L18 [Rattus norvegicus]
MSKVNKAPLSLSRLVEFMTGKEDKIAVLVGTITDDLRVHEIPAMKVTALRFTERARARIEKAGGECLTFDQLALRAPLGQNTVLLRGPKNSREAVKHFGPAPGVPHSHSKPYVRAKGRKFEKARGKRKSRGFKV

SEQ ID NO: 1586 - DNA, 2010 bp, Arabidopsis thaliana
  misc_feature (1)..(2010): Ceres Seq. ID no. 12600087
gagacggagaacaagagcaatcaaatcacacaaatcctcgaaaaagtaaaattcttgattaaaaaaaaacggacattttgtgctcagacactcagctttccttattagtcttttgccacctctctgcaaagttctcgaacccactctgtaaccaaaatcaatcataaagatttgatctttttttttcctttttcggtgagatttaatcctctaaggttcttgatactctctagatctattcttacttgggtttgttcgaaatatggaggacaagaacaatgataaggagaaaaaaaccgacgttacgttcgaagatgacgaagataacgaagatctagaagacaacagcagtaagtacgagaacgacagtgaaactgatcaaagcgatctcggagatcttcctggtgatgctgttgatcgtgacgacgacatcgatgaacctttcatttcccaggttcaatggcctcaaagcttcagggaaacgactgattcttatacgattgcggcatcaccaatcttcgggtcgctcaggagtaatcctccgagtttctatagagccagcagaagtaatttagatgttgagtcaaaagcacctttgcttcctgagaggcatgatgattcagacaaagcctcagctacacaatctgcttggtctcataaaggctcatttgctgaggaattgcccattggtggctatggatgcagcgtcattcaaaccattttcaatgctattaatgtaatggctggagttggacttctctcaacaccttatacagtgaaagaagctggttgggcaagtatggtaattcttctcttatttgctgttatttgttgttacactgctactttaatgaaagactgtttcgagaacaagaccggcattatcacttatcctgatattggagaagcagcttttggcaaatatggtcgtattcttatctgtatgctattgtacacagaactatattcatattgtgttgaattcatcattttggaaggagataaccttaccgggcttttccctggtacatccttggatttgctcgggttccgacttgactctaagcatttatttggaatcttaactgctctcattgttcttccaactgtttggttgaaagatctacgcatcatttcctacctctcagccggtggagttatcgcaaccgctttgatagcagtaagcgtgtttttcctcggtacaacgggcgggattgggtttcatcacaccgggcaggctgtgaaatggaacgggataccgtttgcaattggtatatacgggttttgctattcaggacattcagtgttcccaaatatataccaatccatggctgataaaaccaaattcaacaaagcagtgatcacttgtttcattatatgtgttttgttatacggaggagttgcaatcatgggttatctcatgtttggagaagctaccttgtctcagattacactaaacatgccacaggaccaatttttctcaaaagtggcacagtggacaacggttgtgagtccgtttacaaaatacgctctcctgatgaatccacttgcaaggagtatagaagaactattaccggaaagaatgtcagagaacatatggtgctttcttcttctaagaacagcactcgtcgcttcttctgtttgttctgctttccttattccattttttggtcttatgatggctcttataggatctcttctcagtatactagtggcaataataatgccagctttatgcttcataaagataatggggaacaaagcaacaagaacacagatgattctgagttcgatcattgtggccatcggggtggtaagcgggaccttggggacatattcttcggtggcaaagatcattaggaactatcagtgaaggaactccatgacaaagagacccatagtttatcccctgtactttgagttgaatgtttttgttgaagctaataaactcttgattatgaaagattattttggacttgaaagttaataaaactagtgaaaggtttactt

SEQ ID NO: 1587 - protein, 536 aa, Arabidopsis thaliana
  peptide (1)..(536): Ceres Seq. ID no. 12600088
  misc_feature (1)..(536): NCBI GI NO: 18405629 NR Description: expressed protein; protein id: At2g41190
  misc_feature (1)..(337): NCBI GI NO: 7487631 NR Description: hypothetical protein At2g41190
  misc_feature (130)..(536): NCBI GI NO: 23397299 NR Description: unknown protein [Arabidopsis thaliana]
  misc_feature (137)..(532): NCBI GI NO: 30687791 NR Description: amino acid transporter family
  misc_feature (21)..(100): NCBI GI NO: 30687791 NR Description: amino acid transporter family
  misc_feature (137)..(532): NCBI GI NO: 15292735 NR Description: unknown protein [Arabidopsis thaliana]
  misc_feature (21)..(100): NCBI GI NO: 15292735 NR Description: unknown protein [Arabidopsis thaliana]
  misc_feature (18)..(531): NCBI GI NO: 30679549 NR Description: amino acid transporter family
  misc_feature (11)..(532): NCBI GI NO: 22326569 NR Description: putative protein; protein id: At5g02170
  misc_feature (137)..(416): NCBI GI NO: 25408639 NR Description: hypothetical protein At2g39130
MEDKNNDKEKKTDVTFEDDEDNEDLEDNSSKYENDSETDQSDLGDLPGDAVDRDDDIDEPFISQVQWPQSFRETTDSYTIAASPIFGSLRSNPPSFYRASRSNLDVESKAPLLPERHDDSDKASATQSAWSHKGSFAEELPIGGYGCSVIQTIFNAINVMAGVGLLSTPYTVKEAGWASMVILLLFAVICCYTATLMKDCFENKTGIITYPDIGEAAFGKYGRILICMLLYTELYSYCVEFIILEGDNLTGLFPGTSLDLLGFRLDSKHLFGILTALIVLPTVWLKDLRIISYLSAGGVIATALIAVSVFFLGTTGGIGFHHTGQAVKWNGIPFAIGIYGFCYSGHSVFPNIYQSMADKTKFNKAVITCFIICVLLYGGVAIMGYLMFGEATLSQITLNMPQDQFFSKVAQWTTVVSPFTKYALLMNPLARSIEELLPERMSENIWCFLLLRTALVASSVCSAFLIPFFGLMMALIGSLLSILVAIIMPALCFIKIMGNKATRTQMILSSIIVAIGVVSGTLGTYSSVAKIIRNYQ

SEQ ID NO: 1588 - protein, 377 aa, Arabidopsis thaliana
  peptide (1)..(377): Ceres Seq. ID no. 12600089
  misc_feature (1)..(377): NCBI GI NO: 18405629 NR Description: expressed protein; protein id: At2g41190
  misc_feature (1)..(178): NCBI GI NO: 7487631 NR Description: hypothetical protein At2g41190
  misc_feature (1)..(377): NCBI GI NO: 23397299 NR Description: unknown protein [Arabidopsis thaliana]
  misc_feature (1)..(373): NCBI GI NO: 30687791 NR Description: amino acid transporter family
  misc_feature (1)..(373): NCBI GI NO: 15292735 NR Description: unknown protein [Arabidopsis thaliana]
  misc_feature (1)..(372): NCBI GI NO: 30679549 NR Description: amino acid transporter family
  misc_feature (1)..(373): NCBI GI NO: 22326569 NR Description: putative protein; protein id: At5g02170
  misc_feature (1)..(257): NCBI GI NO: 25408639 NR Description: hypothetical protein At2g39130
  misc_feature (277)..(373): NCBI GI NO: 25408639 NR Description: hypothetical protein At2g39130
  misc_feature (1)..(372): NCBI GI NO: 11358406 NR Description: hypothetical protein T7H20
MAGVGLLSTPYTVKEAGWASMVILLLFAVICCYTATLMKDCFENKTGIITYPDIGEAAFGKYGRILICMLLYTELYSYCVEFIILEGDNLTGLFPGTSLDLLGFRLDSKHLFGILTALIVLPTVWLKDLRIISYLSAGGVIATALIAVSVFFLGTTGGIGFHHTGQAVKWNGIPFAIGIYGFCYSGHSVFPNIYQSMADKTKFNKAVITCFIICVLLYGGVAIMGYLMFGEATLSQITLNMPQDQFFSKVAQWTTVVSPFTKYALLMNPLARSIEELLPERMSENIWCFLLLRTALVASSVCSAFLIPFFGLMMALIGSLLSILVAIIMPALCFIKIMGNKATRTQMILSSIIVAIGVVSGTLGTYSSVAKIIRNYQ

SEQ ID NO: 1589 - protein, 357 aa, Arabidopsis thaliana
  peptide (1)..(357): Ceres Seq. ID no. 12600090
  misc_feature (1)..(357): NCBI GI NO: 18405629 NR Description: expressed protein; protein id: At2g41190
  misc_feature (1)..(158): NCBI GI NO: 7487631 NR Description: hypothetical protein At2g41190
  misc_feature (1)..(357): NCBI GI NO: 23397299 NR Description: unknown protein [Arabidopsis thaliana]
  misc_feature (1)..(353): NCBI GI NO: 30687791 NR Description: amino acid transporter family
  misc_feature (1)..(353): NCBI GI NO: 15292735 NR Description: unknown protein [Arabidopsis thaliana]
  misc_feature (1)..(352): NCBI GI NO: 30679549 NR Description: amino acid transporter family
  misc_feature (1)..(353): NCBI GI NO: 22326569 NR Description: putative protein; protein id: At5g02170
  misc_feature (1)..(237): NCBI GI NO: 25408639 NR Description: hypothetical protein At2g39130
  misc_feature (257)..(353): NCBI GI NO: 25408639 NR Description: hypothetical protein At2g39130
  misc_feature (1)..(352): NCBI GI NO: 11358406 NR Description: hypothetical protein T7H20
MVILLLFAVICCYTATLMKDCFENKTGIITYPDIGEAAFGKYGRILICMLLYTELYSYCVEFIILEGDNLTGLFPGTSLDLLGFRLDSKHLFGILTALIVLPTVWLKDLRIISYLSAGGVIATALIAVSVFFLGTTGGIGFHHTGQAVKWNGIPFAIGIYGFCYSGHSVFPNIYQSMADKTKFNKAVITCFIICVLLYGGVAIMGYLMFGEATLSQITLNMPQDQFFSKVAQWTTVVSPFTKYALLMNPLARSIEELLPERMSENIWCFLLLRTALVASSVCSAFLIPFFGLMMALIGSLLSILVAIIMPALCFIKIMGNKATRTQMILSSIIVAIGVVSGTLGTYSSVAKIIRNYQ

SEQ ID NO: 1590 - DNA, 1114 bp, Arabidopsis thaliana
  misc_feature (1)..(1114): Ceres Seq. ID no. 12395025
atactccatggagtagaaaaaggaaaaattcaaggctctttggcttcttctttcttctctgcacttgaatcagaagcttttctcagaatgggttggtcgttgagaatgtggattgtgagtatactcgtgcttacacagctcgttaatggagctctctgttggggagacgctggtcattacgctgtctgcaaaatagctcagagttattttgaggaagatactgtagttgctgtgaagaaacttctgcctgaatctgcaaatggtgagctagcagctgtttgctcatggcctgatgaaatcaaaaagctcccgcaatggcgatggactagtgctttgcattttgctgatacgcctgattacaaatgcaactatgagtactctcgggactgtcctaaagactggtgtgtgacaggggcaatcttcaattacactaaccaactaatgtctacttctgaaaactcacagagtatagtccactataacttaacagaggctctcatgttcttatcacattatatgggagatatccatcagcctttacatgaaggttttattggagatctaggtggtaacaagataaaagttcactggtacaatcaggaaactaatttgcaccgtgtgtgggatgatatgataattgagtctgctctagaaacatactacaattcaagccttccacgcatgattcatgaacttcaagccaaactcaagaacggctggtcaaacgatgtaccttcatgggagtcatgtcaacttaaccaaacggcctgcccaaatccgtatgcttctgaaagcattgatcttgcctgcaagtatgcttacaggaacgccaccgcagggactactttaggagattactatttcgtctctcggttaccggtggtagagaagagacttgcacaaggcggaattcgcttggcagggactcttaaccgaatattttctgcaaaacggaagcttgctagagcatgaaaaaagatccaggagaatcacttgaacatccatgaacactcttatgtattaataatgtgtaatggtagtagttaaggttatggtttggtattgttcctgcgtttaaactataataagtatgaaacgaaaactgtacgtctac

SEQ ID NO: 1591 - protein, 323 aa, Arabidopsis thaliana
  peptide (1)..(323): Ceres Seq. ID no. 12395026
  misc_feature (30)..(323): NCBI GI NO: 18415727 NR Description: putative bifunctional nuclease
  misc_feature (34)..(321): NCBI GI NO: 18415729 NR Description: endonuclease, putative; protein id: At4g21600
  misc_feature (34)..(321): NCBI GI NO: 21593575 NR Description: endonuclease, putative [Arabidopsis thaliana]
  misc_feature (30)..(321): NCBI GI NO: 22328857 NR Description: expressed protein; protein id: At4g21585.1
  misc_feature (160)..(323): NCBI GI NO: 7485717 NR Description: hypothetical protein F18E5
  misc_feature (65)..(129): NCBI GI NO: 7485717 NR Description: hypothetical protein F18E5
  misc_feature (37)..(314): NCBI GI NO: 4099835 NR Description: bifunctional nuclease [Zinnia elegans]
  misc_feature (39)..(314): NCBI GI NO: 9558456 NR Description: unnamed protein product
  misc_feature (39)..(314): NCBI GI NO: 34895514 NR Description: putative bifunctional nuclease
  misc_feature (31)..(314): NCBI GI NO: 15221343 NR Description: putative bifunctional nuclease
ILHGVEKGKIQGSLASSFFSALESEAFLRMGWSLRMWIVSILVLTQLVNGALCWGDAGHYAVCKIAQSYFEEDTVVAVKKLLPESANGELAAVCSWPDEIKKLPQWRWTSALHFADTPDYKCNYEYSRDCPKDWCVTGAIFNYTNQLMSTSENSQSIVHYNLTEALMFLSHYMGDIHQPLHEGFIGDLGGNKIKVHWYNQETNLHRVWDDMIIESALETYYNSSLPRMIHELQAKLKNGWSNDVPSWESCQLNQTACPNPYASESIDLACKYAYRNATAGTTLGDYYFVSRLPVVEKRLAQGGIRLAGTLNRIFSAKRKLARA

SEQ ID NO: 1592 - protein, 294 aa, Arabidopsis thaliana
  peptide (1)..(294): Ceres Seq. ID no. 12395027
  misc_feature (1)..(294): NCBI GI NO: 18415727 NR Description: putative bifunctional nuclease
  misc_feature (5)..(292): NCBI GI NO: 18415729 NR Description: endonuclease, putative; protein id: At4g21600
  misc_feature (5)..(292): NCBI GI NO: 21593575 NR Description: endonuclease, putative [Arabidopsis thaliana]
  misc_feature (1)..(292): NCBI GI NO: 22328857 NR Description: expressed protein; protein id: At4g21585.1
  misc_feature (131)..(294): NCBI GI NO: 7485717 NR Description: hypothetical protein F18E5
  misc_feature (36)..(100): NCBI GI NO: 7485717 NR Description: hypothetical protein F18E5
  misc_feature (8)..(285): NCBI GI NO: 4099835 NR Description: bifunctional nuclease [Zinnia elegans]
  misc_feature (10)..(285): NCBI GI NO: 9558456 NR Description: unnamed protein product
  misc_feature (10)..(285): NCBI GI NO: 34895514 NR Description: putative bifunctional nuclease
  misc_feature (2)..(285): NCBI GI NO: 15221343 NR Description: putative bifunctional nuclease
MGWSLRMWIVSILVLTQLVNGALCWGDAGHYAVCKIAQSYFEEDTVVAVKKLLPESANGELAAVCSWPDEIKKLPQWRWTSALHFADTPDYKCNYEYSRDCPKDWCVTGAIFNYTNQLMSTSENSQSIVHYNLTEALMFLSHYMGDIHQPLHEGFIGDLGGNKIKVHWYNQETNLHRVWDDMIIESALETYYNSSLPRMIHELQAKLKNGWSNDVPSWESCQLNQTACPNPYASESIDLACKYAYRNATAGTTLGDYYFVSRLPVVEKRLAQGGIRLAGTLNRIFSAKRKLARA

SEQ ID NO: 1593 - protein, 288 aa, Arabidopsis thaliana
  peptide (1)..(288): Ceres Seq. ID no. 12395028
  misc_feature (1)..(288): NCBI GI NO: 18415727 NR Description: putative bifunctional nuclease
  misc_feature (1)..(286): NCBI GI NO: 18415729 NR Description: endonuclease, putative; protein id: At4g21600
  misc_feature (1)..(286): NCBI GI NO: 21593575 NR Description: endonuclease, putative [Arabidopsis thaliana]
  misc_feature (1)..(286): NCBI GI NO: 22328857 NR Description: expressed protein; protein id: At4g21585.1
  misc_feature (125)..(288): NCBI GI NO: 7485717 NR Description: hypothetical protein F18E5
  misc_feature (30)..(94): NCBI GI NO: 7485717 NR Description: hypothetical protein F18E5
  misc_feature (2)..(279): NCBI GI NO: 4099835 NR Description: bifunctional nuclease [Zinnia elegans]
  misc_feature (4)..(279): NCBI GI NO: 9558456 NR Description: unnamed protein product
  misc_feature (4)..(279): NCBI GI NO: 34895514 NR Description: putative bifunctional nuclease
  misc_feature (1)..(279): NCBI GI NO: 15221343 NR Description: putative bifunctional nuclease
MWIVSILVLTQLVNGALCWGDAGHYAVCKIAQSYFEEDTVVAVKKLLPESANGELAAVCSWPDEIKKLPQWRWTSALHFADTPDYKCNYEYSRDCPKDWCVTGAIFNYTNQLMSTSENSQSIVHYNLTEALMFLSHYMGDIHQPLHEGFIGDLGGNKIKVHWYNQETNLHRVWDDMIIESALETYYNSSLPRMIHELQAKLKNGWSNDVPSWESCQLNQTACPNPYASESIDLACKYAYRNATAGTTLGDYYFVSRLPVVEKRLAQGGIRLAGTLNRIFSAKRKLARA

SEQ ID NO: 1594 - DNA, 2716 bp, Arabidopsis thaliana
  misc_feature (1)..(2716): Ceres Seq. ID no. 13592888
atggagaagacacagatgcctgtagcccgagaagagaagatactggttctcgtgagattgaggcctctaaaccagaaagagattgccgctaatgaagctgcggattgggaatgtatcaatgataccaccatattgtacagaaacacattgcgcgaaggctcgaactttccttctgcatattcatttgataaagtctaccgaggtgaatgtcccaccagacaagtttacgaggatggaaccaaggaaatcgctctgtctgttgtcaaaggaatcaattgtagtattttcgcatatggccagacgagtagtggaaagacatacaccatgactggtattactgagtttgctgtggctgatatatttgactatatatttcagcatgaagaaagggcgttttccgtgaagttttcagctatagagatctacaatgaggccatacgagatctgcttagctcggatggtacatcactgaggctacgagacgatcctgagaaagggacagttgttgaaaaagccacagaggaaactctgcgagactggaaccatctgaaggaacttctatctatttgtgaaggtaaaactcaaaaaacatgttttctgaaaagtaaacttacatgcttctacattttcgcagcacagcgtaagataggtgaaacctcattgaatgagagaagttccagatctcatcaaatgatcagactgaatttcatcgatctagcaggaagcgagcgtgcttcacaagctatgtcagctggtacaagactcaaggaaggctgccatatcaatagaagtttgctgactcttggaacagtgatccgtaaacttagtaagggaagacaagggcacatcaactttagagactcgaagctcacacgaattctacagccatgcttggggggtaatgcaagaacagctatcatctgcactctgagcccagcaaggagtcatgtagagctaacgaagaacactctcttgtttgcgtgttgtgcaaaggaagtcaccacaaaggcgcggatcaatgttgttatgtcagacaaggctctgctaaagcaactacagcgtgagcttgcgaggctcgagactgagctgagaaaccctgcctcctcacctgcctcaaactgtgattgtgcaatgacggtgaggaagaaagatcttcagatacaaaagatggaaaaggagatcgcagagttgagaaaacagagggatcttgctcaatcccggcttgaagatttcatgagaatgattgaacacaatgtggcgtcaaagcctggaactccacatttcggcaaccacacagacaagtgggaggatggttcagtatcggagacatcaggcgtggtcgattcagacagaaggagttttatatcagatggaatgtctacaccgctgtcaatatcaagagcttatgttcattctcactctgacgatgatgatctggatgaagacttgcctaggcgttcggaagatctatcagaagaatattgcagagaagttcaatgcattgagactgaggaatcagtcacagtctataataacaagaaagacaagagagcagaacctgaaaacgttttaggctgtggtgaggatgctaatggtgaaacgagtgtaagccagaacgtcagggtgagaagttggaaccgcagagagactgtgtcaggcccgagcactccgcctgaaaacatagggacaggtttcctcggaagaccagagagtcacaagattgcgtttcctgatttagagttcggttctactgtatcgaggaatgattctatgtcttcttgcgggagcgattccacagggactcagagcatcagaacgccgttgggagaagagggtggtattactagtatccggactttcgttgaagggcttaaagagatggctaagcgtcaaggcgaggtctcaaatgctgaggattctggtaaaatgaggagggacattggtctggactccatggacagagaatttgagagacagcggcaagagattctggagctatggcaaacttgtaacatctctttggtgcatagaacatacttttacttgctcttcaaaggagatgaggcggattcaatctacatcggagtagagctaagaagacttttgtttatgaaagatagcttctctcagggaaaccaagcattggaaggaggagaaaccttaacattggcctcaagccggaaagagcttcacagggagagaaagatgctgagcaagcttgtggggaaaaggttttcaggagaagagaggaaaagaatctaccacaagtttgggattgcgattaactccaaacgcaggcggttacaacttgtgaatgagctctggagcaatcccaaggacatgactcaggttatggaaagcgcagatgttgtagcgaagcttgtgaggttcgctgagcaaggcagagccatgaaggagatgtttggtctgaccttcacacctccttcgttcttgacaactcggagatcgcatagttggagaaaaagcatgcctgcacttttctaacttctgtttggtccaatgacattttacttttgggtttcttgtagcagaagccatgtcttgtatatcttcttggtgtcatttcatttcctctgtcttttgatttttcaaaacagacaatgttgtaattgaatttttcttttccatcaaattcttttctttttacccgtaaaaattgttattaatgttatgaaaactcataatattttgaccc

SEQ ID NO: 1595 - protein, 834 aa, Arabidopsis thaliana
  peptide (1)..(834): Ceres Seq. ID no. 13592889
  misc_feature (1)..(193): NCBI GI NO: 15226512 NR Description: kinesin heavy chain -related
  misc_feature (234)..(418): NCBI GI NO: 15226512 NR Description: kinesin heavy chain -related
  misc_feature (8)..(449): NCBI GI NO: 38344976 NR Description: OSJNBa0011L07.1
  misc_feature (556)..(833): NCBI GI NO: 38344976 NR Description: OSJNBa0011L07.1
  misc_feature (2)..(415): NCBI GI NO: 30693419 NR Description: expressed protein [Arabidopsis thaliana]
  misc_feature (655)..(833): NCBI GI NO: 30693419 NR Description: expressed protein [Arabidopsis thaliana]
  misc_feature (7)..(416): NCBI GI NO: 30698217 NR Description: kinesin heavy chain DNA binding protein-related
  misc_feature (655)..(833): NCBI GI NO: 30698217 NR Description: kinesin heavy chain DNA binding protein-related
  misc_feature (20)..(422): NCBI GI NO: 15208467 NR Description: kinesin heavy chain [Zea mays]
  misc_feature (556)..(833): NCBI GI NO: 15208467 NR Description: kinesin heavy chain [Zea mays]
MEKTQMPVAREEKILVLVRLRPLNQKEIAANEAADWECINDTTILYRNTLREGSNFPSAYSFDKVYRGECPTRQVYEDGTKEIALSVVKGINCSIFAYGQTSSGKTYTMTGITEFAVADIFDYIFQHEERAFSVKFSAIEIYNEAIRDLLSSDGTSLRLRDDPEKGTVVEKATEETLRDWNHLKELLSICEGKTQKTCFLKSKLTCFYIFAAQRKIGETSLNERSSRSHQMIRLNFIDLAGSERASQAMSAGTRLKEGCHINRSLLTLGTVIRKLSKGRQGHINFRDSKLTRILQPCLGGNARTAIICTLSPARSHVELTKNTLLFACCAKEVTTKARINVVMSDKALLKQLQRELARLETELRNPASSPASNCDCAMTVRKKDLQIQKMEKEIAELRKQRDLAQSRLEDFMRMIEHNVASKPGTPHFGNHTDKWEDGSVSETSGVVDSDRRSFISDGMSTPLSISRAYVHSHSDDDDLDEDLPRRSEDLSEEYCREVQCIETEESVTVYNNKKDKRAEPENVLGCGEDANGETSVSQNVRVRSWNRRETVSGPSTPPENIGTGFLGRPESHKIAFPDLEFGSTVSRNDSMSSCGSDSTGTQSIRTPLGEEGGITSIRTFVEGLKEMAKRQGEVSNAEDSGKMRRDIGLDSMDREFERQRQEILELWQTCNISLVHRTYFYLLFKGDEADSIYIGVELRRLLFMKDSFSQGNQALEGGETLTLASSRKELHRERKMLSKLVGKRFSGEERKRIYHKFGIAINSKRRRLQLVNELWSNPKDMTQVMESADVVAKLVRFAEQGRAMKEMFGLTFTPPSFLTTRRSHSWRKSMPALF

SEQ ID NO: 1596 - protein, 829 aa, Arabidopsis thaliana
  peptide (1)..(829): Ceres Seq. ID no. 13592890
  misc_feature (1)..(188): NCBI GI NO: 15226512 NR Description: kinesin heavy chain -related
  misc_feature (229)..(413): NCBI GI NO: 15226512 NR Description: kinesin heavy chain -related
  misc_feature (3)..(444): NCBI GI NO: 38344976 NR Description: OSJNBa0011L07.1
  misc_feature (551)..(828): NCBI GI NO: 38344976 NR Description: OSJNBa0011L07.1
  misc_feature (1)..(410): NCBI GI NO: 30693419 NR Description: expressed protein [Arabidopsis thaliana]
  misc_feature (650)..(828): NCBI GI NO: 30693419 NR Description: expressed protein [Arabidopsis thaliana]
  misc_feature (2)..(411): NCBI GI NO: 30698217 NR Description: kinesin heavy chain DNA binding protein-related
  misc_feature (650)..(828): NCBI GI NO: 30698217 NR Description: kinesin heavy chain DNA binding protein-related
  misc_feature (15)..(417): NCBI GI NO: 15208467 NR Description: kinesin heavy chain [Zea mays]
  misc_feature (551)..(828): NCBI GI NO: 15208467 NR Description: kinesin heavy chain [Zea mays]
MPVAREEKILVLVRLRPLNQKEIAANEAADWECINDTTILYRNTLREGSNFPSAYSFDKVYRGECPTRQVYEDGTKEIALSVVKGINCSIFAYGQTSSGKTYTMTGITEFAVADIFDYIFQHEERAFSVKFSAIEIYNEAIRDLLSSDGTSLRLRDDPEKGTVVEKATEETLRDWNHLKELLSICEGKTQKTCFLKSKLTCFYIFAAQRKIGETSLNERSSRSHQMIRLNFIDLAGSERASQAMSAGTRLKEGCHINRSLLTLGTVIRKLSKGRQGHINFRDSKLTRILQPCLGGNARTAIICTLSPARSHVELTKNTLLFACCAKEVTTKARINVVMSDKALLKQLQRELARLETELRNPASSPASNCDCAMTVRKKDLQIQKMEKEIAELRKQRDLAQSRLEDFMRMIEHNVASKPGTPHFGNHTDKWEDGSVSETSGVVDSDRRSFISDGMSTPLSISRAYVHSHSDDDDLDEDLPRRSEDLSEEYCREVQCIETEESVTVYNNKKDKRAEPENVLGCGEDANGETSVSQNVRVRSWNRRETVSGPSTPPENIGTGFLGRPESHKIAFPDLEFGSTVSRNDSMSSCGSDSTGTQSIRTPLGEEGGITSIRTFVEGLKEMAKRQGEVSNAEDSGKMRRDIGLDSMDREFERQRQEILELWQTCNISLVHRTYFYLLFKGDEADSIYIGVELRRLLFMKDSFSQGNQALEGGETLTLASSRKELHRERKMLSKLVGKRFSGEERKRIYHKFGIAINSKRRRLQLVNELWSNPKDMTQVMESADVVAKLVRFAEQGRAMKEMFGLTFTPPSFLTTRRSHSWRKSMPALF

SEQ ID NO: 1597 - protein, 726 aa, Arabidopsis thaliana
  peptide (1)..(726): Ceres Seq. ID no. 13592891
  misc_feature (1)..(85): NCBI GI NO: 15226512 NR Description: kinesin heavy chain -related
  misc_feature (126)..(310): NCBI GI NO: 15226512 NR Description: kinesin heavy chain -related
  misc_feature (1)..(341): NCBI GI NO: 38344976 NR Description: OSJNBa0011L07.1
  misc_feature (448)..(725): NCBI GI NO: 38344976 NR Description: OSJNBa0011L07.1
  misc_feature (1)..(307): NCBI GI NO: 30693419 NR Description: expressed protein [Arabidopsis thaliana]
  misc_feature (547)..(725): NCBI GI NO: 30693419 NR Description: expressed protein [Arabidopsis thaliana]
  misc_feature (1)..(308): NCBI GI NO: 30698217 NR Description: kinesin heavy chain DNA binding protein-related
  misc_feature (547)..(725): NCBI GI NO: 30698217 NR Description: kinesin heavy chain DNA binding protein-related
  misc_feature (1)..(314): NCBI GI NO: 15208467 NR Description: kinesin heavy chain [Zea mays]
  misc_feature (448)..(725): NCBI GI NO: 15208467 NR Description: kinesin heavy chain [Zea mays]
MTGITEFAVADIFDYIFQHEERAFSVKFSAIEIYNEAIRDLLSSDGTSLRLRDDPEKGTVVEKATEETLRDWNHLKELLSICEGKTQKTCFLKSKLTCFYIFAAQRKIGETSLNERSSRSHQMIRLNFIDLAGSERASQAMSAGTRLKEGCHINRSLLTLGTVIRKLSKGRQGHINFRDSKLTRILQPCLGGNARTAIICTLSPARSHVELTKNTLLFACCAKEVTTKARINVVMSDKALLKQLQRELARLETELRNPASSPASNCDCAMTVRKKDLQIQKMEKEIAELRKQRDLAQSRLEDFMRMIEHNVASKPGTPHFGNHTDKWEDGSVSETSGVVDSDRRSFISDGMSTPLSISRAYVHSHSDDDDLDEDLPRRSEDLSEEYCREVQCIETEESVTVYNNKKDKRAEPENVLGCGEDANGETSVSQNVRVRSWNRRETVSGPSTPPENIGTGFLGRPESHKIAFPDLEFGSTVSRNDSMSSCGSDSTGTQSIRTPLGEEGGITSIRTFVEGLKEMAKRQGEVSNAEDSGKMRRDIGLDSMDREFERQRQEILELWQTCNISLVHRTYFYLLFKGDEADSIYIGVELRRLLFMKDSFSQGNQALEGGETLTLASSRKELHRERKMLSKLVGKRFSGEERKRIYHKFGIAINSKRRRLQLVNELWSNPKDMTQVMESADVVAKLVRFAEQGRAMKEMFGLTFTPPSFLTTRRSHSWRKSMPALF

SEQ ID NO: 1598 - DNA, 1097 bp, Arabidopsis thaliana
  misc_feature (1)..(1097): Ceres Seq. ID no. 13646094
gtccctatccaatacacatctctctctctcttattaactcaatgacggcgactgcgtttagggtcggcttgtggttggccgttacggcttcctttctcttaaccgcaacaaacgccaaaatccccggcgtttacagtggcggaccgtggcagaatgcacacgccactttctacggtggcagtgacgcccggcacaatgggcggcgcgtgtgggtacgggaacttgtacagccaaggatacggtgtgaacacggcggcgttgagcactgctttgttcaacaacggattcagctgtggtgcttgttttgagattaagtgtactgatgatccaagatggtgtgttccgggaaatccatctattcttgtgacggcgacgaacttttgtccgccgaattttgctcagccgagtgacgacggagggtggtgcaatccgccgcgcgagcattttgatctcgccatgcctatgttcctcaagatcggtctataccgtgcaggcattgtccccgtctcctatcgcagggtaccttgtcggaagataggagggataagattcacagtaaacggattcagatacttcaatcttgttctggtaactaacgttgccggcgccggagatattaacggagttagcgtaaagggatcaaagacagattgggtgaggatgagtcggaactggggacagaactggcaatccaacgccgttctcatcggccaatcactctctttccgagtcaccgcctctgaccgacgttcttctacctcatggaacgttgctcctgccacgtggcagtttggtcagactttctccggcaaaaactttcgagtctgaaatctgaaaaaccacccaaaagatgttttttaattttattttttacaatggaagaagacacaaacaagaagagagatgagacattttccagccctgggttttccctttaattttcttgggaatattccggtggcttgtggaaaatatttccgtttttagtattattatcagcaaaatttcttttaatctttgcgatttacgagtgatttgtttttctcttggttattttgttcctttaattatttcgttggtggcatcttcgttctgcg

SEQ ID NO: 1599 - protein, 224 aa, Arabidopsis thaliana
  peptide (1)..(224): Ceres Seq. ID no. 13646095
  misc_feature (131)..(208): Pfam Name: Pfam Description:  Pollen allergen
  misc_feature (13)..(224): NCBI GI NO: 15224330 NR Description: expansin, putative (EXP3) [Arabidopsis thaliana]
  misc_feature (13)..(224): NCBI GI NO: 20502784 NR Description: expansin 11 precursor [Rumex palustris]
  misc_feature (13)..(224): NCBI GI NO: 20502782 NR Description: expansin 10 precursor [Rumex palustris]
  misc_feature (13)..(224): NCBI GI NO: 20502786 NR Description: expansin 12 precursor [Rumex palustris]
  misc_feature (13)..(224): NCBI GI NO: 29467509 NR Description: expansin [Pyrus communis]
  misc_feature (13)..(224): NCBI GI NO: 1076531 NR Description: pollen allergen homolog, hypothetical
  misc_feature (13)..(224): NCBI GI NO: 15227005 NR Description: expansin, putative [Arabidopsis thaliana]
  misc_feature (13)..(224): NCBI GI NO: 20138197 NR Description: Alpha-expansin 6 precursor
  misc_feature (13)..(224): NCBI GI NO: 29466643 NR Description: expansin [Prunus persica]
  misc_feature (13)..(224): NCBI GI NO: 11281299 NR Description: alpha-expansin 2
MHTPLSTVAVTPGTMGGACGYGNLYSQGYGVNTAALSTALFNNGFSCGACFEIKCTDDPRWCVPGNPSILVTATNFCPPNFAQPSDDGGWCNPPREHFDLAMPMFLKIGLYRAGIVPVSYRRVPCRKIGGIRFTVNGFRYFNLVLVTNVAGAGDINGVSVKGSKTDWVRMSRNWGQNWQSNAVLIGQSLSFRVTASDRRSSTSWNVAPATWQFGQTFSGKNFRV

SEQ ID NO: 1600 - protein, 210 aa, Arabidopsis thaliana
  peptide (1)..(210): Ceres Seq. ID no. 13646096
  misc_feature (117)..(194): Pfam Name: Pfam Description:  Pollen allergen
  misc_feature (1)..(210): NCBI GI NO: 15224330 NR Description: expansin, putative (EXP3) [Arabidopsis thaliana]
  misc_feature (1)..(210): NCBI GI NO: 20502784 NR Description: expansin 11 precursor [Rumex palustris]
  misc_feature (1)..(210): NCBI GI NO: 20502782 NR Description: expansin 10 precursor [Rumex palustris]
  misc_feature (1)..(210): NCBI GI NO: 20502786 NR Description: expansin 12 precursor [Rumex palustris]
  misc_feature (1)..(210): NCBI GI NO: 29467509 NR Description: expansin [Pyrus communis]
  misc_feature (1)..(210): NCBI GI NO: 1076531 NR Description: pollen allergen homolog, hypothetical
  misc_feature (1)..(210): NCBI GI NO: 15227005 NR Description: expansin, putative [Arabidopsis thaliana]
  misc_feature (1)..(210): NCBI GI NO: 20138197 NR Description: Alpha-expansin 6 precursor
  misc_feature (1)..(210): NCBI GI NO: 29466643 NR Description: expansin [Prunus persica]
  misc_feature (1)..(210): NCBI GI NO: 11281299 NR Description: alpha-expansin 2
MGGACGYGNLYSQGYGVNTAALSTALFNNGFSCGACFEIKCTDDPRWCVPGNPSILVTATNFCPPNFAQPSDDGGWCNPPREHFDLAMPMFLKIGLYRAGIVPVSYRRVPCRKIGGIRFTVNGFRYFNLVLVTNVAGAGDINGVSVKGSKTDWVRMSRNWGQNWQSNAVLIGQSLSFRVTASDRRSSTSWNVAPATWQFGQTFSGKNFRV

SEQ ID NO: 1601 - protein, 123 aa, Arabidopsis thaliana
  peptide (1)..(123): Ceres Seq. ID no. 13646097
  misc_feature (30)..(107): Pfam Name: Pfam Description:  Pollen allergen
  misc_feature (1)..(123): NCBI GI NO: 15224330 NR Description: expansin, putative (EXP3) [Arabidopsis thaliana]
  misc_feature (1)..(123): NCBI GI NO: 20502784 NR Description: expansin 11 precursor [Rumex palustris]
  misc_feature (1)..(123): NCBI GI NO: 20502782 NR Description: expansin 10 precursor [Rumex palustris]
  misc_feature (1)..(123): NCBI GI NO: 20502786 NR Description: expansin 12 precursor [Rumex palustris]
  misc_feature (1)..(123): NCBI GI NO: 29467509 NR Description: expansin [Pyrus communis]
  misc_feature (1)..(123): NCBI GI NO: 1076531 NR Description: pollen allergen homolog, hypothetical
  misc_feature (1)..(123): NCBI GI NO: 15227005 NR Description: expansin, putative [Arabidopsis thaliana]
  misc_feature (1)..(123): NCBI GI NO: 29466643 NR Description: expansin [Prunus persica]
  misc_feature (1)..(123): NCBI GI NO: 20138197 NR Description: Alpha-expansin 6 precursor
  misc_feature (1)..(123): NCBI GI NO: 11281299 NR Description: alpha-expansin 2
MPMFLKIGLYRAGIVPVSYRRVPCRKIGGIRFTVNGFRYFNLVLVTNVAGAGDINGVSVKGSKTDWVRMSRNWGQNWQSNAVLIGQSLSFRVTASDRRSSTSWNVAPATWQFGQTFSGKNFRV

SEQ ID NO: 1602 - DNA, 1233 bp, Arabidopsis thaliana
  misc_feature (1)..(1233): Ceres Seq. ID no. 13509427
ctcttttctctcttagttcagggaggaggctcgagaacagtgccccatatctgaaagctgaagctaagaatctggacgttcgtgtttaaaccgacgacgtatttgaaattggctttgaaggaaaggtgaaattaatggcggaatcgtcgtcgccgtcgcctactgaagagatcgttcggttgattaagcgtttaagcgcttacgttgctttcaaaatgtcaagccttttctccactacatcgattcgaaatctggattcaagatcaattggtgcgattgcggggcttgcgattgcggtgatatttacgtggagggcgataagaacgcccggagagcaacgtcagagaaggcagccgaagcgtaggattcacaatgctgaaacgtctagtgctgctgctgctgcttctcagtcgaatctagcttcttcggttgctccggaagtttcttcgcctcgtgaggataatgcggtgcaagatgttgttgatcagttctttcaacctgttaaacctactttggggcaaatagttagacagaagcttagtgaaggaaggaaggtaacatgccgtcttcttggagtaattcttgaggaaacaagtccagaagaactccaaaaacaagccacagtgaggtcatctgttttggaagttctactagagattacaaagtatagtgatttgtatcttatggaaagagttcttgacgatgaaagcgaggccaaagttttacaggctttagagaatgcaggagtttttacatctggtggtttagtcaaagataaggtgctcttttgtagtacagagataggaagaacttcctttgtcagacagctagaacctgactggcatattgatacaaacccggaaatcagcacacaactagctaggttcatcaaatatcagcttcatgtcgctacggtgaaacccgagcgaacagctccaaatgtgttcacctcgcagtcaatagaacagttctttggaagtgtttaatatcaacaaaaaaagagaggtgaaagatattacgttgtcctgacttaagcatcgttgatcgagtgtctcttaggctgaaacttgaaacttgtttttcatttttctttgattgtgtctaaattaaagtttgatatacatttggagttagatattactgcgagtgcctctgtgaaagtatccaagtttgtaatttttgtattagcaacttagcaaaattctttaagaaataaacaaatgtccgttgtct

SEQ ID NO: 1603 - protein, 283 aa, Arabidopsis thaliana
  peptide (1)..(283): Ceres Seq. ID no. 13509428
  misc_feature (1)..(283): NCBI GI NO: 17381010 NR Description: unknown protein [Arabidopsis thaliana]
  misc_feature (133)..(283): NCBI GI NO: 21618311 NR Description: unknown [Arabidopsis thaliana]
  misc_feature (101)..(280): NCBI GI NO: 38345629 NR Description: OSJNBb0004A17.10
  misc_feature (11)..(94): NCBI GI NO: 38345629 NR Description: OSJNBb0004A17.10
  misc_feature (184)..(283): NCBI GI NO: 18403177 NR Description: expressed protein [Arabidopsis thaliana]
  misc_feature (85)..(257): NCBI GI NO: 39546241 NR Description: OSJNBa0089N06.11
  misc_feature (145)..(283): NCBI GI NO: 23481990 NR Description: hypothetical protein [Plasmodium yoelii yoelii]
MAESSSPSPTEEIVRLIKRLSAYVAFKMSSLFSTTSIRNLDSRSIGAIAGLAIAVIFTWRAIRTPGEQRQRRQPKRRIHNAETSSAAAAASQSNLASSVAPEVSSPREDNAVQDVVDQFFQPVKPTLGQIVRQKLSEGRKVTCRLLGVILEETSPEELQKQATVRSSVLEVLLEITKYSDLYLMERVLDDESEAKVLQALENAGVFTSGGLVKDKVLFCSTEIGRTSFVRQLEPDWHIDTNPEISTQLARFIKYQLHVATVKPERTAPNVFTSQSIEQFFGSV

SEQ ID NO: 1604 - protein, 256 aa, Arabidopsis thaliana
  peptide (1)..(256): Ceres Seq. ID no. 13509429
  misc_feature (1)..(256): NCBI GI NO: 17381010 NR Description: unknown protein [Arabidopsis thaliana]
  misc_feature (106)..(256): NCBI GI NO: 21618311 NR Description: unknown [Arabidopsis thaliana]
  misc_feature (74)..(253): NCBI GI NO: 38345629 NR Description: OSJNBb0004A17.10
  misc_feature (1)..(67): NCBI GI NO: 38345629 NR Description: OSJNBb0004A17.10
  misc_feature (157)..(256): NCBI GI NO: 18403177 NR Description: expressed protein [Arabidopsis thaliana]
  misc_feature (58)..(230): NCBI GI NO: 39546241 NR Description: OSJNBa0089N06.11
  misc_feature (118)..(256): NCBI GI NO: 23481990 NR Description: hypothetical protein [Plasmodium yoelii yoelii]
MSSLFSTTSIRNLDSRSIGAIAGLAIAVIFTWRAIRTPGEQRQRRQPKRRIHNAETSSAAAAASQSNLASSVAPEVSSPREDNAVQDVVDQFFQPVKPTLGQIVRQKLSEGRKVTCRLLGVILEETSPEELQKQATVRSSVLEVLLEITKYSDLYLMERVLDDESEAKVLQALENAGVFTSGGLVKDKVLFCSTEIGRTSFVRQLEPDWHIDTNPEISTQLARFIKYQLHVATVKPERTAPNVFTSQSIEQFFGSV

SEQ ID NO: 1605 - DNA, 1129 bp, Arabidopsis thaliana
  misc_feature (1)..(1129): Ceres Seq. ID no. 13499586
gagcccaactcctctctcttcacgcatttctcgttgtcaaagacaaagttctctccttttataaacacccatctccacctcctctctcttattcaaacttctttgagaaaattcgagctaagtgtttttataatatatacattctctgatatgggtttctctagagcaaaacgtgtcactgatccacttgcagaagaggttagggctcgtctcgttggatgcagctttagcagcggcagcgaacataccggcgacggaattgaagactacgaagacgacgactcgccttgtctctctgatctagtacaagggttcttggaagatgaagttgatacagttgatgatgagtcatgctggtgtgatcaagattctggttccgactcggattctgactcggaacttggcgagctccctgactttgccgacgatatcgccaagcttctgaggaactctctcagggaagattcatacggacgaacggtgctggtacatgtggcgagagcgatggaaatgttgtcgtctctcggatctcagcccgaacagcgtgccgttttccagcgtaaggtcatgtctcttcttagagaactcggccacaatgcggccatctgcaaaactaaatggaaatcctccggcggactcaccgccggtaaccatgagttcatcgacgtcgtgtatacaccttccgcctcgtctcagtccgtccgtttcatcgtcgatttagatttctcgtcgcggtttcaaatcgcgaggccaacttcacagtacgcgcgtgtgcttcaatcgcttccggcggttttcgtcggaaagggggatgatctgaagcggatcttgcgtctcgtgtgtgacgccgcgaggatttctcttaggaaccgcgggctgacgcttccgccgtggaggaagaatcgttatatgcagacgcggtggcttggtccttacaaacgcaccaccaacttaacgccgtcaacttccggtgtagacaccgtcatgtgtcgtgccatcggtttcgataatgccgtcggaggccgtctatttgtgcgaacacgataaaaactagaccaaaaagaccacgtgtcatttttaacttgattttttccatatacgttctagagaataataattcattatttgc

SEQ ID NO: 1606 - protein, 348 aa, Arabidopsis thaliana
  peptide (1)..(348): Ceres Seq. ID no. 13499587
  misc_feature (98)..(314): Pfam Name: DUF506 Pfam Description: Protein of unknown function
  misc_feature (51)..(348): NCBI GI NO: 18397919 NR Description: expressed protein [Arabidopsis thaliana]
  misc_feature (51)..(348): NCBI GI NO: 21554332 NR Description: unknown [Arabidopsis thaliana]
  misc_feature (92)..(346): NCBI GI NO: 15230824 NR Description: hypothetical protein [Arabidopsis thaliana]
  misc_feature (63)..(340): NCBI GI NO: 34906942 NR Description: similar to Arabidopsis thaliana chromosome 3
  misc_feature (84)..(314): NCBI GI NO: 34902608 NR Description: Unknown protein
  misc_feature (84)..(314): NCBI GI NO: 20042978 NR Description: Hypothetical protein [Oryza sativa]
  misc_feature (84)..(314): NCBI GI NO: 37534384 NR Description: unknown protein
  misc_feature (49)..(316): NCBI GI NO: 30682929 NR Description: expressed protein [Arabidopsis thaliana]
  misc_feature (54)..(316): NCBI GI NO: 15228917 NR Description: expressed protein [Arabidopsis thaliana]
  misc_feature (54)..(316): NCBI GI NO: 28058790 NR Description: unknown protein [Arabidopsis thaliana]
EPNSSLFTHFSLSKTKFSPFINTHLHLLSLIQTSLRKFELSVFIIYTFSDMGFSRAKRVTDPLAEEVRARLVGCSFSSGSEHTGDGIEDYEDDDSPCLSDLVQGFLEDEVDTVDDESCWCDQDSGSDSDSDSELGELPDFADDIAKLLRNSLREDSYGRTVLVHVARAMEMLSSLGSQPEQRAVFQRKVMSLLRELGHNAAICKTKWKSSGGLTAGNHEFIDVVYTPSASSQSVRFIVDLDFSSRFQIARPTSQYARVLQSLPAVFVGKGDDLKRILRLVCDAARISLRNRGLTLPPWRKNRYMQTRWLGPYKRTTNLTPSTSGVDTVMCRAIGFDNAVGGRLFVRTR

SEQ ID NO: 1607 - protein, 298 aa, Arabidopsis thaliana
  peptide (1)..(298): Ceres Seq. ID no. 13499588
  misc_feature (48)..(264): Pfam Name: DUF506 Pfam Description: Protein of unknown function
  misc_feature (1)..(298): NCBI GI NO: 18397919 NR Description: expressed protein [Arabidopsis thaliana]
  misc_feature (1)..(298): NCBI GI NO: 21554332 NR Description: unknown [Arabidopsis thaliana]
  misc_feature (42)..(296): NCBI GI NO: 15230824 NR Description: hypothetical protein [Arabidopsis thaliana]
  misc_feature (13)..(290): NCBI GI NO: 34906942 NR Description: similar to Arabidopsis thaliana chromosome 3
  misc_feature (34)..(264): NCBI GI NO: 34902608 NR Description: Unknown protein
  misc_feature (34)..(264): NCBI GI NO: 20042978 NR Description: Hypothetical protein [Oryza sativa]
  misc_feature (34)..(264): NCBI GI NO: 37534384 NR Description: unknown protein
  misc_feature (1)..(266): NCBI GI NO: 30682929 NR Description: expressed protein [Arabidopsis thaliana]
  misc_feature (4)..(266): NCBI GI NO: 15228917 NR Description: expressed protein [Arabidopsis thaliana]
  misc_feature (4)..(266): NCBI GI NO: 28058790 NR Description: unknown protein [Arabidopsis thaliana]
MGFSRAKRVTDPLAEEVRARLVGCSFSSGSEHTGDGIEDYEDDDSPCLSDLVQGFLEDEVDTVDDESCWCDQDSGSDSDSDSELGELPDFADDIAKLLRNSLREDSYGRTVLVHVARAMEMLSSLGSQPEQRAVFQRKVMSLLRELGHNAAICKTKWKSSGGLTAGNHEFIDVVYTPSASSQSVRFIVDLDFSSRFQIARPTSQYARVLQSLPAVFVGKGDDLKRILRLVCDAARISLRNRGLTLPPWRKNRYMQTRWLGPYKRTTNLTPSTSGVDTVMCRAIGFDNAVGGRLFVRTR

SEQ ID NO: 1608 - protein, 180 aa, Arabidopsis thaliana
  peptide (1)..(180): Ceres Seq. ID no. 13499589
  misc_feature (1)..(146): Pfam Name: DUF506 Pfam Description: Protein of unknown function
  misc_feature (1)..(180): NCBI GI NO: 18397919 NR Description: expressed protein [Arabidopsis thaliana]
  misc_feature (1)..(180): NCBI GI NO: 21554332 NR Description: unknown [Arabidopsis thaliana]
  misc_feature (1)..(178): NCBI GI NO: 15230824 NR Description: hypothetical protein [Arabidopsis thaliana]
  misc_feature (1)..(172): NCBI GI NO: 34906942 NR Description: similar to Arabidopsis thaliana chromosome 3
  misc_feature (1)..(146): NCBI GI NO: 34902608 NR Description: Unknown protein
  misc_feature (1)..(146): NCBI GI NO: 20042978 NR Description: Hypothetical protein [Oryza sativa]
  misc_feature (1)..(146): NCBI GI NO: 37534384 NR Description: unknown protein
  misc_feature (1)..(148): NCBI GI NO: 30682929 NR Description: expressed protein [Arabidopsis thaliana]
  misc_feature (1)..(148): NCBI GI NO: 15228917 NR Description: expressed protein [Arabidopsis thaliana]
  misc_feature (1)..(148): NCBI GI NO: 28058790 NR Description: unknown protein [Arabidopsis thaliana]
MEMLSSLGSQPEQRAVFQRKVMSLLRELGHNAAICKTKWKSSGGLTAGNHEFIDVVYTPSASSQSVRFIVDLDFSSRFQIARPTSQYARVLQSLPAVFVGKGDDLKRILRLVCDAARISLRNRGLTLPPWRKNRYMQTRWLGPYKRTTNLTPSTSGVDTVMCRAIGFDNAVGGRLFVRTR

SEQ ID NO: 1609 - DNA, 696 bp, Arabidopsis thaliana
  misc_feature (1)..(696): Ceres Seq. ID no. 12336350
aattaacagtgctttaaatctaagaaccctaattcaatactccacaaagggggtttcttcttcccaaggtttcagattctctccgtatccaaagttttgttttgttttttgtttgaaagcgaggatgaaagaatcgaaatcagccaagctgaatcagctacaacaacaagagaatcaccagaatgctcacttgtctccatcgaaattagcgaaattgttcgatcccgatgcttcttgggacaaggatcaattaggagatgtgttacattggattcgacaagtggtgggattgatctctggattgttatggggctctattccacttgttggaggcatttggatcattctgtttttggcgatatcctctgggatagtttatggttactacgcaatgattctcaaggttgatgaagaagatttcggaggccacgcagctttactccaagagggtctctttgcgtcacttactctctttttgctcgcatggattcttgtctatagcttggcacacttctgaaaaaaaagctgagcaacattcttttcactcagcagcaaaggcattggaacgaatctttttgttcttttgttttgtttttgtaaactgtctgaagataaggctacaagagacaaaacgttatagtaacaatttttatgaatcttttgaatgttacaaaagctttctatagtatcattttt

SEQ ID NO: 1610 - protein, 171 aa, Arabidopsis thaliana
  peptide (1)..(171): Ceres Seq. ID no. 12336351
  misc_feature (42)..(171): NCBI GI NO: 15238396 NR Description: putative Rab5-interacting protein - like
  misc_feature (42)..(159): NCBI GI NO: 8885547 NR Description: gb|AAF17201
  misc_feature (42)..(171): NCBI GI NO: 18401926 NR Description: expressed protein; protein id: At2g29020
  misc_feature (42)..(160): NCBI GI NO: 14719336 NR Description: hypothetical protein [Oryza sativa]
  misc_feature (61)..(171): NCBI GI NO: 13385630 NR Description: RIKEN cDNA 1110008F13 [Mus musculus]
  misc_feature (61)..(171): NCBI GI NO: 10047116 NR Description: putative Rab5-interacting protein [Homo sapiens]
  misc_feature (61)..(171): NCBI GI NO: 27704314 NR Description: similar to RIKEN cDNA 1110008F13
  misc_feature (54)..(171): NCBI GI NO: 27503935 NR Description: Similar to RIKEN cDNA 1110008F13 gene
  misc_feature (61)..(170): NCBI GI NO: 34872254 NR Description: similar to RIKEN cDNA 1110008F13
  misc_feature (61)..(170): NCBI GI NO: 24211596 NR Description: Protein C20orf24
INSALNLRTLIQYSTKGVSSSQGFRFSPYPKFCFVFCLKARMKESKSAKLNQLQQQENHQNAHLSPSKLAKLFDPDASWDKDQLGDVLHWIRQVVGLISGLLWGSIPLVGGIWIILFLAISSGIVYGYYAMILKVDEEDFGGHAALLQEGLFASLTLFLLAWILVYSLAHF

SEQ ID NO: 1611 - protein, 130 aa, Arabidopsis thaliana
  peptide (1)..(130): Ceres Seq. ID no. 12336352
  misc_feature (1)..(130): NCBI GI NO: 15238396 NR Description: putative Rab5-interacting protein - like
  misc_feature (1)..(118): NCBI GI NO: 8885547 NR Description: gb|AAF17201
  misc_feature (1)..(130): NCBI GI NO: 18401926 NR Description: expressed protein; protein id: At2g29020
  misc_feature (1)..(119): NCBI GI NO: 14719336 NR Description: hypothetical protein [Oryza sativa]
  misc_feature (20)..(130): NCBI GI NO: 13385630 NR Description: RIKEN cDNA 1110008F13 [Mus musculus]
  misc_feature (20)..(130): NCBI GI NO: 10047116 NR Description: putative Rab5-interacting protein [Homo sapiens]
  misc_feature (20)..(130): NCBI GI NO: 27704314 NR Description: similar to RIKEN cDNA 1110008F13
  misc_feature (13)..(130): NCBI GI NO: 27503935 NR Description: Similar to RIKEN cDNA 1110008F13 gene
  misc_feature (20)..(129): NCBI GI NO: 34872254 NR Description: similar to RIKEN cDNA 1110008F13
  misc_feature (20)..(129): NCBI GI NO: 24211596 NR Description: Protein C20orf24
MKESKSAKLNQLQQQENHQNAHLSPSKLAKLFDPDASWDKDQLGDVLHWIRQVVGLISGLLWGSIPLVGGIWIILFLAISSGIVYGYYAMILKVDEEDFGGHAALLQEGLFASLTLFLLAWILVYSLAHF

SEQ ID NO: 1612 - protein, 92 aa, Arabidopsis thaliana
  peptide (1)..(92): Ceres Seq. ID no. 12336353
MKKISEATQLYSKRVSLRHLLSFCSHGFLSIAWHTSEKKAEQHSFHSAAKALERIFLFFCFVFVNCLKIRLQETKRYSNNFYESFECYKSFL

SEQ ID NO: 1613 - DNA, 2464 bp, Arabidopsis thaliana
  misc_feature (1)..(2464): Ceres Seq. ID no. 12377492
atatcagagaatcagagaccaacgtcacttatttacacactctgttttcttttttttggttgcttcttctctgatctttctttctttttttttttttgaaagaatcaatttccctctcaaatcagaaatctaaaaatgggaacaacgatcttggttctctccaagatcctaactttcttactaacaacaatgctgattggatccagtgtgatccagtgtagtagtgtaacctacgataagaaagctatcgtcatcaatggccaccgtagaatcctcctctctggttctattcactacccaagaagcactcctgagatgtgggaagatcttataaagaaagctaaagacggtggcttggatgttattgatacttatgttttctggaatggtcatgaaccttctcctggaacttacaatttcgaaggaagatatgatttggtaagattcattaagacgattcaggaagtgggtctttatgttcatctcagaattggtccttatgtttgtgcagaatggaattttggagggtttcctgtgtggttgaagtatgtagatgggattagtttcagaactgacaatggacccttcaagtctgcaatgcaaggattcacagagaagattgttcagatgatgaaagaacatagattctttgcgtcacaaggtggacctatcattctttctcagattgagaatgagtttgaaccagatcttaaagggcttggaccggctggtcactcgtatgtcaattgggctgcgaaaatggcggtcggtttaaacacgggagtaccgtgggtgatgtgcaaggaagatgatgcacctgacccaattataaacacttgcaacggattctactgtgattattttactccaaataaaccgtataagccaactatgtggacagaggcatggagtggctggttcacagagtttggtggaactgttcctaaacgacctgtagaggatctagcatttggagtagctcgtttcattcaaaagggcggttcgtatataaactactacatgtaccatggaggaacaaactttggacgcaccgcaggaggtccatttatcaccactagttatgactatgatgctcctatcgatgaatacgggttggtccaagagcccaagtacagtcatcttaagcagcttcatcaggcaatcaagcaatgtgaagctgccttagtttcttctgatccacatgttactaaactaggaaactacgaggaggctcatgtgttcactgctggcaaaggaagttgtgtagctttcttaacgaactatcacatgaatgcacctgcaaaagtagtgttcaataaccgacactatactctacctgcttggtccatcagcattcttccagattgtagaaacgttgttttcaacactgcgacggttgctgcaaagacatcacatgtgcaaatggtgccatctggttccatattgtactcggttgctagatacgatgaagatattgctacttatggaaaccgtgggacaatcacagctcgtggattgttggagcaggttaatgttacacgagatacaactgattacctgtggtacacaaccagtgtggatattaaggcatcagaatcattcttgcgtggaggaaaatggccaactcttacagtggattctgcagggcatgctgttcatgtgtttgtcaatggacatttttacggatctgcctttggaacaagagaaaacagaaagttttcatttagctcccaagtcaatctacgaggtggagctaacaaaatcgcactactgagtgtagcagttgggttgccgaatgttggaccacattttgagacgtgggccacaggaatcgtcgggtctgtggtgcttcatggccttgacgagggtaacaaagacttgagttggcagaaatggacttatcaggctggtctgcgaggggaatcaatgaacttggtctctcctactgaggactcctctgttgattggatcaaaggctcattggctaagcaaaacaaacaacctttgacatggtacaaggcctattttgacgcgcctagagggaacgagccgctggctttggatctaaagagtatggggaaagggcaagcttggataaacgggcaaagcatagggagatactggatggcatttgccaaaggagactgcggaagttgtaactacgctggaacatacaggcagaacaaatgccagtctggttgtggcgagccgacacaaagatggtatcatgttccgcgttcgtggttgaagccaaaagggaacttgttagtactttttgaagaacttggtggagatatatccaaagtctctgttgtgaagagatcagtaaactaacttaaaaaataaaaccaatattgtgtgtgcattacactaaaagcattactcgtgctgtgtttaatttatccctctttgtgaacagaaaccatatttgaaactcgagatagttataatacaaaatgtgtag

SEQ ID NO: 1614 - protein, 732 aa, Arabidopsis thaliana
  peptide (1)..(732): Ceres Seq. ID no. 12377493
  misc_feature (8)..(731): NCBI GI NO: 15081596 NR Description: putative beta-galactosidase BG1 [Vitis vinifera]
  misc_feature (4)..(732): NCBI GI NO: 7682680 NR Description: beta galactosidase [Vigna radiata]
  misc_feature (8)..(732): NCBI GI NO: 3860321 NR Description: beta-galactosidase [Cicer arietinum]
  misc_feature (1)..(732): NCBI GI NO: 18419821 NR Description: glycosyl hydrolase family 35
  misc_feature (1)..(732): NCBI GI NO: 25326166 NR Description: beta-galactosidase like protein
  misc_feature (24)..(732): NCBI GI NO: 20514290 NR Description: beta-galactosidase
  misc_feature (8)..(731): NCBI GI NO: 7939625 NR Description: putative beta-galactosidase
  misc_feature (1)..(732): NCBI GI NO: 7488063 NR Description: probable beta-galactosidase (EC 3
  misc_feature (1)..(731): NCBI GI NO: 4138137 NR Description: ss-galactosidase [Lycopersicon esculentum]
  misc_feature (1)..(732): NCBI GI NO: 14970839 NR Description: beta-galactosidase [Fragaria x ananassa]
MGTTILVLSKILTFLLTTMLIGSSVIQCSSVTYDKKAIVINGHRRILLSGSIHYPRSTPEMWEDLIKKAKDGGLDVIDTYVFWNGHEPSPGTYNFEGRYDLVRFIKTIQEVGLYVHLRIGPYVCAEWNFGGFPVWLKYVDGISFRTDNGPFKSAMQGFTEKIVQMMKEHRFFASQGGPIILSQIENEFEPDLKGLGPAGHSYVNWAAKMAVGLNTGVPWVMCKEDDAPDPIINTCNGFYCDYFTPNKPYKPTMWTEAWSGWFTEFGGTVPKRPVEDLAFGVARFIQKGGSYINYYMYHGGTNFGRTAGGPFITTSYDYDAPIDEYGLVQEPKYSHLKQLHQAIKQCEAALVSSDPHVTKLGNYEEAHVFTAGKGSCVAFLTNYHMNAPAKVVFNNRHYTLPAWSISILPDCRNVVFNTATVAAKTSHVQMVPSGSILYSVARYDEDIATYGNRGTITARGLLEQVNVTRDTTDYLWYTTSVDIKASESFLRGGKWPTLTVDSAGHAVHVFVNGHFYGSAFGTRENRKFSFSSQVNLRGGANKIALLSVAVGLPNVGPHFETWATGIVGSVVLHGLDEGNKDLSWQKWTYQAGLRGESMNLVSPTEDSSVDWIKGSLAKQNKQPLTWYKAYFDAPRGNEPLALDLKSMGKGQAWINGQSIGRYWMAFAKGDCGSCNYAGTYRQNKCQSGCGEPTQRWYHVPRSWLKPKGNLLVLFEELGGDISKVSVVKRSVN

SEQ ID NO: 1615 - protein, 714 aa, Arabidopsis thaliana
  peptide (1)..(714): Ceres Seq. ID no. 12377494
  misc_feature (1)..(713): NCBI GI NO: 15081596 NR Description: putative beta-galactosidase BG1 [Vitis vinifera]
  misc_feature (1)..(714): NCBI GI NO: 7682680 NR Description: beta galactosidase [Vigna radiata]
  misc_feature (1)..(714): NCBI GI NO: 3860321 NR Description: beta-galactosidase [Cicer arietinum]
  misc_feature (1)..(714): NCBI GI NO: 18419821 NR Description: glycosyl hydrolase family 35
  misc_feature (1)..(714): NCBI GI NO: 25326166 NR Description: beta-galactosidase like protein
  misc_feature (6)..(714): NCBI GI NO: 20514290 NR Description: beta-galactosidase
  misc_feature (1)..(713): NCBI GI NO: 7939625 NR Description: putative beta-galactosidase
  misc_feature (1)..(714): NCBI GI NO: 7488063 NR Description: probable beta-galactosidase (EC 3
  misc_feature (1)..(713): NCBI GI NO: 4138137 NR Description: ss-galactosidase [Lycopersicon esculentum]
  misc_feature (1)..(714): NCBI GI NO: 14970839 NR Description: beta-galactosidase [Fragaria x ananassa]
MLIGSSVIQCSSVTYDKKAIVINGHRRILLSGSIHYPRSTPEMWEDLIKKAKDGGLDVIDTYVFWNGHEPSPGTYNFEGRYDLVRFIKTIQEVGLYVHLRIGPYVCAEWNFGGFPVWLKYVDGISFRTDNGPFKSAMQGFTEKIVQMMKEHRFFASQGGPIILSQIENEFEPDLKGLGPAGHSYVNWAAKMAVGLNTGVPWVMCKEDDAPDPIINTCNGFYCDYFTPNKPYKPTMWTEAWSGWFTEFGGTVPKRPVEDLAFGVARFIQKGGSYINYYMYHGGTNFGRTAGGPFITTSYDYDAPIDEYGLVQEPKYSHLKQLHQAIKQCEAALVSSDPHVTKLGNYEEAHVFTAGKGSCVAFLTNYHMNAPAKVVFNNRHYTLPAWSISILPDCRNVVFNTATVAAKTSHVQMVPSGSILYSVARYDEDIATYGNRGTITARGLLEQVNVTRDTTDYLWYTTSVDIKASESFLRGGKWPTLTVDSAGHAVHVFVNGHFYGSAFGTRENRKFSFSSQVNLRGGANKIALLSVAVGLPNVGPHFETWATGIVGSVVLHGLDEGNKDLSWQKWTYQAGLRGESMNLVSPTEDSSVDWIKGSLAKQNKQPLTWYKAYFDAPRGNEPLALDLKSMGKGQAWINGQSIGRYWMAFAKGDCGSCNYAGTYRQNKCQSGCGEPTQRWYHVPRSWLKPKGNLLVLFEELGGDISKVSVVKRSVN

SEQ ID NO: 1616 - protein, 672 aa, Arabidopsis thaliana
  peptide (1)..(672): Ceres Seq. ID no. 12377495
  misc_feature (1)..(671): NCBI GI NO: 15081596 NR Description: putative beta-galactosidase BG1 [Vitis vinifera]
  misc_feature (1)..(672): NCBI GI NO: 7682680 NR Description: beta galactosidase [Vigna radiata]
  misc_feature (1)..(672): NCBI GI NO: 3860321 NR Description: beta-galactosidase [Cicer arietinum]
  misc_feature (1)..(672): NCBI GI NO: 18419821 NR Description: glycosyl hydrolase family 35
  misc_feature (1)..(672): NCBI GI NO: 25326166 NR Description: beta-galactosidase like protein
  misc_feature (1)..(672): NCBI GI NO: 20514290 NR Description: beta-galactosidase
  misc_feature (1)..(671): NCBI GI NO: 7939625 NR Description: putative beta-galactosidase
  misc_feature (1)..(672): NCBI GI NO: 7488063 NR Description: probable beta-galactosidase (EC 3
  misc_feature (1)..(671): NCBI GI NO: 4138137 NR Description: ss-galactosidase [Lycopersicon esculentum]
  misc_feature (1)..(672): NCBI GI NO: 14970839 NR Description: beta-galactosidase [Fragaria x ananassa]
MWEDLIKKAKDGGLDVIDTYVFWNGHEPSPGTYNFEGRYDLVRFIKTIQEVGLYVHLRIGPYVCAEWNFGGFPVWLKYVDGISFRTDNGPFKSAMQGFTEKIVQMMKEHRFFASQGGPIILSQIENEFEPDLKGLGPAGHSYVNWAAKMAVGLNTGVPWVMCKEDDAPDPIINTCNGFYCDYFTPNKPYKPTMWTEAWSGWFTEFGGTVPKRPVEDLAFGVARFIQKGGSYINYYMYHGGTNFGRTAGGPFITTSYDYDAPIDEYGLVQEPKYSHLKQLHQAIKQCEAALVSSDPHVTKLGNYEEAHVFTAGKGSCVAFLTNYHMNAPAKVVFNNRHYTLPAWSISILPDCRNVVFNTATVAAKTSHVQMVPSGSILYSVARYDEDIATYGNRGTITARGLLEQVNVTRDTTDYLWYTTSVDIKASESFLRGGKWPTLTVDSAGHAVHVFVNGHFYGSAFGTRENRKFSFSSQVNLRGGANKIALLSVAVGLPNVGPHFETWATGIVGSVVLHGLDEGNKDLSWQKWTYQAGLRGESMNLVSPTEDSSVDWIKGSLAKQNKQPLTWYKAYFDAPRGNEPLALDLKSMGKGQAWINGQSIGRYWMAFAKGDCGSCNYAGTYRQNKCQSGCGEPTQRWYHVPRSWLKPKGNLLVLFEELGGDISKVSVVKRSVN

SEQ ID NO: 1617 - DNA, 1100 bp, Arabidopsis thaliana; identical to SEQ ID NO: 787
  misc_feature (1)..(1100): Ceres Seq. ID no. 12394844

SEQ ID NO: 1618 - protein, 341 aa, Arabidopsis thaliana; identical to SEQ ID NO: 788
  peptide (1)..(341): Ceres Seq. ID no. 12394845
  misc_feature (106)..(326): Pfam Name: Pfam Description:  alpha/beta hydrolase fold
  misc_feature (28)..(341): NCBI GI NO: 18411865 NR Description: hypothetical protein; protein id: At1g78210
  misc_feature (28)..(240): NCBI GI NO: 25406548 NR Description: hypothetical protein T11I11.15
  misc_feature (31)..(331): NCBI GI NO: 15242419 NR Description: putative hydrolase; protein id: At5g09430.1
  misc_feature (28)..(328): NCBI GI NO: 18420566 NR Description: Expressed protein; protein id: At4g39955
  misc_feature (28)..(328): NCBI GI NO: 21536873 NR Description: putative hydrolase [Arabidopsis thaliana]
  misc_feature (33)..(330): NCBI GI NO: 33146617 NR Description: hydrolase-like protein
  misc_feature (37)..(332): NCBI GI NO: 37533664 NR Description: putative hydrolase
  misc_feature (33)..(332): NCBI GI NO: 22326938 NR Description: similar to putative hydrolase
  misc_feature (47)..(328): NCBI GI NO: 18398716 NR Description: expressed protein; protein id: At2g18360
  misc_feature (48)..(243): NCBI GI NO: 27436747 NR Description: Hypothetical protein

SEQ ID NO: 1619 - protein, 314 aa, Arabidopsis thaliana; identical to SEQ ID NO: 789
  peptide (1)..(314): Ceres Seq. ID no. 12394846
  misc_feature (79)..(299): Pfam Name: Pfam Description:  alpha/beta hydrolase fold
  misc_feature (1)..(314): NCBI GI NO: 18411865 NR Description: hypothetical protein; protein id: At1g78210
  misc_feature (1)..(213): NCBI GI NO: 25406548 NR Description: hypothetical protein T11I11.15
  misc_feature (4)..(304): NCBI GI NO: 15242419 NR Description: putative hydrolase; protein id: At5g09430.1
  misc_feature (1)..(301): NCBI GI NO: 18420566 NR Description: Expressed protein; protein id: At4g39955
  misc_feature (1)..(301): NCBI GI NO: 21536873 NR Description: putative hydrolase [Arabidopsis thaliana]
  misc_feature (6)..(303): NCBI GI NO: 33146617 NR Description: hydrolase-like protein
  misc_feature (10)..(305): NCBI GI NO: 37533664 NR Description: putative hydrolase
  misc_feature (6)..(305): NCBI GI NO: 22326938 NR Description: similar to putative hydrolase
  misc_feature (20)..(301): NCBI GI NO: 18398716 NR Description: expressed protein; protein id: At2g18360
  misc_feature (21)..(216): NCBI GI NO: 27436747 NR Description: Hypothetical protein

SEQ ID NO: 1620 - protein, 206 aa, Arabidopsis thaliana; identical to SEQ ID NO: 790
  peptide (1)..(206): Ceres Seq. ID no. 12394847
  misc_feature (1)..(191): Pfam Name: Pfam Description:  alpha/beta hydrolase fold
  misc_feature (1)..(206): NCBI GI NO: 18411865 NR Description: hypothetical protein; protein id: At1g78210
  misc_feature (1)..(105): NCBI GI NO: 25406548 NR Description: hypothetical protein T11I11.15
  misc_feature (1)..(196): NCBI GI NO: 15242419 NR Description: putative hydrolase; protein id: At5g09430.1
  misc_feature (1)..(193): NCBI GI NO: 18420566 NR Description: Expressed protein; protein id: At4g39955
  misc_feature (1)..(193): NCBI GI NO: 21536873 NR Description: putative hydrolase [Arabidopsis thaliana]
  misc_feature (1)..(195): NCBI GI NO: 33146617 NR Description: hydrolase-like protein
  misc_feature (1)..(197): NCBI GI NO: 37533664 NR Description: putative hydrolase
  misc_feature (1)..(197): NCBI GI NO: 22326938 NR Description: similar to putative hydrolase
  misc_feature (1)..(193): NCBI GI NO: 18398716 NR Description: expressed protein; protein id: At2g18360
  misc_feature (1)..(108): NCBI GI NO: 27436747 NR Description: Hypothetical protein

SEQ ID NO: 1621 - DNA, 981 bp, Arabidopsis thaliana
  misc_feature (1)..(981): Ceres Seq. ID no. 12420512
agaacacaaacaaaaacacattgtaacattagtttaagcattaagcttctttatgtcgaataataataattctccgaccaccgtgaatcaagaaacgacgacgtctcgtgaagtctcaatcacattgcctactgatcaatctcctcaaacctcaccaggatcatcttcttctccttcaccgagaccttccggtggatcaccggcgagaagaacggcgactggattatccggcaagcactctattttcagggggattcgactacgtaacggaaaatgggtatcggagattagagagccacgtaaaacgacaagaatttggctcgggacttatccggtaccggagatggctgccgccgcttacgacgtggctgcgttagctttaaaaggaccaggccgttttgaattttcctggtttagctttgacttacgtggctccggtttcaaactctgctgcggatataagagcggctgctagtagagcagcggagatgaagcaaccggatcagggtggggatgagaaggtattggaaccggttcaacccggcaaagaggaagaattagaagaagtgtcgtgtaactcgtgttcgttggagtttatggatgaggaagcgatgttgaatatgccgactttgttgacggagatggctgaagggatgttgatgagtccaccgagaatgatgatacatccgacgatggaagatgattcgccggagaatcatgaaggagataatctttggagttataaatgaatccattgaagctgctctcttttttattgttttccggtcgaatgagattttccccctttttttttctttttgggtcgctgttatggaaagtcaaataggttattaatatgatctattaatatttttgaaacataatgagtttgaatttgaatttttccatttttatataaatatggtttatatgagggaaaaatagatacatatcgaagatataagaattgtttttctgctt

SEQ ID NO: 1622 - protein, 140 aa, Arabidopsis thaliana
  peptide (1)..(140): Ceres Seq. ID no. 12420513
  misc_feature (62)..(113): Pfam Name: Pfam Description:  AP2 domain
  misc_feature (1)..(113): NCBI GI NO: 15242262 NR Description: DRE binding protein; protein id: At5g52020
  misc_feature (57)..(112): NCBI GI NO: 15222031 NR Description: DRE binding protein; protein id: At1g12630.1
  misc_feature (39)..(112): NCBI GI NO: 25404394 NR Description: hypothetical protein F16M19.1
  misc_feature (39)..(112): NCBI GI NO: 8493594 NR Description: Contains similarity to transcriptional activator CBF1 fromArabidopsis thaliana gb| U77378 and
  misc_feature (54)..(112): NCBI GI NO: 15227980 NR Description: DRE binding protein; protein id: At2g36450.1
  misc_feature (27)..(112): NCBI GI NO: 1899058 NR Description: transcriptional activator CBF1
  misc_feature (27)..(112): NCBI GI NO: 18416562 NR Description: C-repeat/DRE binding factor 1
  misc_feature (61)..(114): NCBI GI NO: 37536218 NR Description: putative transcription factor
  misc_feature (37)..(112): NCBI GI NO: 40647095 NR Description: DREB-like protein 1 [Capsicum annuum]
  misc_feature (37)..(112): NCBI GI NO: 37147896 NR Description: CaCBF1B [Capsicum annuum]
MSNNNNSPTTVNQETTTSREVSITLPTDQSPQTSPGSSSSPSPRPSGGSPARRTATGLSGKHSIFRGIRLRNGKWVSEIREPRKTTRIWLGTYPVPEMAAAAYDVAALALKGPGRFEFSWFSFDLRGSGFKLCCGYKSGC

SEQ ID NO: 1623 - protein, 86 aa, Arabidopsis thaliana
  peptide (1)..(86): Ceres Seq. ID no. 12420514
  misc_feature (1)..(86): NCBI GI NO: 15242262 NR Description: DRE binding protein; protein id: At5g52020
  misc_feature (1)..(85): NCBI GI NO: 15222031 NR Description: DRE binding protein; protein id: At1g12630.1
  misc_feature (1)..(85): NCBI GI NO: 25404394 NR Description: hypothetical protein F16M19.1
  misc_feature (1)..(75): NCBI GI NO: 8493594 NR Description: Contains similarity to transcriptional activator CBF1 fromArabidopsis thaliana gb| U77378 and
  misc_feature (1)..(85): NCBI GI NO: 15227980 NR Description: DRE binding protein; protein id: At2g36450.1
  misc_feature (1)..(85): NCBI GI NO: 1899058 NR Description: transcriptional activator CBF1
  misc_feature (1)..(85): NCBI GI NO: 18416562 NR Description: C-repeat/DRE binding factor 1
  misc_feature (1)..(65): NCBI GI NO: 37536218 NR Description: putative transcription factor
  misc_feature (1)..(85): NCBI GI NO: 40647095 NR Description: DREB-like protein 1 [Capsicum annuum]
  misc_feature (1)..(85): NCBI GI NO: 37147896 NR Description: CaCBF1B [Capsicum annuum]
MKQPDQGGDEKVLEPVQPGKEEELEEVSCNSCSLEFMDEEAMLNMPTLLTEMAEGMLMSPPRMMIHPTMEDDSPENHEGDNLWSYK

SEQ ID NO: 1624 - DNA, 931 bp, Arabidopsis thaliana
  misc_feature (1)..(931): Ceres Seq. ID no. 12738907
aactgtttgatttctgaggagaatccattgtttccattcgaagaaaactctaactttctcgttgaagctttgagctctctacctctttatctccggagatgtataataacatgggacctcaaccggggatgccaagacctccaggaaaccctgagcctggtccatttggtaatcctttcactggagctggctcgggttttatccgtggtggtttgggagcgtatggggagagaattttaggatcgagctctgagtatgttcagagcaatataagccggtacttctctgatccgcaatactatttccaagtgaatgatcaatatgtgaggaataaactgaaggttgttctgtttcctttcctacaccggggacactggaccagaatatctgaaccagttggtggtaggctctcatacaagcctccaatatatgatatcaatgctccagacttgtacattccctttatggcatttggtacctacgttgttcttgctggtctttcattgggacttaatggaaagtttacaccggaagctttgaattggctgtttgtgaaaggattggttggttggtttttgcaagtaatgctcctgaaagtaacacttctatcacttggtagtggagaggcaccattactagatattgtggcatacggagggtatgcttttgctggtctgtgtcttgcgggctttgccaaaataatgtggggatactcgtactacgcgttgatgccatggacttgtctatgcactgggattttcttggtgaagacgatgaaacgtgttctgtttgctgaagtaagaagttacgattcgagcaaacatcactaccttcttctgtttttagccttggtccagttcccacttttgatatggcttggtaacattagtgttaattggcttctttgaaatgaaaaaagacgtttttgtgt

SEQ ID NO: 1625 - protein, 269 aa, Arabidopsis thaliana
  peptide (1)..(269): Ceres Seq. ID no. 12738908
  misc_feature (1)..(269): NCBI GI NO: 18397705 NR Description: expressed protein; protein id: At1g30890
  misc_feature (1)..(269): NCBI GI NO: 9755388 NR Description: F17F8.24 [Arabidopsis thaliana]
  misc_feature (1)..(268): NCBI GI NO: 30695009 NR Description: expressed protein [Arabidopsis thaliana]
  misc_feature (11)..(268): NCBI GI NO: 11282553 NR Description: hypothetical protein T16L24
  misc_feature (11)..(268): NCBI GI NO: 33589682 NR Description: At3g59500 [Arabidopsis thaliana]
  misc_feature (1)..(263): NCBI GI NO: 38346458 NR Description: OSJNBa0019G23.6
  misc_feature (142)..(263): NCBI GI NO: 10241632 NR Description: putative protein
  misc_feature (16)..(260): NCBI GI NO: 12861030 NR Description: unnamed protein product [Mus musculus]
  misc_feature (1)..(239): NCBI GI NO: 28277968 NR Description: Similar to Yip1p-interacting factor [Danio rerio]
  misc_feature (1)..(239): NCBI GI NO: 37589677 NR Description: Unknown (protein for MGC:73136) [Danio rerio]
MYNNMGPQPGMPRPPGNPEPGPFGNPFTGAGSGFIRGGLGAYGERILGSSSEYVQSNISRYFSDPQYYFQVNDQYVRNKLKVVLFPFLHRGHWTRISEPVGGRLSYKPPIYDINAPDLYIPFMAFGTYVVLAGLSLGLNGKFTPEALNWLFVKGLVGWFLQVMLLKVTLLSLGSGEAPLLDIVAYGGYAFAGLCLAGFAKIMWGYSYYALMPWTCLCTGIFLVKTMKRVLFAEVRSYDSSKHHYLLLFLALVQFPLLIWLGNISVNWLL

SEQ ID NO: 1626 - protein, 265 aa, Arabidopsis thaliana
  peptide (1)..(265): Ceres Seq. ID no. 12738909
  misc_feature (1)..(265): NCBI GI NO: 18397705 NR Description: expressed protein; protein id: At1g30890
  misc_feature (1)..(265): NCBI GI NO: 9755388 NR Description: F17F8.24 [Arabidopsis thaliana]
  misc_feature (1)..(264): NCBI GI NO: 30695009 NR Description: expressed protein [Arabidopsis thaliana]
  misc_feature (7)..(264): NCBI GI NO: 11282553 NR Description: hypothetical protein T16L24
  misc_feature (7)..(264): NCBI GI NO: 33589682 NR Description: At3g59500 [Arabidopsis thaliana]
  misc_feature (1)..(259): NCBI GI NO: 38346458 NR Description: OSJNBa0019G23.6
  misc_feature (138)..(259): NCBI GI NO: 10241632 NR Description: putative protein
  misc_feature (12)..(256): NCBI GI NO: 12861030 NR Description: unnamed protein product [Mus musculus]
  misc_feature (1)..(235): NCBI GI NO: 28277968 NR Description: Similar to Yip1p-interacting factor [Danio rerio]
  misc_feature (1)..(235): NCBI GI NO: 37589677 NR Description: Unknown (protein for MGC:73136) [Danio rerio]
MGPQPGMPRPPGNPEPGPFGNPFTGAGSGFIRGGLGAYGERILGSSSEYVQSNISRYFSDPQYYFQVNDQYVRNKLKVVLFPFLHRGHWTRISEPVGGRLSYKPPIYDINAPDLYIPFMAFGTYVVLAGLSLGLNGKFTPEALNWLFVKGLVGWFLQVMLLKVTLLSLGSGEAPLLDIVAYGGYAFAGLCLAGFAKIMWGYSYYALMPWTCLCTGIFLVKTMKRVLFAEVRSYDSSKHHYLLLFLALVQFPLLIWLGNISVNWLL

SEQ ID NO: 1627 - protein, 259 aa, Arabidopsis thaliana
  peptide (1)..(259): Ceres Seq. ID no. 12738910
  misc_feature (1)..(259): NCBI GI NO: 18397705 NR Description: expressed protein; protein id: At1g30890
  misc_feature (1)..(259): NCBI GI NO: 9755388 NR Description: F17F8.24 [Arabidopsis thaliana]
  misc_feature (1)..(258): NCBI GI NO: 30695009 NR Description: expressed protein [Arabidopsis thaliana]
  misc_feature (1)..(258): NCBI GI NO: 11282553 NR Description: hypothetical protein T16L24
  misc_feature (1)..(258): NCBI GI NO: 33589682 NR Description: At3g59500 [Arabidopsis thaliana]
  misc_feature (1)..(253): NCBI GI NO: 38346458 NR Description: OSJNBa0019G23.6
  misc_feature (132)..(253): NCBI GI NO: 10241632 NR Description: putative protein
  misc_feature (6)..(250): NCBI GI NO: 12861030 NR Description: unnamed protein product [Mus musculus]
  misc_feature (1)..(229): NCBI GI NO: 28277968 NR Description: Similar to Yip1p-interacting factor [Danio rerio]
  misc_feature (1)..(229): NCBI GI NO: 37589677 NR Description: Unknown (protein for MGC:73136) [Danio rerio]
MPRPPGNPEPGPFGNPFTGAGSGFIRGGLGAYGERILGSSSEYVQSNISRYFSDPQYYFQVNDQYVRNKLKVVLFPFLHRGHWTRISEPVGGRLSYKPPIYDINAPDLYIPFMAFGTYVVLAGLSLGLNGKFTPEALNWLFVKGLVGWFLQVMLLKVTLLSLGSGEAPLLDIVAYGGYAFAGLCLAGFAKIMWGYSYYALMPWTCLCTGIFLVKTMKRVLFAEVRSYDSSKHHYLLLFLALVQFPLLIWLGNISVNWLL

SEQ ID NO: 1628 - DNA, 709 bp, Arabidopsis thaliana
  misc_feature (1)..(709): Ceres Seq. ID no. 12560056
tatcgaaaatctaatttcgtcctgcgtcgaccttgtgagctacttcagtttccggccatcacgcagctccagttgtatgttttgtgggttatacaaagatgacaacaatcgaaaccggtcagaaaactcaaaagtcttctccttccggttctgctactaccgctactggtacactcaagcagtcatcagcatcgtttaaaaggtggggaaggagacacccgtttgtaagatatggacttccgatgatatctctcactgtatttggagccctaggactcggccaactacttcaaggcagtaaggatattgcaaaggtaaaagatgaccaagaatgggagattatagaaacaagaaaggcactttcgagaacaggacctgtcgatgcctataaacctaaaaacacatccattgaagatgagctcaaggctatgcaagagaaggtggacataaacacgtacgagtacaagaaaattccaaagctaaacgaaagcaagtcgagttaagaagagtctttgtataagattagtctttctagatgtgtttcaagttttaaatgactcttcagttcacataatcgcccaagtacaaattccagtaagttctggctgggcttcctaaaaccaagaacaacgagggacttgccaattgttgataatacatgttgtcgtgttgatttacgacgtccaaatagatctgaaagaggctttat

SEQ ID NO: 1629 - protein, 134 aa, Arabidopsis thaliana
  peptide (1)..(134): Ceres Seq. ID no. 12560057
  misc_feature (1)..(134): NCBI GI NO: 22328612 NR Description: similar to kinesin like protein {Arabidopsis
  misc_feature (1)..(134): NCBI GI NO: 7428718 NR Description: probable kinesin - Arabidopsis thaliana
  misc_feature (1)..(67): NCBI GI NO: 26453208 NR Description: putative kinesin [Arabidopsis thaliana]
MTTIETGQKTQKSSPSGSATTATGTLKQSSASFKRWGRRHPFVRYGLPMISLTVFGALGLGQLLQGSKDIAKVKDDQEWEIIETRKALSRTGPVDAYKPKNTSIEDELKAMQEKVDINTYEYKKIPKLNESKSS

SEQ ID NO: 1630 - protein, 86 aa, Arabidopsis thaliana
  peptide (1)..(86): Ceres Seq. ID no. 12560058
  misc_feature (1)..(86): NCBI GI NO: 22328612 NR Description: similar to kinesin like protein {Arabidopsis
  misc_feature (1)..(86): NCBI GI NO: 7428718 NR Description: probable kinesin - Arabidopsis thaliana
  misc_feature (1)..(19): NCBI GI NO: 26453208 NR Description: putative kinesin [Arabidopsis thaliana]
MISLTVFGALGLGQLLQGSKDIAKVKDDQEWEIIETRKALSRTGPVDAYKPKNTSIEDELKAMQEKVDINTYEYKKIPKLNESKSS

SEQ ID NO: 1631 - DNA, 1248 bp, Arabidopsis thaliana
  misc_feature (1)..(1248): Ceres Seq. ID no. 12558635
atcgttgatttgtcaactcaacaacgcccaaaccctaaaacaatccccaatcatcgtttcaataatcaaatttccccaattgaagaataaagatcaaaactttggaagttttcctgtgaaaataatctatcctttttgcatcatttgcgttttggttgatgaagaggatctgaagaagctgagatttaggaatgatgatgggttttgctgtatcggatgaattgttgggtactgttgctccgattgtggtgtactggttgtattctgggatttatgtagcgctctcctctttagagagttatagattgcattcaaaggttgaagaagaagagaagaatcttgtatcgaaatcttctgttgtgaaaggtgttcttgttcaacaggttgttcaagctgttgtcgctatccttttgttcacggtgacgggaagtgatgccgaagcagacaaagcgcaacagttttccttcttggtcctagcaagacagtttgtgactgccatgatagtcctcgacacatggcaatacttcatgcatcgatatatgcatcagaacaagttcttatacaaacatatccactctcaacaccaccgtcttatcgtcccttatgcatatggagctttatacaaccatccagtggaaggtcttctcttggatacaattggaggcgccttatctttcctagtctctggtatgtctccaagaacttccatcttcttcttctctttcgccacgatcaaaaccgtggacgaccattgcggtctctggctacctggaaacttattccatatggtcttcaagaacaactcggcttaccacgatatccatcatcagctctatggaaccaaatacaatttctctcagcctttctttgtcatgtgggatcggattcttggaacttacatgccttactcgcttgagaaaagagaagatggaggattcgaagctcgcccgactaaagaattcaaagacgattaagattttggagtttggatatatgttatgtatctgccctgaggttggagaaatggatgatactttgtgttattggaggtgtagttttaaaatcagaaacagaactggtttttttgcgttttgcgtttcttctcaagagcgaatttagcttggagtttgagatttgtatataaacattattgagttgttgttctactttcggtttttgttttgcatgtaatattactacaacaaacatgttttttttataatctatccatctacgaggccattcttg

SEQ ID NO: 1632 - protein, 260 aa, Arabidopsis thaliana
  peptide (1)..(260): Ceres Seq. ID no. 12558636
  misc_feature (1)..(260): NCBI GI NO: 22330531 NR Description: acid phosphatase, putative; protein id: At1g69640
  misc_feature (3)..(260): NCBI GI NO: 25404823 NR Description: probable sterol desaturase T6C23.16
  misc_feature (2)..(260): NCBI GI NO: 18394095 NR Description: acid phosphatase, putative; protein id: At1g14290
  misc_feature (3)..(260): NCBI GI NO: 25511716 NR Description: F14L17.5 protein - Arabidopsis thaliana
  misc_feature (12)..(256): NCBI GI NO: 34913184 NR Description: similar to acid phosphatase
  misc_feature (82)..(253): NCBI GI NO: 34911990 NR Description: P0694A04.28
  misc_feature (3)..(78): NCBI GI NO: 34911990 NR Description: P0694A04.28
  misc_feature (35)..(199): NCBI GI NO: 5360721 NR Description: acid phosphatase [Lupinus albus]
  misc_feature (90)..(256): NCBI GI NO: 19113281 NR Description: hypothetical integral membrane protein
  misc_feature (15)..(89): NCBI GI NO: 19113281 NR Description: hypothetical integral membrane protein
MMMGFAVSDELLGTVAPIVVYWLYSGIYVALSSLESYRLHSKVEEEEKNLVSKSSVVKGVLVQQVVQAVVAILLFTVTGSDAEADKAQQFSFLVLARQFVTAMIVLDTWQYFMHRYMHQNKFLYKHIHSQHHRLIVPYAYGALYNHPVEGLLLDTIGGALSFLVSGMSPRTSIFFFSFATIKTVDDHCGLWLPGNLFHMVFKNNSAYHDIHHQLYGTKYNFSQPFFVMWDRILGTYMPYSLEKREDGGFEARPTKEFKDD

SEQ ID NO: 1633 - protein, 259 aa, Arabidopsis thaliana
  peptide (1)..(259): Ceres Seq. ID no. 12558637
  misc_feature (1)..(259): NCBI GI NO: 22330531 NR Description: acid phosphatase, putative; protein id: At1g69640
  misc_feature (2)..(259): NCBI GI NO: 25404823 NR Description: probable sterol desaturase T6C23.16
  misc_feature (1)..(259): NCBI GI NO: 18394095 NR Description: acid phosphatase, putative; protein id: At1g14290
  misc_feature (2)..(259): NCBI GI NO: 25511716 NR Description: F14L17.5 protein - Arabidopsis thaliana
  misc_feature (11)..(255): NCBI GI NO: 34913184 NR Description: similar to acid phosphatase
  misc_feature (81)..(252): NCBI GI NO: 34911990 NR Description: P0694A04.28
  misc_feature (2)..(77): NCBI GI NO: 34911990 NR Description: P0694A04.28
  misc_feature (34)..(198): NCBI GI NO: 5360721 NR Description: acid phosphatase [Lupinus albus]
  misc_feature (89)..(255): NCBI GI NO: 19113281 NR Description: hypothetical integral membrane protein
  misc_feature (14)..(88): NCBI GI NO: 19113281 NR Description: hypothetical integral membrane protein
MMGFAVSDELLGTVAPIVVYWLYSGIYVALSSLESYRLHSKVEEEEKNLVSKSSVVKGVLVQQVVQAVVAILLFTVTGSDAEADKAQQFSFLVLARQFVTAMIVLDTWQYFMHRYMHQNKFLYKHIHSQHHRLIVPYAYGALYNHPVEGLLLDTIGGALSFLVSGMSPRTSIFFFSFATIKTVDDHCGLWLPGNLFHMVFKNNSAYHDIHHQLYGTKYNFSQPFFVMWDRILGTYMPYSLEKREDGGFEARPTKEFKDD

SEQ ID NO: 1634 - protein, 258 aa, Arabidopsis thaliana
  peptide (1)..(258): Ceres Seq. ID no. 12558638
  misc_feature (1)..(258): NCBI GI NO: 22330531 NR Description: acid phosphatase, putative; protein id: At1g69640
  misc_feature (1)..(258): NCBI GI NO: 25404823 NR Description: probable sterol desaturase T6C23.16
  misc_feature (1)..(258): NCBI GI NO: 18394095 NR Description: acid phosphatase, putative; protein id: At1g14290
  misc_feature (1)..(258): NCBI GI NO: 25511716 NR Description: F14L17.5 protein - Arabidopsis thaliana
  misc_feature (10)..(254): NCBI GI NO: 34913184 NR Description: similar to acid phosphatase
  misc_feature (80)..(251): NCBI GI NO: 34911990 NR Description: P0694A04.28
  misc_feature (1)..(76): NCBI GI NO: 34911990 NR Description: P0694A04.28
  misc_feature (33)..(197): NCBI GI NO: 5360721 NR Description: acid phosphatase [Lupinus albus]
  misc_feature (88)..(254): NCBI GI NO: 19113281 NR Description: hypothetical integral membrane protein
  misc_feature (13)..(87): NCBI GI NO: 19113281 NR Description: hypothetical integral membrane protein
MGFAVSDELLGTVAPIVVYWLYSGIYVALSSLESYRLHSKVEEEEKNLVSKSSVVKGVLVQQVVQAVVAILLFTVTGSDAEADKAQQFSFLVLARQFVTAMIVLDTWQYFMHRYMHQNKFLYKHIHSQHHRLIVPYAYGALYNHPVEGLLLDTIGGALSFLVSGMSPRTSIFFFSFATIKTVDDHCGLWLPGNLFHMVFKNNSAYHDIHHQLYGTKYNFSQPFFVMWDRILGTYMPYSLEKREDGGFEARPTKEFKDD

SEQ ID NO: 1635 - DNA, 1725 bp, Arabidopsis thaliana
  misc_feature (1)..(1725): Ceres Seq. ID no. 12385100
aattttctctcactaaatcagaaatgccgccgtcgttaccgtctctgcaactccgacggcttctcctccgtagcttcatttcctcctcctccgtcaatactcttcaatctcagccccgtatcatttcttccaagccgttgttttctcctcttcccccttcccgttcctctatattctcaacatttccttctagattcttctcatctgaaacgaatgcggaatcggaatctttggattcgaatgagatcgctctctctttctcgaaggagctcaccgggaatccagacgccgagtctcaaaccatttcgcagagattcaatctcagcttctcccacatcacgcctaatcccgatttgattctccaaactcttaatctctcaccggaagctggtcgcgcggctctaggttttaacgagtggttagattcgaactctaacttctctcacaccgatgaaacagtttcgtttttcgtcgattactttggccgcacggaaagatttcaaaggaatgctagggatcatctcgaaatacaaaggtatcgccggaggtaaaacactagaatcggcgattgataggcttgttagagctggtagacctaagcaggtcactgatttcttcgagaaaatggagaatgattatggtttgaaacgtgataaagaatcacttaccttggttgtgaagaagctttgtgagaaaggacacgcgagtatcgcagagaagatggtgaagaacactgctaatgaaatatttcctgatgagaatatatgtgatttgttgattagtggatggtgtatttgctgagaaactcgatgaagcaacctaggttagctggtgaaatgtctagaggaggatttgagataggaaccaaagcgtataacatgatgcttgattgtgtttgtaagctttgtaggaagaaagatccttttaagcttcaacctgaagtagagaaggttttgctggagatggagtttcgtggtgtacctagaaacacagagactttcaatgtgttgattaacaatctttgtaaaatcaggagaactgaagaagcaatgacattgtttggtaggatgggtgaatggggttgtcaaccagatgctgagacttatcttgttctgattaggagtttgtatcaagcagcgaggatcggtgaaggggacgaaatgatcgataagatgaaatcagcgggatatggtgagcttttgaataagaaagagtattacgggtttctcaagatattgtgtgggattgagaggcttgagcatgcgatgagtgtgtttaagagcatgaaagctaatggatgcaaacctgggatcaagacttatgatttgttgatggggaaaatgtgtgcgaataaccagctgactagagctaatggtttgtataaagaagcggctaagaaaggaatcgctgttagccctaaggaatacagagtagatccacggtttatgaaaaagaagaccaaggaagtggatagcaatgttaagaagagggagactttgcctgagaaaaccgcgaggaagaagaaacggctcaagcagatcaatatgagttttgttaagaaaccgcacaataagatgagacggagaatgtgatgctgatgaatcttcaacatctgatagaattttctaaagattattgtctttgttctttcctttttaagatattgtcaagagtactcatcattttgcttgatcatgagcaaattgtcccaataatcttttgttc

SEQ ID NO: 1636 - protein, 268 aa, Arabidopsis thaliana
  peptide (1)..(268): Ceres Seq. ID no. 12385101
  misc_feature (70)..(104): Pfam Name: Pfam Description:  PPR repeat
  misc_feature (13)..(268): NCBI GI NO: 21554346 NR Description: unknown [Arabidopsis thaliana]
  misc_feature (13)..(268): NCBI GI NO: 15239488 NR Description: putative protein; protein id: At5g60960
  misc_feature (13)..(266): NCBI GI NO: 34394565 NR Description: unknown protein
  misc_feature (1)..(265): NCBI GI NO: 15240232 NR Description: putative protein; protein id: At5g61370
  misc_feature (1)..(265): NCBI GI NO: 21593376 NR Description: unknown [Arabidopsis thaliana]
  misc_feature (1)..(232): NCBI GI NO: 37534458 NR Description: putative endopeptidase
  misc_feature (4)..(243): NCBI GI NO: 15231863 NR Description: putative protein; protein id: At3g53700
  misc_feature (17)..(191): NCBI GI NO: 21686921 NR Description: putative reverse transcriptase
  misc_feature (17)..(205): NCBI GI NO: 18396782 NR Description: expressed protein; protein id: At3g04130
  misc_feature (17)..(205): NCBI GI NO: 6721172 NR Description: hypothetical protein [Arabidopsis thaliana]
MVYLLRNSMKQPRLAGEMSRGGFEIGTKAYNMMLDCVCKLCRKKDPFKLQPEVEKVLLEMEFRGVPRNTETFNVLINNLCKIRRTEEAMTLFGRMGEWGCQPDAETYLVLIRSLYQAARIGEGDEMIDKMKSAGYGELLNKKEYYGFLKILCGIERLEHAMSVFKSMKANGCKPGIKTYDLLMGKMCANNQLTRANGLYKEAAKKGIAVSPKEYRVDPRFMKKKTKEVDSNVKKRETLPEKTARKKKRLKQINMSFVKKPHNKMRRRM

SEQ ID NO: 1637 - protein, 260 aa, Arabidopsis thaliana
  peptide (1)..(260): Ceres Seq. ID no. 12385102
  misc_feature (62)..(96): Pfam Name: Pfam Description:  PPR repeat
  misc_feature (5)..(260): NCBI GI NO: 21554346 NR Description: unknown [Arabidopsis thaliana]
  misc_feature (5)..(260): NCBI GI NO: 15239488 NR Description: putative protein; protein id: At5g60960
  misc_feature (5)..(258): NCBI GI NO: 34394565 NR Description: unknown protein
  misc_feature (1)..(257): NCBI GI NO: 15240232 NR Description: putative protein; protein id: At5g61370
  misc_feature (1)..(257): NCBI GI NO: 21593376 NR Description: unknown [Arabidopsis thaliana]
  misc_feature (1)..(224): NCBI GI NO: 37534458 NR Description: putative endopeptidase
  misc_feature (1)..(235): NCBI GI NO: 15231863 NR Description: putative protein; protein id: At3g53700
  misc_feature (9)..(183): NCBI GI NO: 21686921 NR Description: putative reverse transcriptase
  misc_feature (9)..(197): NCBI GI NO: 18396782 NR Description: expressed protein; protein id: At3g04130
  misc_feature (9)..(197): NCBI GI NO: 6721172 NR Description: hypothetical protein [Arabidopsis thaliana]
MKQPRLAGEMSRGGFEIGTKAYNMMLDCVCKLCRKKDPFKLQPEVEKVLLEMEFRGVPRNTETFNVLINNLCKIRRTEEAMTLFGRMGEWGCQPDAETYLVLIRSLYQAARIGEGDEMIDKMKSAGYGELLNKKEYYGFLKILCGIERLEHAMSVFKSMKANGCKPGIKTYDLLMGKMCANNQLTRANGLYKEAAKKGIAVSPKEYRVDPRFMKKKTKEVDSNVKKRETLPEKTARKKKRLKQINMSFVKKPHNKMRRRM

SEQ ID NO: 1638 - protein, 251 aa, Arabidopsis thaliana
  peptide (1)..(251): Ceres Seq. ID no. 12385103
  misc_feature (53)..(87): Pfam Name: Pfam Description:  PPR repeat
  misc_feature (1)..(251): NCBI GI NO: 21554346 NR Description: unknown [Arabidopsis thaliana]
  misc_feature (1)..(251): NCBI GI NO: 15239488 NR Description: putative protein; protein id: At5g60960
  misc_feature (1)..(249): NCBI GI NO: 34394565 NR Description: unknown protein
  misc_feature (1)..(248): NCBI GI NO: 15240232 NR Description: putative protein; protein id: At5g61370
  misc_feature (1)..(248): NCBI GI NO: 21593376 NR Description: unknown [Arabidopsis thaliana]
  misc_feature (1)..(215): NCBI GI NO: 37534458 NR Description: putative endopeptidase
  misc_feature (1)..(226): NCBI GI NO: 15231863 NR Description: putative protein; protein id: At3g53700
  misc_feature (1)..(174): NCBI GI NO: 21686921 NR Description: putative reverse transcriptase
  misc_feature (1)..(188): NCBI GI NO: 18396782 NR Description: expressed protein; protein id: At3g04130
  misc_feature (1)..(188): NCBI GI NO: 6721172 NR Description: hypothetical protein [Arabidopsis thaliana]
MSRGGFEIGTKAYNMMLDCVCKLCRKKDPFKLQPEVEKVLLEMEFRGVPRNTETFNVLINNLCKIRRTEEAMTLFGRMGEWGCQPDAETYLVLIRSLYQAARIGEGDEMIDKMKSAGYGELLNKKEYYGFLKILCGIERLEHAMSVFKSMKANGCKPGIKTYDLLMGKMCANNQLTRANGLYKEAAKKGIAVSPKEYRVDPRFMKKKTKEVDSNVKKRETLPEKTARKKKRLKQINMSFVKKPHNKMRRRM

SEQ ID NO: 1639 - DNA, 689 bp, Arabidopsis thaliana
  misc_feature (1)..(689): Ceres Seq. ID no. 12603376
atatataaaccctaatcacatttcgcaaccaccaaagcggaggaaaaatgccggctggacatggagttcgagcgagaacgagggatctgttcgcgaggcctttcaggaagaagggttacattcctctatcgacttacctgaggaccttcaaggtcggcgattacgtcgatgtgaaggtgaatggtgcgatccacaagggtatgcctcacaagttctaccatggtcgtactggtcgtatctggaacgtcaccaagcgcgccgtcggtgttgaagtcaacaaacagattgggaacaggatcataaggaagaggattcatgttcgtgtggagcatgtgcagcagtcaagatgtgccgaggagttcaagctgaggaagaagaaaaacgatgagctcaaggctgcagccaaagccaatggtgagaccatcagcaccaagagacagcctaaaggacccaaaccaggattcatggtcgaaggaatgaccttggagactgtcactccaatcccctacgatgtcgtcaacgatctcaaaggaggctattagttctatcttcttgtgctttagaactctttttcatatgttttgtagcagacttaaaactaagaattatgatttactatataacaggagtttgcaatccagattttgtaaggatggtttatttttattattggtatttttgatcttcct

SEQ ID NO: 1640 - protein, 164 aa, Arabidopsis thaliana
  peptide (1)..(164): Ceres Seq. ID no. 12603377
  misc_feature (2)..(100): Pfam Name: Pfam Description:  Ribosomal protein L21e
  misc_feature (1)..(164): NCBI GI NO: 18391042 NR Description: putative 60S ribosomal protein L21
  misc_feature (1)..(164): NCBI GI NO: 18406015 NR Description: 60S ribosomal protein L21, putative
  misc_feature (1)..(164): NCBI GI NO: 37535194 NR Description: 60S ribosomal protein L21
  misc_feature (1)..(164): NCBI GI NO: 11276828 NR Description: ribosomal protein L21 [imported] - rice
  misc_feature (1)..(164): NCBI GI NO: 32400808 NR Description: 60s ribosomal protein L21 [Triticum aestivum]
  misc_feature (1)..(157): NCBI GI NO: 15213768 NR Description: ribosomal protein L21 [Spodoptera frugiperda]
  misc_feature (1)..(155): NCBI GI NO: 6094029 NR Description: 60S RIBOSOMAL PROTEIN L21
  misc_feature (1)..(155): NCBI GI NO: 40741182 NR Description: hypothetical protein AN4802.2
  misc_feature (1)..(155): NCBI GI NO: 6319668 NR Description: Homology to rat L21; Rpl21ap
  misc_feature (1)..(157): NCBI GI NO: 20129705 NR Description: CG12775-PA [Drosophila melanogaster]
MPAGHGVRARTRDLFARPFRKKGYIPLSTYLRTFKVGDYVDVKVNGAIHKGMPHKFYHGRTGRIWNVTKRAVGVEVNKQIGNRIIRKRIHVRVEHVQQSRCAEEFKLRKKKNDELKAAAKANGETISTKRQPKGPKPGFMVEGMTLETVTPIPYDVVNDLKGGY

SEQ ID NO: 1641 - protein, 113 aa, Arabidopsis thaliana
  peptide (1)..(113): Ceres Seq. ID no. 12603378
  misc_feature (1)..(113): NCBI GI NO: 18391042 NR Description: putative 60S ribosomal protein L21
  misc_feature (1)..(113): NCBI GI NO: 18406015 NR Description: 60S ribosomal protein L21, putative
  misc_feature (1)..(113): NCBI GI NO: 37535194 NR Description: 60S ribosomal protein L21
  misc_feature (1)..(113): NCBI GI NO: 11276828 NR Description: ribosomal protein L21 [imported] - rice
  misc_feature (1)..(113): NCBI GI NO: 32400808 NR Description: 60s ribosomal protein L21 [Triticum aestivum]
  misc_feature (1)..(106): NCBI GI NO: 15213768 NR Description: ribosomal protein L21 [Spodoptera frugiperda]
  misc_feature (1)..(104): NCBI GI NO: 6094029 NR Description: 60S RIBOSOMAL PROTEIN L21
  misc_feature (1)..(104): NCBI GI NO: 40741182 NR Description: hypothetical protein AN4802.2
  misc_feature (1)..(104): NCBI GI NO: 6319668 NR Description: Homology to rat L21; Rpl21ap
  misc_feature (1)..(106): NCBI GI NO: 20129705 NR Description: CG12775-PA [Drosophila melanogaster]
MPHKFYHGRTGRIWNVTKRAVGVEVNKQIGNRIIRKRIHVRVEHVQQSRCAEEFKLRKKKNDELKAAAKANGETISTKRQPKGPKPGFMVEGMTLETVTPIPYDVVNDLKGGY

SEQ ID NO: 1642 - protein, 89 aa, Arabidopsis thaliana
  peptide (1)..(89): Ceres Seq. ID no. 12603379
YINPNHISQPPKRRKNAGWTWSSSENEGSVREAFQEEGLHSSIDLPEDLQGRRLRRCEGEWCDPQGYASQVLPWSYWSYLERHQARRRC

SEQ ID NO: 1643 - DNA, 477 bp, Arabidopsis thaliana
  misc_feature (1)..(477): Ceres Seq. ID no. 13593342
aaaaacaattcagattccaattttctcaaactctaaaatcaatctctcaaatctctcaaccgtgatcaagatgcagatcttcgttaagactctcaccggaaagactatcaccctcgaggtggaaagctctgacaccatcgacaacgttaaggccaagatccaggataaggaaggcattcctccggaccagcagcgtctcatcttcgctggaaagcagcttgaggatggacgtactttggccgactacaacatccagaaggagtctactcttcacttggtcctccgtctccgtggtggtttctaaaccttgtctctctctcttatggttactgaaccaagttcatgtatcgtttcatctagtactttggtggtttatgttttggggccatgtacagcctctgataaataattgatcgactatgtttccgtttctttcatctctcttttctttcaaacaacaaatcgaacttattctcc

SEQ ID NO: 1644 - protein, 100 aa, Arabidopsis thaliana
  peptide (1)..(100): Ceres Seq. ID no. 13593343
  misc_feature (24)..(97): Pfam Name: Pfam Description:  Ubiquitin family
  misc_feature (24)..(100): NCBI GI NO: 6671282 NR Description: recombinant ubiquitin-somatotropin fusion protein
  misc_feature (24)..(100): NCBI GI NO: 70644 NR Description: ubiquitin precursor - common sunflower (fragment)
  misc_feature (24)..(100): NCBI GI NO: 70645 NR Description: polyubiquitin 5 - garden pea
  misc_feature (24)..(100): NCBI GI NO: 170352 NR Description: hexameric polyubiquitin
  misc_feature (24)..(100): NCBI GI NO: 7488781 NR Description: polyubiquitin 4.4 - kidney bean
  misc_feature (24)..(100): NCBI GI NO: 18412077 NR Description: polyubiquitin (UBQ14) [Arabidopsis thaliana]
  misc_feature (24)..(100): NCBI GI NO: 33327286 NR Description: polyubiquitin 2 [Phaseolus vulgaris]
  misc_feature (24)..(100): NCBI GI NO: 15982787 NR Description: AT4g05320/C17L7_240 [Arabidopsis thaliana]
  misc_feature (24)..(100): NCBI GI NO: 1800281 NR Description: polyubiquitin [Fragaria x ananassa]
  misc_feature (24)..(100): NCBI GI NO: 6118549 NR Description: ubiquitin precursor [Hevea brasiliensis]
KTIQIPIFSNSKINLSNLSTVIKMQIFVKTLTGKTITLEVESSDTIDNVKAKIQDKEGIPPDQQRLIFAGKQLEDGRTLADYNIQKESTLHLVLRLRGGF

SEQ ID NO: 1645 - protein, 77 aa, Arabidopsis thaliana
  peptide (1)..(77): Ceres Seq. ID no. 13593344
  misc_feature (1)..(74): Pfam Name: Pfam Description:  Ubiquitin family
  misc_feature (1)..(77): NCBI GI NO: 6671282 NR Description: recombinant ubiquitin-somatotropin fusion protein
  misc_feature (1)..(77): NCBI GI NO: 70644 NR Description: ubiquitin precursor - common sunflower (fragment)
  misc_feature (1)..(77): NCBI GI NO: 33327286 NR Description: polyubiquitin 2 [Phaseolus vulgaris]
  misc_feature (1)..(77): NCBI GI NO: 18412077 NR Description: polyubiquitin (UBQ14) [Arabidopsis thaliana]
  misc_feature (1)..(77): NCBI GI NO: 15982787 NR Description: AT4g05320/C17L7_240 [Arabidopsis thaliana]
  misc_feature (1)..(77): NCBI GI NO: 7488781 NR Description: polyubiquitin 4.4 - kidney bean
  misc_feature (1)..(77): NCBI GI NO: 6118549 NR Description: ubiquitin precursor [Hevea brasiliensis]
  misc_feature (1)..(77): NCBI GI NO: 1800281 NR Description: polyubiquitin [Fragaria x ananassa]
  misc_feature (1)..(77): NCBI GI NO: 170354 NR Description: pentameric polyubiquitin
  misc_feature (1)..(77): NCBI GI NO: 170352 NR Description: hexameric polyubiquitin
MQIFVKTLTGKTITLEVESSDTIDNVKAKIQDKEGIPPDQQRLIFAGKQLEDGRTLADYNIQKESTLHLVLRLRGGF

SEQ ID NO: 1646 - protein, 62 aa, Arabidopsis thaliana
  peptide (1)..(62): Ceres Seq. ID no. 13593345
MDVLWPTTTSRRSLLFTWSSVSVVVSKPCLSLLWLLNQVHVSFHLVLWWFMFWGHVQPLINN

SEQ ID NO: 1647 - DNA, 672 bp, Arabidopsis thaliana
  misc_feature (1)..(672): Ceres Seq. ID no. 12330428
ctgaacgaagctctctctctgattggccggatctgccggagagaaaaatgacgacgagtattcacatcacagctctcgacggaatcgtcaacgtgaactcactcttcacactcgccgtattcatcggattagcttggaaccctaccgatccagacaacagcctcgtaaccgaccctaattgcgtccccacagctcgtatggctgagaatctcgtcgccttccatgtgtactctttcgcatcattcctattctcaagtctcatcgctctaggtctcaaacaagcaatgaggctcaacatagcttcttcgtttcacatctctactcgaatcgatcctgtggtttactatgtgaacaagacggctcttagatttgggatggttacatccggtttgggatcggtttgtggatgtgggtttctcatgttggctttgattaatgttgttcagatcaagcttgggactttgggctgtggtgctagtggtcatacttatgcagctgttgtgccgcttgtgattctggttccttctgcacttttcatctatgtttctcttatgttatatgcttttactcgttagagacatggtttttgattccatggttgatgcaattagggttatgtttgtatgatgatgatatgatggaaatgagaatgattctatgtttgatatggtt

SEQ ID NO: 1648 - protein, 190 aa, Arabidopsis thaliana
  peptide (1)..(190): Ceres Seq. ID no. 12330429
  misc_feature (16)..(190): NCBI GI NO: 15239293 NR Description: putative protein; protein id: At5g05950
  misc_feature (18)..(190): NCBI GI NO: 34395171 NR Description: unknown protein
  misc_feature (18)..(190): NCBI GI NO: 34900646 NR Description: hypothetical protein~similar to Arabidopsis thalianachromosome5
  misc_feature (17)..(188): NCBI GI NO: 15232676 NR Description: putative protein; protein id: At3g46890.1
  misc_feature (17)..(188): NCBI GI NO: 6041846 NR Description: unknown protein [Arabidopsis thaliana]
  misc_feature (17)..(188): NCBI GI NO: 18397969 NR Description: expressed protein; protein id: At3g07510
  misc_feature (17)..(189): NCBI GI NO: 37531676 NR Description: hypothetical protein
  misc_feature (17)..(190): NCBI GI NO: 15226312 NR Description: hypothetical protein; protein id: At2g01580.1
  misc_feature (14)..(104): NCBI GI NO: 38345578 NR Description: OSJNBa0027H06.14
  misc_feature (147)..(189): NCBI GI NO: 34912580 NR Description: P0046B10.5
ERSSLSDWPDLPERKMTTSIHITALDGIVNVNSLFTLAVFIGLAWNPTDPDNSLVTDPNCVPTARMAENLVAFHVYSFASFLFSSLIALGLKQAMRLNIASSFHISTRIDPVVYYVNKTALRFGMVTSGLGSVCGCGFLMLALINVVQIKLGTLGCGASGHTYAAVVPLVILVPSALFIYVSLMLYAFTR

SEQ ID NO: 1649 - protein, 175 aa, Arabidopsis thaliana
  peptide (1)..(175): Ceres Seq. ID no. 12330430
  misc_feature (1)..(175): NCBI GI NO: 15239293 NR Description: putative protein; protein id: At5g05950
  misc_feature (3)..(175): NCBI GI NO: 34395171 NR Description: unknown protein
  misc_feature (3)..(175): NCBI GI NO: 34900646 NR Description: hypothetical protein~similar to Arabidopsis thalianachromosome5
  misc_feature (2)..(173): NCBI GI NO: 15232676 NR Description: putative protein; protein id: At3g46890.1
  misc_feature (2)..(173): NCBI GI NO: 6041846 NR Description: unknown protein [Arabidopsis thaliana]
  misc_feature (2)..(173): NCBI GI NO: 18397969 NR Description: expressed protein; protein id: At3g07510
  misc_feature (2)..(174): NCBI GI NO: 37531676 NR Description: hypothetical protein
  misc_feature (2)..(175): NCBI GI NO: 15226312 NR Description: hypothetical protein; protein id: At2g01580.1
  misc_feature (1)..(89): NCBI GI NO: 38345578 NR Description: OSJNBa0027H06.14
  misc_feature (132)..(174): NCBI GI NO: 34912580 NR Description: P0046B10.5
MTTSIHITALDGIVNVNSLFTLAVFIGLAWNPTDPDNSLVTDPNCVPTARMAENLVAFHVYSFASFLFSSLIALGLKQAMRLNIASSFHISTRIDPVVYYVNKTALRFGMVTSGLGSVCGCGFLMLALINVVQIKLGTLGCGASGHTYAAVVPLVILVPSALFIYVSLMLYAFTR

SEQ ID NO: 1650 - protein, 125 aa, Arabidopsis thaliana
  peptide (1)..(125): Ceres Seq. ID no. 12330431
  misc_feature (1)..(125): NCBI GI NO: 15239293 NR Description: putative protein; protein id: At5g05950
  misc_feature (1)..(125): NCBI GI NO: 34395171 NR Description: unknown protein
  misc_feature (1)..(125): NCBI GI NO: 34900646 NR Description: hypothetical protein~similar to Arabidopsis thalianachromosome5
  misc_feature (1)..(123): NCBI GI NO: 15232676 NR Description: putative protein; protein id: At3g46890.1
  misc_feature (1)..(123): NCBI GI NO: 6041846 NR Description: unknown protein [Arabidopsis thaliana]
  misc_feature (1)..(123): NCBI GI NO: 18397969 NR Description: expressed protein; protein id: At3g07510
  misc_feature (1)..(124): NCBI GI NO: 37531676 NR Description: hypothetical protein
  misc_feature (1)..(125): NCBI GI NO: 15226312 NR Description: hypothetical protein; protein id: At2g01580.1
  misc_feature (1)..(39): NCBI GI NO: 38345578 NR Description: OSJNBa0027H06.14
  misc_feature (82)..(124): NCBI GI NO: 34912580 NR Description: P0046B10.5
MAENLVAFHVYSFASFLFSSLIALGLKQAMRLNIASSFHISTRIDPVVYYVNKTALRFGMVTSGLGSVCGCGFLMLALINVVQIKLGTLGCGASGHTYAAVVPLVILVPSALFIYVSLMLYAFTR

SEQ ID NO: 1651 - DNA, 2772 bp, Arabidopsis thaliana
  misc_feature (1)..(2772): Ceres Seq. ID no. 12558639
ctgttgctgctgataaaaatatggctccttctacttctggtactccgatccacagatcaggctctagacctcagcttgatctaagcaaagccgaaattcaggggaacctcgaggagagagatcccaccattttattgcctaatcagtctgatgatatctctcatttggctcttgatatcggaggttctttgataaagttgttgtatttttcacgacatgaggactactctaatgatgatgataagcggaagaggacgatcaaggagagattgggtattaccaatggcaacttgagaagttatcctgttcttggtggtagacttcattttgtcaagtttgagactcacaaaattaatgagtgcttggattttattcattccaagcagcttcatcgccgagatccttatccttggagttcaaagaccttgcctttggggactggtgttatcaaggtcacaggtggcggggcatttaaatttgcagacttgttcaaggaacggctgggcgttagtattgagaaagaagatgaaatgcattgtcttgtttctggagcaaattttttgctcaaggctattcgacatgaagcctttacgcacatggagggtgagaaagaatttgtacagatagatcccaatgacttgtatccttatcttcttgtgaacgttggatctggtgttagcataatcaaggttgatggtgaaggaaagtttgaacgtgtgagtggaactaatgttggcggtggtacctattggggcttaggaagacttctaacgaagtgcaagagttttgatgaattgctagaactcagccaaaagggagataatagtgccattgacatgctcgttggtgatatttatggtggcatggattactccaagattggtctctctgcttcaacaatagcttctagttttggcaaggcgatatctgaaaataaggaactggacgattacagacctgaagatatttccttgtctctgttgcggatgatttcatacaatattgggcagatatcgtacttgaatgcccttcgctttgggttgaagcgaatattttttggaggatttttcataaggggtcatgcatataccatggatacaatttcatttgctgtacatttctggtctaagggagagatgcaagctatgttcttgagacatgaaggttttctgggtgctctaggtgcgttcatgagctatgagaagcacggattggatgatttaatgtcccatcagttggttgagaggttcccaatgggtgcaccatatactggaggaaatattcacggaccaccactcggtgatttggacgagaagatttcgtggatggagaagtttgtgcgtagaggaactgaaataactgctcctgtaccaatgactccatcaaaaacgactgggcttggagggtttgaagttccatcatccagaggtagtgctttaagatctgacgccagtgctttaaatgttggtgttctccatcttgtgcccacattggaggtgttcccattactagctgatccgaaaacgtatgagcctaacacgattgatctatcagatcaaggcgaacgagagtactggctcaaagttttgtccgagcatttgccagacctcgttgatacggctgtagcaagtgaaggaggaaccgaggatgcgaaaaggcggggtgatgcttttgctcgtgctttttctgctcatttggcaagattaatggaggagccagctgcatatggaaagctggggctggcaaatctcttggaacttagggaagaatgcttaagagaattccagtttgttgatgcctatagaagcatcaagcaaagggagaacgaggcatcacttgctgttttacctgatttacttgaggagcttgattcgatgagcgaggaggcaaggttgcttacacttatagaaggtgttcttgctgcaaacatatttgactggggatctcgagcatgtgtggatctatatcacaaaggaaccattattgaaatatacagaatgagtcgcaacaagatgcagagaccgtggagggtagacgattttgatgctttcaaagaaaggatgcttggatctggaggtaagcagcctcatcgacataaaagagcattactttttgttgataactcgggagcagatgtcattcttgggatgcttcctcttgctcgagagtttctccgtcgagggactgaagttgttctagtggcaaactctcttcctgctcttaacgacgtgaccgctatggaactgcctgatatagtcgctggggctgctaagcactgtgacatcttgaggagagcggcagaaatgggaggcttacttgtggatgcgatggtaaatccaggggatggatcaaagaaggattcaacgtcagcaccattgatggttgttgaaaatggatgtggaagtccttgtatcgacctcagacaagtcagctctgagcttgcagccgctgccaaagacgctgatcttgttgtcttggaaggtatgggaagagcacttcacaccaacttcaacgctcaattccaatgcgaggctctcaagctagcaatggttaaaaatcagagattggctgagaagttgataaaaggaaacatatatgattgtgtatgcagatacgagcctccctcgctttaacaatgttatgtatcatttcttcaacctttagactactgttgtatacagattaagcattcgtcatgtggcatatgtatttttatttagactacacttttactgtataaaattgtatttgaatgaatcaaaatcacttgct

SEQ ID NO: 1652 - protein, 876 aa, Arabidopsis thaliana
  peptide (1)..(876): Ceres Seq. ID no. 12558640
  misc_feature (40)..(397): NCBI GI NO: 8922665 NR Description: pantothenate kinase 4; pantothenic acid kinase
  misc_feature (495)..(747): NCBI GI NO: 8922665 NR Description: pantothenate kinase 4; pantothenic acid kinase
  misc_feature (792)..(875): NCBI GI NO: 8922665 NR Description: pantothenate kinase 4; pantothenic acid kinase
  misc_feature (40)..(397): NCBI GI NO: 10241706 NR Description: hypothetical protein [Homo sapiens]
  misc_feature (495)..(747): NCBI GI NO: 10241706 NR Description: hypothetical protein [Homo sapiens]
  misc_feature (792)..(875): NCBI GI NO: 10241706 NR Description: hypothetical protein [Homo sapiens]
  misc_feature (40)..(397): NCBI GI NO: 27370494 NR Description: pantothenate kinase 4 [Mus musculus]
  misc_feature (501)..(747): NCBI GI NO: 27370494 NR Description: pantothenate kinase 4 [Mus musculus]
  misc_feature (792)..(875): NCBI GI NO: 27370494 NR Description: pantothenate kinase 4 [Mus musculus]
  misc_feature (40)..(397): NCBI GI NO: 19424184 NR Description: pantothenate kinase 4; hypothetical protein Fang1
VAADKNMAPSTSGTPIHRSGSRPQLDLSKAEIQGNLEERDPTILLPNQSDDISHLALDIGGSLIKLLYFSRHEDYSNDDDKRKRTIKERLGITNGNLRSYPVLGGRLHFVKFETHKINECLDFIHSKQLHRRDPYPWSSKTLPLGTGVIKVTGGGAFKFADLFKERLGVSIEKEDEMHCLVSGANFLLKAIRHEAFTHMEGEKEFVQIDPNDLYPYLLVNVGSGVSIIKVDGEGKFERVSGTNVGGGTYWGLGRLLTKCKSFDELLELSQKGDNSAIDMLVGDIYGGMDYSKIGLSASTIASSFGKAISENKELDDYRPEDISLSLLRMISYNIGQISYLNALRFGLKRIFFGGFFIRGHAYTMDTISFAVHFWSKGEMQAMFLRHEGFLGALGAFMSYEKHGLDDLMSHQLVERFPMGAPYTGGNIHGPPLGDLDEKISWMEKFVRRGTEITAPVPMTPSKTTGLGGFEVPSSRGSALRSDASALNVGVLHLVPTLEVFPLLADPKTYEPNTIDLSDQGEREYWLKVLSEHLPDLVDTAVASEGGTEDAKRRGDAFARAFSAHLARLMEEPAAYGKLGLANLLELREECLREFQFVDAYRSIKQRENEASLAVLPDLLEELDSMSEEARLLTLIEGVLAANIFDWGSRACVDLYHKGTIIEIYRMSRNKMQRPWRVDDFDAFKERMLGSGGKQPHRHKRALLFVDNSGADVILGMLPLAREFLRRGTEVVLVANSLPALNDVTAMELPDIVAGAAKHCDILRRAAEMGGLLVDAMVNPGDGSKKDSTSAPLMVVENGCGSPCIDLRQVSSELAAAAKDADLVVLEGMGRALHTNFNAQFQCEALKLAMVKNQRLAEKLIKGNIYDCVCRYEPPSL

SEQ ID NO: 1653 - protein, 870 aa, Arabidopsis thaliana
  peptide (1)..(870): Ceres Seq. ID no. 12558641
  misc_feature (34)..(391): NCBI GI NO: 8922665 NR Description: pantothenate kinase 4; pantothenic acid kinase
  misc_feature (489)..(741): NCBI GI NO: 8922665 NR Description: pantothenate kinase 4; pantothenic acid kinase
  misc_feature (786)..(869): NCBI GI NO: 8922665 NR Description: pantothenate kinase 4; pantothenic acid kinase
  misc_feature (34)..(391): NCBI GI NO: 10241706 NR Description: hypothetical protein [Homo sapiens]
  misc_feature (489)..(741): NCBI GI NO: 10241706 NR Description: hypothetical protein [Homo sapiens]
  misc_feature (786)..(869): NCBI GI NO: 10241706 NR Description: hypothetical protein [Homo sapiens]
  misc_feature (34)..(391): NCBI GI NO: 27370494 NR Description: pantothenate kinase 4 [Mus musculus]
  misc_feature (495)..(741): NCBI GI NO: 27370494 NR Description: pantothenate kinase 4 [Mus musculus]
  misc_feature (786)..(869): NCBI GI NO: 27370494 NR Description: pantothenate kinase 4 [Mus musculus]
  misc_feature (34)..(391): NCBI GI NO: 19424184 NR Description: pantothenate kinase 4; hypothetical protein Fang1
MAPSTSGTPIHRSGSRPQLDLSKAEIQGNLEERDPTILLPNQSDDISHLALDIGGSLIKLLYFSRHEDYSNDDDKRKRTIKERLGITNGNLRSYPVLGGRLHFVKFETHKINECLDFIHSKQLHRRDPYPWSSKTLPLGTGVIKVTGGGAFKFADLFKERLGVSIEKEDEMHCLVSGANFLLKAIRHEAFTHMEGEKEFVQIDPNDLYPYLLVNVGSGVSIIKVDGEGKFERVSGTNVGGGTYWGLGRLLTKCKSFDELLELSQKGDNSAIDMLVGDIYGGMDYSKIGLSASTIASSFGKAISENKELDDYRPEDISLSLLRMISYNIGQISYLNALRFGLKRIFFGGFFIRGHAYTMDTISFAVHFWSKGEMQAMFLRHEGFLGALGAFMSYEKHGLDDLMSHQLVERFPMGAPYTGGNIHGPPLGDLDEKISWMEKFVRRGTEITAPVPMTPSKTTGLGGFEVPSSRGSALRSDASALNVGVLHLVPTLEVFPLLADPKTYEPNTIDLSDQGEREYWLKVLSEHLPDLVDTAVASEGGTEDAKRRGDAFARAFSAHLARLMEEPAAYGKLGLANLLELREECLREFQFVDAYRSIKQRENEASLAVLPDLLEELDSMSEEARLLTLIEGVLAANIFDWGSRACVDLYHKGTIIEIYRMSRNKMQRPWRVDDFDAFKERMLGSGGKQPHRHKRALLFVDNSGADVILGMLPLAREFLRRGTEVVLVANSLPALNDVTAMELPDIVAGAAKHCDILRRAAEMGGLLVDAMVNPGDGSKKDSTSAPLMVVENGCGSPCIDLRQVSSELAAAAKDADLVVLEGMGRALHTNFNAQFQCEALKLAMVKNQRLAEKLIKGNIYDCVCRYEPPSL

SEQ ID NO: 1654 - protein, 700 aa, Arabidopsis thaliana
  peptide (1)..(700): Ceres Seq. ID no. 12558642
  misc_feature (1)..(221): NCBI GI NO: 8922665 NR Description: pantothenate kinase 4; pantothenic acid kinase
  misc_feature (319)..(571): NCBI GI NO: 8922665 NR Description: pantothenate kinase 4; pantothenic acid kinase
  misc_feature (616)..(699): NCBI GI NO: 8922665 NR Description: pantothenate kinase 4; pantothenic acid kinase
  misc_feature (1)..(221): NCBI GI NO: 10241706 NR Description: hypothetical protein [Homo sapiens]
  misc_feature (319)..(571): NCBI GI NO: 10241706 NR Description: hypothetical protein [Homo sapiens]
  misc_feature (616)..(699): NCBI GI NO: 10241706 NR Description: hypothetical protein [Homo sapiens]
  misc_feature (1)..(221): NCBI GI NO: 27370494 NR Description: pantothenate kinase 4 [Mus musculus]
  misc_feature (325)..(571): NCBI GI NO: 27370494 NR Description: pantothenate kinase 4 [Mus musculus]
  misc_feature (616)..(699): NCBI GI NO: 27370494 NR Description: pantothenate kinase 4 [Mus musculus]
  misc_feature (1)..(221): NCBI GI NO: 19424184 NR Description: pantothenate kinase 4; hypothetical protein Fang1
MHCLVSGANFLLKAIRHEAFTHMEGEKEFVQIDPNDLYPYLLVNVGSGVSIIKVDGEGKFERVSGTNVGGGTYWGLGRLLTKCKSFDELLELSQKGDNSAIDMLVGDIYGGMDYSKIGLSASTIASSFGKAISENKELDDYRPEDISLSLLRMISYNIGQISYLNALRFGLKRIFFGGFFIRGHAYTMDTISFAVHFWSKGEMQAMFLRHEGFLGALGAFMSYEKHGLDDLMSHQLVERFPMGAPYTGGNIHGPPLGDLDEKISWMEKFVRRGTEITAPVPMTPSKTTGLGGFEVPSSRGSALRSDASALNVGVLHLVPTLEVFPLLADPKTYEPNTIDLSDQGEREYWLKVLSEHLPDLVDTAVASEGGTEDAKRRGDAFARAFSAHLARLMEEPAAYGKLGLANLLELREECLREFQFVDAYRSIKQRENEASLAVLPDLLEELDSMSEEARLLTLIEGVLAANIFDWGSRACVDLYHKGTIIEIYRMSRNKMQRPWRVDDFDAFKERMLGSGGKQPHRHKRALLFVDNSGADVILGMLPLAREFLRRGTEVVLVANSLPALNDVTAMELPDIVAGAAKHCDILRRAAEMGGLLVDAMVNPGDGSKKDSTSAPLMVVENGCGSPCIDLRQVSSELAAAAKDADLVVLEGMGRALHTNFNAQFQCEALKLAMVKNQRLAEKLIKGNIYDCVCRYEPPSL

SEQ ID NO: 1655 - DNA, 796 bp, Arabidopsis thaliana
  misc_feature (1)..(796): Ceres Seq. ID no. 13499549
aatgattaatgtctgaaaaatttgatatttgaagcgaatcaacaacaacagtcgggttcgtgaaaaaaaaagatttgatcggctaaacttggtcggacttgtcaatggcagacgtacctggatacctgcgcacttgtttggatatggggaagatagctttcttagcaatccttgtatctacagggattgtgttgcagattctggcttgtgctctgttcaataactggtggccaatgctaagtgttataatgtatgtgctcctcccaatgcctttgctcttctttggtggatcagacagtacatctctattcaacgagtcagataatagttggatcaatgcagccaagttcttgactggtgcgtcagcagttggaagcgtcgcgataccatcgattctaaaacacgccggactcatcggttggggcgcattagcccttgatctctcatcctaccttgtcttcctcgtggctattttgggttacatttgcataggagatgccagtgagaactattacagctacatttaaaaagacacacacaaattcatcatcatttgtttaaacctcaacaaagtctcagccttttatcacttccccgttcgattgatgcttcgaaacgaaaacatcttgtttctatggaatgactcgctgattggattttcacaagtttaagagtttgtgtgtcaagtgtatgtatgaatgattttttttttgggtggttttgttacgttttgatgtatagaacatatttattatttggtggaatatatataaattttctttacaaaagcatattg

SEQ ID NO: 1656 - protein, 140 aa, Arabidopsis thaliana
  peptide (1)..(140): Ceres Seq. ID no. 13499550
  misc_feature (1)..(140): NCBI GI NO: 21554354 NR Description: unknown [Arabidopsis thaliana]
  misc_feature (1)..(140): NCBI GI NO: 18398420 NR Description: expressed protein [Arabidopsis thaliana]
  misc_feature (1)..(139): NCBI GI NO: 25518386 NR Description: hypothetical protein F5D14
  misc_feature (17)..(124): NCBI GI NO: 12322900 NR Description: unknown protein; 72859-71336
  misc_feature (17)..(124): NCBI GI NO: 16648828 NR Description: AT3g11530/F24K9_21 [Arabidopsis thaliana]
  misc_feature (23)..(124): NCBI GI NO: 18399269 NR Description: expressed protein [Arabidopsis thaliana]
  misc_feature (55)..(124): NCBI GI NO: 34905898 NR Description: P0458E05.25
  misc_feature (16)..(105): NCBI GI NO: 6322504 NR Description: Vacuolar Protein Sorting; Vps55p
  misc_feature (13)..(124): NCBI GI NO: 19113819 NR Description: Protein with similarity to Drosophila yakuba NADHdehydrogenase chain 5
  misc_feature (17)..(126): NCBI GI NO: 38103616 NR Description: hypothetical protein MG04054.4
MADVPGYLRTCLDMGKIAFLAILVSTGIVLQILACALFNNWWPMLSVIMYVLLPMPLLFFGGSDSTSLFNESDNSWINAAKFLTGASAVGSVAIPSILKHAGLIGWGALALDLSSYLVFLVAILGYICIGDASENYYSYI

SEQ ID NO: 1657 - protein, 127 aa, Arabidopsis thaliana
  peptide (1)..(127): Ceres Seq. ID no. 13499551
  misc_feature (1)..(127): NCBI GI NO: 21554354 NR Description: unknown [Arabidopsis thaliana]
  misc_feature (1)..(127): NCBI GI NO: 18398420 NR Description: expressed protein [Arabidopsis thaliana]
  misc_feature (1)..(126): NCBI GI NO: 25518386 NR Description: hypothetical protein F5D14
  misc_feature (4)..(111): NCBI GI NO: 12322900 NR Description: unknown protein; 72859-71336
  misc_feature (4)..(111): NCBI GI NO: 16648828 NR Description: AT3g11530/F24K9_21 [Arabidopsis thaliana]
  misc_feature (10)..(111): NCBI GI NO: 18399269 NR Description: expressed protein [Arabidopsis thaliana]
  misc_feature (42)..(111): NCBI GI NO: 34905898 NR Description: P0458E05.25
  misc_feature (3)..(92): NCBI GI NO: 6322504 NR Description: Vacuolar Protein Sorting; Vps55p
  misc_feature (1)..(111): NCBI GI NO: 19113819 NR Description: Protein with similarity to Drosophila yakuba NADHdehydrogenase chain 5
  misc_feature (4)..(113): NCBI GI NO: 38103616 NR Description: hypothetical protein MG04054.4
MGKIAFLAILVSTGIVLQILACALFNNWWPMLSVIMYVLLPMPLLFFGGSDSTSLFNESDNSWINAAKFLTGASAVGSVAIPSILKHAGLIGWGALALDLSSYLVFLVAILGYICIGDASENYYSYI

SEQ ID NO: 1658 - protein, 97 aa, Arabidopsis thaliana
  peptide (1)..(97): Ceres Seq. ID no. 13499552
  misc_feature (1)..(97): NCBI GI NO: 21554354 NR Description: unknown [Arabidopsis thaliana]
  misc_feature (1)..(97): NCBI GI NO: 18398420 NR Description: expressed protein [Arabidopsis thaliana]
  misc_feature (1)..(96): NCBI GI NO: 25518386 NR Description: hypothetical protein F5D14
  misc_feature (1)..(81): NCBI GI NO: 12322900 NR Description: unknown protein; 72859-71336
  misc_feature (1)..(81): NCBI GI NO: 16648828 NR Description: AT3g11530/F24K9_21 [Arabidopsis thaliana]
  misc_feature (1)..(81): NCBI GI NO: 18399269 NR Description: expressed protein [Arabidopsis thaliana]
  misc_feature (12)..(81): NCBI GI NO: 34905898 NR Description: P0458E05.25
  misc_feature (1)..(62): NCBI GI NO: 6322504 NR Description: Vacuolar Protein Sorting; Vps55p
  misc_feature (1)..(81): NCBI GI NO: 19113819 NR Description: Protein with similarity to Drosophila yakuba NADHdehydrogenase chain 5
  misc_feature (1)..(83): NCBI GI NO: 38103616 NR Description: hypothetical protein MG04054.4
MLSVIMYVLLPMPLLFFGGSDSTSLFNESDNSWINAAKFLTGASAVGSVAIPSILKHAGLIGWGALALDLSSYLVFLVAILGYICIGDASENYYSYI

SEQ ID NO: 1659 - DNA, 853 bp, Arabidopsis thaliana
  misc_feature (1)..(853): Ceres Seq. ID no. 12393853
atgaaagttgttgtttttaggtacaattcattctattcaaaacaattttgacgtctctcaatcccattttagatacaattgattctatttcaggttttggggttatttctcaaatcgattcctgtcaccaaaatcaaaatctgaaagcaaatggttgatgaggatcacttggaagattttgtctgtgtttgactatggagttgcacataaatggttagggatcagaggaataagttgactcaggaagtttcttctgctttcagcggcaagctcaacatccttgctatatattctgcttcaaaacatgctcttcatggctacttccacagcttgcgttctgagttctgtcagaagggaatcaaggttaccgtcgtttgtcctggtccaatagaaacctggaatggtacaggaacatcaacttcggaagacagcaagtctcctgagaaacgtgtgtcatctgaacgatgtgcagagctgactataatcgctgcatctcataacttgaaggaagcttggatttcatatcagccagtactactcgtgatgtatctagtgcagtacatgccttcccttggcttctggctcatggacaaggttggaggaaagcgtgtggaggtcgcggaaaagaaaggcaacacatactcgtgggatttactgttcgggaagaagactaaaacaaactgaagctgattctctagaagatacacatagatgtggttggttgagccttagtccgtagatgtggttggtgtttgtttgctagtttgattgttaaataactaccaaagcgtcgaaaaatgttttgttgccttgtgaggtgctcaataagtaagaaaagatgtgatcttctgtg

SEQ ID NO: 1660 - protein, 157 aa, Arabidopsis thaliana
  peptide (1)..(157): Ceres Seq. ID no. 12393854
  misc_feature (13)..(157): NCBI GI NO: 30678824 NR Description: short-chain dehydrogenase/reductase family protein
  misc_feature (78)..(157): NCBI GI NO: 6017123 NR Description: unknown protein [Arabidopsis thaliana]
  misc_feature (13)..(78): NCBI GI NO: 6017123 NR Description: unknown protein [Arabidopsis thaliana]
  misc_feature (1)..(135): NCBI GI NO: 6318548 NR Description: retinal short-chain dehydrogenase/ reductase retSDR4
  misc_feature (1)..(135): NCBI GI NO: 7706318 NR Description: CGI-86 protein [Homo sapiens]
  misc_feature (1)..(135): NCBI GI NO: 34865424 NR Description: similar to retinal short-chain dehydrogenase/reductase 4
  misc_feature (13)..(78): NCBI GI NO: 22330816 NR Description: unknown protein; protein id: At3g03350.1
  misc_feature (1)..(135): NCBI GI NO: 21313492 NR Description: RIKEN cDNA 2310016E22 [Mus musculus]
  misc_feature (1)..(135): NCBI GI NO: 34395851 NR Description: Retinal short-chain dehydrogenase/ reductase 4 precursor
  misc_feature (27)..(136): NCBI GI NO: 20856701 NR Description: similar to CGI-86 protein
MVRDQRNKLTQEVSSAFSGKLNILAIYSASKHALHGYFHSLRSEFCQKGIKVTVVCPGPIETWNGTGTSTSEDSKSPEKRVSSERCAELTIIAASHNLKEAWISYQPVLLVMYLVQYMPSLGFWLMDKVGGKRVEVAEKKGNTYSWDLLFGKKTKTN

SEQ ID NO: 1661 - DNA, 619 bp, Arabidopsis thaliana
  misc_feature (1)..(619): Ceres Seq. ID no. 12394008
ccgcgcaggaaatgttcagccctatcagtttgttctaccgccgaattggaaacagttgcgaatagccaatattttgtcaggtaattactgtcaaccgaaatgtgcagagccatggatcgaagtgaagtttgagaacgagaagcaaggcaaggttcaagtagttgcatctcctttaatccgcttaaccaacaaaccaaatgcaactattgaagatctcggtgagcctgagaaagtgattgcttctcttggtccttttgtcaccggaaactcttatgactctgatgaacttttgaagacttcaatcgaaaaaattggagatcaaacgtactataagtatgtgttggagacgccatttgcgctcacgggaagtcacaatcttgcaaaagcgacagcaaagggaagcacggttgttttgtttgttgtaagtgctactgaaaagcaatggcagagctcacagaagactcttgaagccattcttgattcttttcaactgtaaatcagagtttttgttatgactctggacttgagaaactaaagagcaaacagtttatgctaaggggtgtctgtgcgtagtaacattaactcattcttttctactgtaaattcgagctatgactcg

SEQ ID NO: 1662 - protein, 164 aa, Arabidopsis thaliana
  peptide (1)..(164): Ceres Seq. ID no. 12394009
  misc_feature (1)..(164): NCBI GI NO: 15228983 NR Description: thylakoid lumenal 20 kDa protein
  misc_feature (1)..(108): NCBI GI NO: 34909044 NR Description: P0034E02.35
  misc_feature (129)..(164): NCBI GI NO: 34909044 NR Description: P0034E02.35
  misc_feature (7)..(164): NCBI GI NO: 8928455 NR Description: Thylakoid lumenal 29
  misc_feature (7)..(164): NCBI GI NO: 30699237 NR Description: thylakoid lumenal 29.8 kDa protein
RAGNVQPYQFVLPPNWKQLRIANILSGNYCQPKCAEPWIEVKFENEKQGKVQVVASPLIRLTNKPNATIEDLGEPEKVIASLGPFVTGNSYDSDELLKTSIEKIGDQTYYKYVLETPFALTGSHNLAKATAKGSTVVLFVVSATEKQWQSSQKTLEAILDSFQL

SEQ ID NO: 1663 - DNA, 1023 bp, Arabidopsis thaliana
  misc_feature (1)..(1023): Ceres Seq. ID no. 12394000
acaatcaaagatgacactagctagacattttcgttttcatctccccacgaatcaaagatggcttttgccattgcttctgctctcacttccacactcacattatccacgagcagagtccaaaatcctacccagagaagaccacatgtagcgtccacatcatccaccggtggaagattaatgagagagcgcttggtggtggttcgtgccggcaaagaagtttctagcgtctgtgaaccacttcctccggaccgtcctttatggttccctggtagctctccacctgaatggctcgatggcagcttacctggtgatttcggtttcgatcctctcggtttagggtctgatccggacaccctcaaatggtttgcacaagctgagcttatacatagccggtgggcaatgctggccgtgaccggtatcataataccagaatgtctcgagcggttaggtttcattgaaaatttctcatggtatgacgcagggtctcgtgagtacttcgcggattccactacgctgtttgtggctcaaatggttttaatgggctgggcagaaggtagaagatgggctgatttgattaaaccggggtctgttgacatagaaccaaagtacccgcataaagtaaatcctaaaccggatgttggttaccctggaggtttgtggttcgattttatgatgtgggggagaggttctcctgaaccggtaatggttttgaggactaaagagattaagaacggacggctcgcgatgcttgctttccttgggttctgtttccaagctacctacactagccaagatccaattgagaatctcatggctcatctggctgatcctggtcattgcaacgtcttttcggcatttacatcacattaatgaggattagcttggggcgaatataatattttttatatatttatggatgttgaacttttgtatagtgtcactcgccgttgttacaacttctgcttacttaattaacatgtaaaatatattttatatatatgtagaagaaagaaacaagaagag

SEQ ID NO: 1664 - protein, 270 aa, Arabidopsis thaliana
  peptide (1)..(270): Ceres Seq. ID no. 12394001
  misc_feature (73)..(241): Pfam Name: Pfam Description:  Chlorophyll A-B binding protein
  misc_feature (1)..(270): NCBI GI NO: 15221956 NR Description: light-harvesting chlorophyll a/b binding protein
  misc_feature (1)..(270): NCBI GI NO: 27754356 NR Description: putative light-harvesting chlorophyll a/b binding protein
  misc_feature (1)..(265): NCBI GI NO: 25299032 NR Description: hypothetical protein T29M8
  misc_feature (1)..(270): NCBI GI NO: 1084336 NR Description: chlorophyll a/b-binding protein type II
  misc_feature (5)..(268): NCBI GI NO: 115766 NR Description: Chlorophyll A-B binding protein
  misc_feature (5)..(268): NCBI GI NO: 115765 NR Description: Chlorophyll A-B binding protein 7
  misc_feature (30)..(268): NCBI GI NO: 15233120 NR Description: light-harvesting chlorophyll a/b binding protein
  misc_feature (30)..(268): NCBI GI NO: 11277627 NR Description: PS I antenna protein Lhca2
  misc_feature (1)..(268): NCBI GI NO: 2129879 NR Description: chlorophyll a/b-binding protein type II precursor
  misc_feature (6)..(269): NCBI GI NO: 99486 NR Description: chlorophyll a/b-binding protein
MAFAIASALTSTLTLSTSRVQNPTQRRPHVASTSSTGGRLMRERLVVVRAGKEVSSVCEPLPPDRPLWFPGSSPPEWLDGSLPGDFGFDPLGLGSDPDTLKWFAQAELIHSRWAMLAVTGIIIPECLERLGFIENFSWYDAGSREYFADSTTLFVAQMVLMGWAEGRRWADLIKPGSVDIEPKYPHKVNPKPDVGYPGGLWFDFMMWGRGSPEPVMVLRTKEIKNGRLAMLAFLGFCFQATYTSQDPIENLMAHLADPGHCNVFSAFTSH

SEQ ID NO: 1665 - protein, 230 aa, Arabidopsis thaliana
  peptide (1)..(230): Ceres Seq. ID no. 12394002
  misc_feature (33)..(201): Pfam Name: Pfam Description:  Chlorophyll A-B binding protein
  misc_feature (1)..(230): NCBI GI NO: 15221956 NR Description: light-harvesting chlorophyll a/b binding protein
  misc_feature (1)..(230): NCBI GI NO: 27754356 NR Description: putative light-harvesting chlorophyll a/b binding protein
  misc_feature (1)..(225): NCBI GI NO: 25299032 NR Description: hypothetical protein T29M8
  misc_feature (1)..(230): NCBI GI NO: 1084336 NR Description: chlorophyll a/b-binding protein type II
  misc_feature (1)..(228): NCBI GI NO: 115766 NR Description: Chlorophyll A-B binding protein
  misc_feature (1)..(228): NCBI GI NO: 115765 NR Description: Chlorophyll A-B binding protein 7
  misc_feature (1)..(228): NCBI GI NO: 15233120 NR Description: light-harvesting chlorophyll a/b binding protein
  misc_feature (1)..(228): NCBI GI NO: 11277627 NR Description: PS I antenna protein Lhca2
  misc_feature (1)..(228): NCBI GI NO: 2129879 NR Description: chlorophyll a/b-binding protein type II precursor
  misc_feature (1)..(229): NCBI GI NO: 99486 NR Description: chlorophyll a/b-binding protein
MRERLVVVRAGKEVSSVCEPLPPDRPLWFPGSSPPEWLDGSLPGDFGFDPLGLGSDPDTLKWFAQAELIHSRWAMLAVTGIIIPECLERLGFIENFSWYDAGSREYFADSTTLFVAQMVLMGWAEGRRWADLIKPGSVDIEPKYPHKVNPKPDVGYPGGLWFDFMMWGRGSPEPVMVLRTKEIKNGRLAMLAFLGFCFQATYTSQDPIENLMAHLADPGHCNVFSAFTSH

SEQ ID NO: 1666 - protein, 156 aa, Arabidopsis thaliana
  peptide (1)..(156): Ceres Seq. ID no. 12394003
  misc_feature (1)..(127): Pfam Name: Pfam Description:  Chlorophyll A-B binding protein
  misc_feature (1)..(156): NCBI GI NO: 15221956 NR Description: light-harvesting chlorophyll a/b binding protein
  misc_feature (1)..(156): NCBI GI NO: 27754356 NR Description: putative light-harvesting chlorophyll a/b binding protein
  misc_feature (1)..(151): NCBI GI NO: 25299032 NR Description: hypothetical protein T29M8
  misc_feature (1)..(156): NCBI GI NO: 1084336 NR Description: chlorophyll a/b-binding protein type II
  misc_feature (1)..(154): NCBI GI NO: 115766 NR Description: Chlorophyll A-B binding protein
  misc_feature (1)..(154): NCBI GI NO: 115765 NR Description: Chlorophyll A-B binding protein 7
  misc_feature (1)..(154): NCBI GI NO: 15233120 NR Description: light-harvesting chlorophyll a/b binding protein
  misc_feature (1)..(154): NCBI GI NO: 11277627 NR Description: PS I antenna protein Lhca2
  misc_feature (1)..(154): NCBI GI NO: 2129879 NR Description: chlorophyll a/b-binding protein type II precursor
  misc_feature (1)..(155): NCBI GI NO: 99486 NR Description: chlorophyll a/b-binding protein
MLAVTGIIIPECLERLGFIENFSWYDAGSREYFADSTTLFVAQMVLMGWAEGRRWADLIKPGSVDIEPKYPHKVNPKPDVGYPGGLWFDFMMWGRGSPEPVMVLRTKEIKNGRLAMLAFLGFCFQATYTSQDPIENLMAHLADPGHCNVFSAFTSH

SEQ ID NO: 1667 - DNA, 1499 bp, Arabidopsis thaliana
  misc_feature (1)..(1499): Ceres Seq. ID no. 12560653
tctctctcacttttctgaaaaagttgtacgtccaaaatctccaaacccttttttaagaacaaatctcaatccatggcaatcatcgatcaaaattgagaatcacacaagcttcacaatgtcatcatcatcatcaacgacgacgaacacaacaacagaatcagattcatcatctctacctactcacatcggtagatcaaattccgacggaatcatcgacactacaccatttcttcctcccaccgttacaagaaccataagcgtagatgaagaatccaatccaattcatcgatccgctagacgacaaggtctaagagaagcagcgaggttcctccgtcacgctggtagccggagaatgatgcgtgaaccatcgatgctcgttagagaaaccgctgctgagcaattagaagagagacaaagtgattgggcgtattctaaacctgtggtgtttcttgacattttgtggaatcttgcttttgttgccatcggtgttgctgttctgatacttagccgtgacgagaagcctaatatgccgttgagagtttgggttgttggttatgggattcaatgttggttacatatggcttgtgtttgtgttgagtataggcggaggagacgacgacgtcacccggaggatggtggtggttctgggttgacgaattcttcgtcgcagcaatatgtttcgttagcgcaattggaggatagaggagagactagtaatcctgcgaagcatcttgaatcagccaatacgatgttctcattcatctggtggataattggattctactgggtttctgcaggaggccaaacactatctagtgactctcctcagctctattggctgtgtatcatttttctcggtttcgatgttttctttgttgtgttctgtgttgcattggcttgtgttatcggccttgctgtttgctgttgtcttccatgtataattgcaattctatatgctgttgccgaccaggagggagcatcgaagaacgacatagatcaaatgccgaaattcagatttacaaaaactggcaatgttgaaaagctctcaggcaaagcacggggaataatgacggaatgtggaacagattcacctattgaacgctcgctctctccagaagacgcggaatgctgcatctgtctctgtgaatatgaagatggagttgaacttagagaactcccttgtaaccatcactttcattgcacttgcatcgataaatggcttcatataaactcacgttgcccgctctgcaagtttaacatcttgaagaacgcaaacaacgaagtctagtaaaatctgttctggttctaggatcaatccgaacgaaccatcccagaccagaacgtttcagatatatgtaaactctggttcgtgttttagtgttgtgcagttagaaaatctagtccatatctctttctcctgatcttctattacaatgcgtcaatgcgcctattgatagtatgtaggaataaatcgttggattagtcctactttatttttt

SEQ ID NO: 1668 - protein, 428 aa, Arabidopsis thaliana
  peptide (1)..(428): Ceres Seq. ID no. 12560654
  misc_feature (376)..(416): Pfam Name: RING finger Pfam Description: Zinc finger, C3HC4 type
  misc_feature (39)..(428): NCBI GI NO: 18413629 NR Description: putative protein; protein id: At4g11680
  misc_feature (39)..(374): NCBI GI NO: 7487667 NR Description: hypothetical protein T5C23
  misc_feature (375)..(428): NCBI GI NO: 7487667 NR Description: hypothetical protein T5C23
  misc_feature (96)..(427): NCBI GI NO: 18407748 NR Description: expressed protein; protein id: At1g63170
  misc_feature (96)..(427): NCBI GI NO: 21554228 NR Description: unknown [Arabidopsis thaliana]
  misc_feature (96)..(424): NCBI GI NO: 16604388 NR Description: At1g63170/F16M19_7 [Arabidopsis thaliana]
  misc_feature (72)..(423): NCBI GI NO: 33146524 NR Description: putative RES protein
  misc_feature (119)..(426): NCBI GI NO: 38344371 NR Description: OSJNBb0032E06.5
  misc_feature (46)..(260): NCBI GI NO: 15222059 NR Description: unknown protein; protein id: At1g12760.1
  misc_feature (280)..(425): NCBI GI NO: 15222059 NR Description: unknown protein; protein id: At1g12760.1
LSHFSEKVVRPKSPNPFLRTNLNPWQSSIKIENHTSFTMSSSSSTTTNTTTESDSSSLPTHIGRSNSDGIIDTTPFLPPTVTRTISVDEESNPIHRSARRQGLREAARFLRHAGSRRMMREPSMLVRETAAEQLEERQSDWAYSKPVVFLDILWNLAFVAIGVAVLILSRDEKPNMPLRVWVVGYGIQCWLHMACVCVEYRRRRRRRHPEDGGGSGLTNSSSQQYVSLAQLEDRGETSNPAKHLESANTMFSFIWWIIGFYWVSAGGQTLSSDSPQLYWLCIIFLGFDVFFVVFCVALACVIGLAVCCCLPCIIAILYAVADQEGASKNDIDQMPKFRFTKTGNVEKLSGKARGIMTECGTDSPIERSLSPEDAECCICLCEYEDGVELRELPCNHHFHCTCIDKWLHINSRCPLCKFNILKNANNEV

SEQ ID NO: 1669 - protein, 390 aa, Arabidopsis thaliana
  peptide (1)..(390): Ceres Seq. ID no. 12560655
  misc_feature (338)..(378): Pfam Name: RING finger Pfam Description: Zinc finger, C3HC4 type
  misc_feature (1)..(390): NCBI GI NO: 18413629 NR Description: putative protein; protein id: At4g11680
  misc_feature (1)..(336): NCBI GI NO: 7487667 NR Description: hypothetical protein T5C23
  misc_feature (337)..(390): NCBI GI NO: 7487667 NR Description: hypothetical protein T5C23
  misc_feature (58)..(389): NCBI GI NO: 18407748 NR Description: expressed protein; protein id: At1g63170
  misc_feature (58)..(389): NCBI GI NO: 21554228 NR Description: unknown [Arabidopsis thaliana]
  misc_feature (58)..(386): NCBI GI NO: 16604388 NR Description: At1g63170/F16M19_7 [Arabidopsis thaliana]
  misc_feature (34)..(385): NCBI GI NO: 33146524 NR Description: putative RES protein
  misc_feature (81)..(388): NCBI GI NO: 38344371 NR Description: OSJNBb0032E06.5
  misc_feature (8)..(222): NCBI GI NO: 15222059 NR Description: unknown protein; protein id: At1g12760.1
  misc_feature (242)..(387): NCBI GI NO: 15222059 NR Description: unknown protein; protein id: At1g12760.1
MSSSSSTTTNTTTESDSSSLPTHIGRSNSDGIIDTTPFLPPTVTRTISVDEESNPIHRSARRQGLREAARFLRHAGSRRMMREPSMLVRETAAEQLEERQSDWAYSKPVVFLDILWNLAFVAIGVAVLILSRDEKPNMPLRVWVVGYGIQCWLHMACVCVEYRRRRRRRHPEDGGGSGLTNSSSQQYVSLAQLEDRGETSNPAKHLESANTMFSFIWWIIGFYWVSAGGQTLSSDSPQLYWLCIIFLGFDVFFVVFCVALACVIGLAVCCCLPCIIAILYAVADQEGASKNDIDQMPKFRFTKTGNVEKLSGKARGIMTECGTDSPIERSLSPEDAECCICLCEYEDGVELRELPCNHHFHCTCIDKWLHINSRCPLCKFNILKNANNEV

SEQ ID NO: 1670 - protein, 311 aa, Arabidopsis thaliana
  peptide (1)..(311): Ceres Seq. ID no. 12560656
  misc_feature (259)..(299): Pfam Name: RING finger Pfam Description: Zinc finger, C3HC4 type
  misc_feature (1)..(311): NCBI GI NO: 18413629 NR Description: putative protein; protein id: At4g11680
  misc_feature (1)..(257): NCBI GI NO: 7487667 NR Description: hypothetical protein T5C23
  misc_feature (258)..(311): NCBI GI NO: 7487667 NR Description: hypothetical protein T5C23
  misc_feature (1)..(310): NCBI GI NO: 18407748 NR Description: expressed protein; protein id: At1g63170
  misc_feature (1)..(310): NCBI GI NO: 21554228 NR Description: unknown [Arabidopsis thaliana]
  misc_feature (1)..(307): NCBI GI NO: 16604388 NR Description: At1g63170/F16M19_7 [Arabidopsis thaliana]
  misc_feature (1)..(306): NCBI GI NO: 33146524 NR Description: putative RES protein
  misc_feature (2)..(309): NCBI GI NO: 38344371 NR Description: OSJNBb0032E06.5
  misc_feature (1)..(143): NCBI GI NO: 15222059 NR Description: unknown protein; protein id: At1g12760.1
  misc_feature (163)..(308): NCBI GI NO: 15222059 NR Description: unknown protein; protein id: At1g12760.1
MMREPSMLVRETAAEQLEERQSDWAYSKPVVFLDILWNLAFVAIGVAVLILSRDEKPNMPLRVWVVGYGIQCWLHMACVCVEYRRRRRRRHPEDGGGSGLTNSSSQQYVSLAQLEDRGETSNPAKHLESANTMFSFIWWIIGFYWVSAGGQTLSSDSPQLYWLCIIFLGFDVFFVVFCVALACVIGLAVCCCLPCIIAILYAVADQEGASKNDIDQMPKFRFTKTGNVEKLSGKARGIMTECGTDSPIERSLSPEDAECCICLCEYEDGVELRELPCNHHFHCTCIDKWLHINSRCPLCKFNILKNANNEV

SEQ ID NO: 1671 - DNA, 2263 bp, Arabidopsis thaliana
  misc_feature (1)..(2263): Ceres Seq. ID no. 13591438
accatcttcttcttcaatggaaactccggattaaatgacacttctgtaacttcctatatttactaaaatgccatctcgcctctctccgccagatattccgccgctgcaaccgacgcctacggttagtgacggccatcatcgtttccagactcttccacttatcatagccggttctctgactttaaccggagttttactcatcctcgtcactttacttatttaccgaagactctaccgaaaccgtacggctccttcagatcttatctccaactccaagtctcctcaacactaccaatgtcgacgcttctcttactctcagctccgccgcgctacaaactctttctccgagtcgactcacctcggtcacggcggattcggctctgtttacaaagctgatttcccgagtggcggcgattcactcgccgtcaaagtcatggatacctccgctggttctttacaaggcgaacgtgagtttcacaacgagctttctctctcttctcacttaattggctctcctcatgtcgtctctctccttggattctcctccgatcgtcgtggtcggaagcttatcctcgtctacgaacttatggctaatcgtagtttacaagacgcgcttttggatcgcaaatgtgtggagcttatggattggaacaaaaggtttgagattgccacggatatagcaaaaggcatcgagtttcttcaccattgttgtgatccaattataatccatggagatattaaacctagtaacatccttctcgattctgatttcaaagccaaaatcggagatttcggtctcgcgagagtaaagtcggaggatttcgatactaggattctgattgaggaagaagataagagcaaggatgttgttgaagataatgggtcgattcttgaggagactgaaagcgtgattactgtgtttgaagaaggtaataatgttgtcaatctctcgccggagacttgtgggattagtgtcttgacagagacggtggcctctccgggtgaaaaatctggactttcgccagagaattgtgcagtgagcattttgacggtggaggtgggagcagcatctccggcgatggcatcgataccgtcaccggagacttgtgcgattagcgttttgacggatactggattgtcaccggaaagtagcaagcttaaagtgggatcgaagagagattggtggtggaaacaggacaacaatggtggaagcagaggagggattgaatcagggagtgtgaaggattacgtgatggaatggattgggagtgagattaagaaagagagacctagcaacaataaggaatggatcaacaatggtgatgggtcatcatcagtctctaagaagaagaagaaagagaagaagagaaagcctagagagtggtggaaggaagagttttgtgaagagctgactagaaagaagaggaaaaagaagaagaagaagaaaagagggttaagctcaatctcaagcattgactcttggtttcatagagacgatggtgcttcctctgttcatgaccacaatcttaatcctaccaagaggaagaagaggaatagtatagattggtgggtagatgggttaagtggggagctgaagtcagtcatgggtaaaaaaaacagtcaagattctggtttgtggtgtgatgtgaatgttcagaagagtggtggagtcagcagcacaccgagtatgagaggtacggtgtgttacattgcaccagaatgtggaggaggaggtgtgttgtctgagaaatgcgatgtttatagttttggggttctgcttttggttcttgtctcaggaagacggccattgcaggtgactgcttcgccgatgtcggagtttgagagggctaacttgatttcatgggctaagcaattagcttgcaatggtaaattgttggagttagttgataaatctatacactctttggagaaagagcaagcggttctttgtattactattgcattgctttgtctgcaaagatctccggttaagagaccaacgatgaaggagattgttgagatgctttcgggtgtgtctgagccaccgcatttgccgtttgagttctcaccctcgccgcctatgggttttccgtttaagtcaaggaagaaagcacggtgaaattcgggtttggttatgacttatgagctcagtcatcaagtgtaggatttttccggtccaaagctaaaccaattgcgagttgtaggaactatttgattccgtaagattagctttttgcaaatatttatgaatatttagttgctt

SEQ ID NO: 1672 - protein, 683 aa, Arabidopsis thaliana
  peptide (1)..(683): Ceres Seq. ID no. 13591439
  misc_feature (1)..(683): NCBI GI NO: 37531832 NR Description: putative protein kinase
  misc_feature (427)..(683): NCBI GI NO: 15220862 NR Description: protein kinase family [Arabidopsis thaliana]
  misc_feature (12)..(250): NCBI GI NO: 15220862 NR Description: protein kinase family [Arabidopsis thaliana]
  misc_feature (254)..(681): NCBI GI NO: 15242183 NR Description: protein kinase family [Arabidopsis thaliana]
  misc_feature (292)..(680): NCBI GI NO: 15235063 NR Description: protein kinase family [Arabidopsis thaliana]
  misc_feature (1)..(457): NCBI GI NO: 30686865 NR Description: protein kinase family [Arabidopsis thaliana]
  misc_feature (647)..(680): NCBI GI NO: 30686865 NR Description: protein kinase family [Arabidopsis thaliana]
  misc_feature (1)..(514): NCBI GI NO: 15235063 NR Description: protein kinase family [Arabidopsis thaliana]
  misc_feature (1)..(499): NCBI GI NO: 15242183 NR Description: protein kinase family [Arabidopsis thaliana]
  misc_feature (1)..(251): NCBI GI NO: 22328878 NR Description: expressed protein [Arabidopsis thaliana]
MPSRLSPPDIPPLQPTPTVSDGHHRFQTLPLIIAGSLTLTGVLLILVTLLIYRRLYRNRTAPSDLISNSKSPQHYQCRRFSYSQLRRATNSFSESTHLGHGGFGSVYKADFPSGGDSLAVKVMDTSAGSLQGEREFHNELSLSSHLIGSPHVVSLLGFSSDRRGRKLILVYELMANRSLQDALLDRKCVELMDWNKRFEIATDIAKGIEFLHHCCDPIIIHGDIKPSNILLDSDFKAKIGDFGLARVKSEDFDTRILIEEEDKSKDVVEDNGSILEETESVITVFEEGNNVVNLSPETCGISVLTETVASPGEKSGLSPENCAVSILTVEVGAASPAMASIPSPETCAISVLTDTGLSPESSKLKVGSKRDWWWKQDNNGGSRGGIESGSVKDYVMEWIGSEIKKERPSNNKEWINNGDGSSSVSKKKKKEKKRKPREWWKEEFCEELTRKKRKKKKKKKRGLSSISSIDSWFHRDDGASSVHDHNLNPTKRKKRNSIDWWVDGLSGELKSVMGKKNSQDSGLWCDVNVQKSGGVSSTPSMRGTVCYIAPECGGGGVLSEKCDVYSFGVLLLVLVSGRRPLQVTASPMSEFERANLISWAKQLACNGKLLELVDKSIHSLEKEQAVLCITIALLCLQRSPVKRPTMKEIVEMLSGVSEPPHLPFEFSPSPPMGFPFKSRKKAR

SEQ ID NO: 1673 - protein, 561 aa, Arabidopsis thaliana
  peptide (1)..(561): Ceres Seq. ID no. 13591440
  misc_feature (1)..(561): NCBI GI NO: 37531832 NR Description: putative protein kinase
  misc_feature (305)..(561): NCBI GI NO: 15220862 NR Description: protein kinase family [Arabidopsis thaliana]
  misc_feature (1)..(128): NCBI GI NO: 15220862 NR Description: protein kinase family [Arabidopsis thaliana]
  misc_feature (132)..(559): NCBI GI NO: 15242183 NR Description: protein kinase family [Arabidopsis thaliana]
  misc_feature (170)..(558): NCBI GI NO: 15235063 NR Description: protein kinase family [Arabidopsis thaliana]
  misc_feature (1)..(335): NCBI GI NO: 30686865 NR Description: protein kinase family [Arabidopsis thaliana]
  misc_feature (525)..(558): NCBI GI NO: 30686865 NR Description: protein kinase family [Arabidopsis thaliana]
  misc_feature (1)..(392): NCBI GI NO: 15235063 NR Description: protein kinase family [Arabidopsis thaliana]
  misc_feature (1)..(377): NCBI GI NO: 15242183 NR Description: protein kinase family [Arabidopsis thaliana]
  misc_feature (1)..(129): NCBI GI NO: 22328878 NR Description: expressed protein [Arabidopsis thaliana]
MDTSAGSLQGEREFHNELSLSSHLIGSPHVVSLLGFSSDRRGRKLILVYELMANRSLQDALLDRKCVELMDWNKRFEIATDIAKGIEFLHHCCDPIIIHGDIKPSNILLDSDFKAKIGDFGLARVKSEDFDTRILIEEEDKSKDVVEDNGSILEETESVITVFEEGNNVVNLSPETCGISVLTETVASPGEKSGLSPENCAVSILTVEVGAASPAMASIPSPETCAISVLTDTGLSPESSKLKVGSKRDWWWKQDNNGGSRGGIESGSVKDYVMEWIGSEIKKERPSNNKEWINNGDGSSSVSKKKKKEKKRKPREWWKEEFCEELTRKKRKKKKKKKRGLSSISSIDSWFHRDDGASSVHDHNLNPTKRKKRNSIDWWVDGLSGELKSVMGKKNSQDSGLWCDVNVQKSGGVSSTPSMRGTVCYIAPECGGGGVLSEKCDVYSFGVLLLVLVSGRRPLQVTASPMSEFERANLISWAKQLACNGKLLELVDKSIHSLEKEQAVLCITIALLCLQRSPVKRPTMKEIVEMLSGVSEPPHLPFEFSPSPPMGFPFKSRKKAR

SEQ ID NO: 1674 - protein, 510 aa, Arabidopsis thaliana
  peptide (1)..(510): Ceres Seq. ID no. 13591441
  misc_feature (1)..(510): NCBI GI NO: 37531832 NR Description: putative protein kinase
  misc_feature (254)..(510): NCBI GI NO: 15220862 NR Description: protein kinase family [Arabidopsis thaliana]
  misc_feature (1)..(77): NCBI GI NO: 15220862 NR Description: protein kinase family [Arabidopsis thaliana]
  misc_feature (81)..(508): NCBI GI NO: 15242183 NR Description: protein kinase family [Arabidopsis thaliana]
  misc_feature (119)..(507): NCBI GI NO: 15235063 NR Description: protein kinase family [Arabidopsis thaliana]
  misc_feature (1)..(284): NCBI GI NO: 30686865 NR Description: protein kinase family [Arabidopsis thaliana]
  misc_feature (474)..(507): NCBI GI NO: 30686865 NR Description: protein kinase family [Arabidopsis thaliana]
  misc_feature (1)..(341): NCBI GI NO: 15235063 NR Description: protein kinase family [Arabidopsis thaliana]
  misc_feature (1)..(326): NCBI GI NO: 15242183 NR Description: protein kinase family [Arabidopsis thaliana]
  misc_feature (1)..(78): NCBI GI NO: 22328878 NR Description: expressed protein [Arabidopsis thaliana]
MANRSLQDALLDRKCVELMDWNKRFEIATDIAKGIEFLHHCCDPIIIHGDIKPSNILLDSDFKAKIGDFGLARVKSEDFDTRILIEEEDKSKDVVEDNGSILEETESVITVFEEGNNVVNLSPETCGISVLTETVASPGEKSGLSPENCAVSILTVEVGAASPAMASIPSPETCAISVLTDTGLSPESSKLKVGSKRDWWWKQDNNGGSRGGIESGSVKDYVMEWIGSEIKKERPSNNKEWINNGDGSSSVSKKKKKEKKRKPREWWKEEFCEELTRKKRKKKKKKKRGLSSISSIDSWFHRDDGASSVHDHNLNPTKRKKRNSIDWWVDGLSGELKSVMGKKNSQDSGLWCDVNVQKSGGVSSTPSMRGTVCYIAPECGGGGVLSEKCDVYSFGVLLLVLVSGRRPLQVTASPMSEFERANLISWAKQLACNGKLLELVDKSIHSLEKEQAVLCITIALLCLQRSPVKRPTMKEIVEMLSGVSEPPHLPFEFSPSPPMGFPFKSRKKAR

SEQ ID NO: 1675 - DNA, 875 bp, Arabidopsis thaliana
  misc_feature (1)..(875): Ceres Seq. ID no. 12439596
atcagcgattggagtatagaaaaggtttaagcaaaatccatcaaagaagagttccttttcacaataatggcggatgaagtgatacttttggatttttggccgagtccattcggagtaagagcgagaatcgcgctgagagagaaaggagttgagtttgagtacagagaagagaatctgagagacaagagccctttgcttctccagatgaatccggttcacaagaagattccggttctcatccacaatggtaaaccggtttgtgaatccatgaacgttgttcagtacatcgacgaggtttggtccgacaaaaacccaatccttccttctgatccttaccagagagctcaagccagattttgggttgatttcgtggacaccaagctgtttgagccagcggataagatttggcaaacgaaaggagaggaacaagagacagccaagaaagagtatatagaagcactcaagattcttgaaactgagcttggagacaaaccttactttggtggagataccttcgggttcgtagacattgccatgactggatattacagctggttcgaagcatcagagaaactagctaacttcagcatcgaaccagagtgtcccacactgatggcttcggctaagaggtgtttgcagagagaaagcgtggttcagtcccttcatgattctgagaaaatccttgcgtttgcctataagattaggaagatatactgtgtctaaaagtcttattgattctttgaacgaaaaaaaaagtcttagaatttcatctcacgttacgtttctatgttcactgatttctatatgattttgttgtacctttctttctattttcaccaaataatatttgtttcttgtcactcaagaatatttgt

SEQ ID NO: 1676 - protein, 218 aa, Arabidopsis thaliana
  peptide (1)..(218): Ceres Seq. ID no. 12439597
  misc_feature (85)..(193): Pfam Name: Pfam Description:  Glutathione S-transferase, C-terminal domain
  misc_feature (1)..(218): NCBI GI NO: 15218304 NR Description: glutathione transferase, putative
  misc_feature (1)..(218): NCBI GI NO: 21554364 NR Description: glutathione transferase, putative
  misc_feature (1)..(216): NCBI GI NO: 8052535 NR Description: F3F9.13 [Arabidopsis thaliana]
  misc_feature (1)..(214): NCBI GI NO: 18411929 NR Description: glutathione transferase, putative
  misc_feature (1)..(214): NCBI GI NO: 21592644 NR Description: glutathione transferase, putative
  misc_feature (1)..(214): NCBI GI NO: 7447302 NR Description: probable glutathione transferase (EC 2
  misc_feature (1)..(214): NCBI GI NO: 7447307 NR Description: glutathione transferase (EC 2.5.1.18) - papaya
  misc_feature (1)..(214): NCBI GI NO: 21592638 NR Description: 2
  misc_feature (1)..(214): NCBI GI NO: 15218311 NR Description: glutathione transferase, putative
  misc_feature (1)..(214): NCBI GI NO: 8052534 NR Description: F3F9.11 [Arabidopsis thaliana]
MADEVILLDFWPSPFGVRARIALREKGVEFEYREENLRDKSPLLLQMNPVHKKIPVLIHNGKPVCESMNVVQYIDEVWSDKNPILPSDPYQRAQARFWVDFVDTKLFEPADKIWQTKGEEQETAKKEYIEALKILETELGDKPYFGGDTFGFVDIAMTGYYSWFEASEKLANFSIEPECPTLMASAKRCLQRESVVQSLHDSEKILAFAYKIRKIYCV

SEQ ID NO: 1677 - protein, 172 aa, Arabidopsis thaliana
  peptide (1)..(172): Ceres Seq. ID no. 12439598
  misc_feature (39)..(147): Pfam Name: Pfam Description:  Glutathione S-transferase, C-terminal domain
  misc_feature (1)..(172): NCBI GI NO: 15218304 NR Description: glutathione transferase, putative
  misc_feature (1)..(172): NCBI GI NO: 21554364 NR Description: glutathione transferase, putative
  misc_feature (1)..(170): NCBI GI NO: 8052535 NR Description: F3F9.13 [Arabidopsis thaliana]
  misc_feature (1)..(168): NCBI GI NO: 18411929 NR Description: glutathione transferase, putative
  misc_feature (1)..(168): NCBI GI NO: 21592644 NR Description: glutathione transferase, putative
  misc_feature (1)..(168): NCBI GI NO: 7447302 NR Description: probable glutathione transferase (EC 2
  misc_feature (1)..(168): NCBI GI NO: 7447307 NR Description: glutathione transferase (EC 2.5.1.18) - papaya
  misc_feature (1)..(168): NCBI GI NO: 21592638 NR Description: 2
  misc_feature (1)..(168): NCBI GI NO: 15218311 NR Description: glutathione transferase, putative
  misc_feature (1)..(168): NCBI GI NO: 8052534 NR Description: F3F9.11 [Arabidopsis thaliana]
MNPVHKKIPVLIHNGKPVCESMNVVQYIDEVWSDKNPILPSDPYQRAQARFWVDFVDTKLFEPADKIWQTKGEEQETAKKEYIEALKILETELGDKPYFGGDTFGFVDIAMTGYYSWFEASEKLANFSIEPECPTLMASAKRCLQRESVVQSLHDSEKILAFAYKIRKIYCV

SEQ ID NO: 1678 - protein, 151 aa, Arabidopsis thaliana
  peptide (1)..(151): Ceres Seq. ID no. 12439599
  misc_feature (18)..(126): Pfam Name: Pfam Description:  Glutathione S-transferase, C-terminal domain
  misc_feature (1)..(151): NCBI GI NO: 15218304 NR Description: glutathione transferase, putative
  misc_feature (1)..(151): NCBI GI NO: 21554364 NR Description: glutathione transferase, putative
  misc_feature (1)..(149): NCBI GI NO: 8052535 NR Description: F3F9.13 [Arabidopsis thaliana]
  misc_feature (1)..(147): NCBI GI NO: 18411929 NR Description: glutathione transferase, putative
  misc_feature (1)..(147): NCBI GI NO: 21592644 NR Description: glutathione transferase, putative
  misc_feature (1)..(147): NCBI GI NO: 7447302 NR Description: probable glutathione transferase (EC 2
  misc_feature (1)..(147): NCBI GI NO: 7447307 NR Description: glutathione transferase (EC 2.5.1.18) - papaya
  misc_feature (1)..(147): NCBI GI NO: 21592638 NR Description: 2
  misc_feature (1)..(147): NCBI GI NO: 15218311 NR Description: glutathione transferase, putative
  misc_feature (1)..(147): NCBI GI NO: 8052534 NR Description: F3F9.11 [Arabidopsis thaliana]
MNVVQYIDEVWSDKNPILPSDPYQRAQARFWVDFVDTKLFEPADKIWQTKGEEQETAKKEYIEALKILETELGDKPYFGGDTFGFVDIAMTGYYSWFEASEKLANFSIEPECPTLMASAKRCLQRESVVQSLHDSEKILAFAYKIRKIYCV

SEQ ID NO: 1679 - DNA, 769 bp, Arabidopsis thaliana
  misc_feature (1)..(769): Ceres Seq. ID no. 13489059
atggcggaggaatcgtacgacgaagagtgcgactacctattcaaggcggtgctgataggagactccgccgtcggaaaatcaaacctcctttcgaggttctcgagagatgagtttcggttagactctaaaccgaccatcggagtagactttgcttaccggaatgttcgcgtgggcgataagactataaaggctcagatatgggacaccgccggccaagaaagatttagagcaataacgagttcgtattaccgtggagccttgggagctttactaatctacgacatcacaagacgaatcactttcaaaaacattgagaaatggttgtcggagctcagaggcttctccagtcccgagactgtcgttgttctcgtcggtaacaaatccgatctcgggcagtctagagaagttgaagaagaagagggtaagactctagcagaatcagaaggtctctattttctcgaaacatcggctttagagaaccaaaacgttgaagaagcgtttctaagcatgatcggacggatacatgaggttttgactcagaaaatcgttttagacaatagactcaacggtgacggtaacaacgaaagtaacggtgctgtcgttccgcccggtaaagagattgtgaatattcatgaagttaccgccactcgaccgttgagtacttctttgtccaattgttgctacaagtaaataaactgatgatcatctatttttatattgttatatgatatattcgataatgtagagttttataattgttgctacaagt

SEQ ID NO: 1680 - protein, 229 aa, Arabidopsis thaliana
  peptide (1)..(229): Ceres Seq. ID no. 13489060
  misc_feature (15)..(176): Pfam Name: Pfam Description:  Ras family
  misc_feature (1)..(207): NCBI GI NO: 9719734 NR Description: Contains similarity to ras-related GTP binding protein fromOryza sativa gb|D13758 and is a member of the Ras PF|00071 family
  misc_feature (1)..(207): NCBI GI NO: 15221005 NR Description: Ras family GTP-binding protein
  misc_feature (72)..(207): NCBI GI NO: 8671779 NR Description: T10O22.18 [Arabidopsis thaliana]
  misc_feature (1)..(74): NCBI GI NO: 8671779 NR Description: T10O22.18 [Arabidopsis thaliana]
  misc_feature (1)..(229): NCBI GI NO: 15219515 NR Description: Ras family GTP-binding protein
  misc_feature (1)..(227): NCBI GI NO: 1370152 NR Description: RAB11F [Lotus japonicus]
  misc_feature (1)..(207): NCBI GI NO: 15242483 NR Description: GTP-binding protein, putative
  misc_feature (7)..(227): NCBI GI NO: 29294722 NR Description: Unknown (protein for MGC:55760) [Danio rerio]
  misc_feature (1)..(227): NCBI GI NO: 15219955 NR Description: GTP binding protein, putative
  misc_feature (1)..(207): NCBI GI NO: 21536533 NR Description: Rab-type small GTP-binding protein-like
MAEESYDEECDYLFKAVLIGDSAVGKSNLLSRFSRDEFRLDSKPTIGVDFAYRNVRVGDKTIKAQIWDTAGQERFRAITSSYYRGALGALLIYDITRRITFKNIEKWLSELRGFSSPETVVVLVGNKSDLGQSREVEEEEGKTLAESEGLYFLETSALENQNVEEAFLSMIGRIHEVLTQKIVLDNRLNGDGNNESNGAVVPPGKEIVNIHEVTATRPLSTSLSNCCYK

SEQ ID NO: 1681 - DNA, 609 bp, Arabidopsis thaliana
  misc_feature (1)..(609): Ceres Seq. ID no. 13576687
acaaccaaaaacaagaacaacagacacatagagatgagccggtgcggctctcttgggctctatgccccaaatgctttgccatctctctccttgaagccacgcagtgtcaaatctcctttctgtattacatctcacaccaaacccaacgacactcttcttcataatgttaacaagatgagagcaaaggcctgtgatatacttggagcaaagaagacaatcttggcagctcaactcggggcagttcttgccacgattgaccatccagccttagcaataacaggagttaacaaccagcaggaattgagcagtgttgtgctcgatatcgggatcatatccgtttggtacttcctagtaatgccaccaatcatcatgaactggctaagagtaagatggtacagaaggaagttcttcgagatgtatttacagttcatgttcgtcttcatgttcttccccgggctactgttatgggcaccatttctcaacttcaggaagttcccaagagatcctaatatgaagaatccttgggacaaaccaacagacccagactctataaagaacgtttacctcaaatacccatatgcgacgccagaagattacgatctcgattaa

SEQ ID NO: 1682 - protein, 202 aa, Arabidopsis thaliana
  peptide (1)..(202): Ceres Seq. ID no. 13576688
  misc_feature (12)..(202): NCBI GI NO: 15223241 NR Description: expressed protein [Arabidopsis thaliana]
  misc_feature (12)..(152): NCBI GI NO: 25373317 NR Description: hypothetical protein F15H11.1
  misc_feature (104)..(170): NCBI GI NO: 22298248 NR Description: NADH dehydrogenase subunit
  misc_feature (96)..(163): NCBI GI NO: 33861127 NR Description: NADH dehydrogenase subunit NdhL (ndhL)
  misc_feature (99)..(163): NCBI GI NO: 33866055 NR Description: possible inorganic carbon transport protein
  misc_feature (111)..(167): NCBI GI NO: 22652012 NR Description: NADH dehydrogenase subunit L
  misc_feature (115)..(167): NCBI GI NO: 17232301 NR Description: inorganic carbon transport [Nostoc sp. PCC 7120]
  misc_feature (115)..(163): NCBI GI NO: 33862740 NR Description: hypothetical
  misc_feature (115)..(167): NCBI GI NO: 1085867 NR Description: hypothetical 8
TTKNKNNRHIEMSRCGSLGLYAPNALPSLSLKPRSVKSPFCITSHTKPNDTLLHNVNKMRAKACDILGAKKTILAAQLGAVLATIDHPALAITGVNNQQELSSVVLDIGIISVWYFLVMPPIIMNWLRVRWYRRKFFEMYLQFMFVFMFFPGLLLWAPFLNFRKFPRDPNMKNPWDKPTDPDSIKNVYLKYPYATPEDYDLD

SEQ ID NO: 1683 - protein, 191 aa, Arabidopsis thaliana
  peptide (1)..(191): Ceres Seq. ID no. 13576689
  misc_feature (1)..(191): NCBI GI NO: 15223241 NR Description: expressed protein [Arabidopsis thaliana]
  misc_feature (1)..(141): NCBI GI NO: 25373317 NR Description: hypothetical protein F15H11.1
  misc_feature (93)..(159): NCBI GI NO: 22298248 NR Description: NADH dehydrogenase subunit
  misc_feature (85)..(152): NCBI GI NO: 33861127 NR Description: NADH dehydrogenase subunit NdhL (ndhL)
  misc_feature (88)..(152): NCBI GI NO: 33866055 NR Description: possible inorganic carbon transport protein
  misc_feature (100)..(156): NCBI GI NO: 22652012 NR Description: NADH dehydrogenase subunit L
  misc_feature (104)..(156): NCBI GI NO: 17232301 NR Description: inorganic carbon transport [Nostoc sp. PCC 7120]
  misc_feature (104)..(152): NCBI GI NO: 33862740 NR Description: hypothetical
  misc_feature (104)..(156): NCBI GI NO: 1085867 NR Description: hypothetical 8
MSRCGSLGLYAPNALPSLSLKPRSVKSPFCITSHTKPNDTLLHNVNKMRAKACDILGAKKTILAAQLGAVLATIDHPALAITGVNNQQELSSVVLDIGIISVWYFLVMPPIIMNWLRVRWYRRKFFEMYLQFMFVFMFFPGLLLWAPFLNFRKFPRDPNMKNPWDKPTDPDSIKNVYLKYPYATPEDYDLD

SEQ ID NO: 1684 - protein, 144 aa, Arabidopsis thaliana
  peptide (1)..(144): Ceres Seq. ID no. 13576690
  misc_feature (1)..(144): NCBI GI NO: 15223241 NR Description: expressed protein [Arabidopsis thaliana]
  misc_feature (1)..(94): NCBI GI NO: 25373317 NR Description: hypothetical protein F15H11.1
  misc_feature (46)..(112): NCBI GI NO: 22298248 NR Description: NADH dehydrogenase subunit
  misc_feature (38)..(105): NCBI GI NO: 33861127 NR Description: NADH dehydrogenase subunit NdhL (ndhL)
  misc_feature (41)..(105): NCBI GI NO: 33866055 NR Description: possible inorganic carbon transport protein
  misc_feature (53)..(109): NCBI GI NO: 22652012 NR Description: NADH dehydrogenase subunit L
  misc_feature (57)..(109): NCBI GI NO: 17232301 NR Description: inorganic carbon transport [Nostoc sp. PCC 7120]
  misc_feature (57)..(105): NCBI GI NO: 33862740 NR Description: hypothetical
  misc_feature (57)..(109): NCBI GI NO: 1085867 NR Description: hypothetical 8
MRAKACDILGAKKTILAAQLGAVLATIDHPALAITGVNNQQELSSVVLDIGIISVWYFLVMPPIIMNWLRVRWYRRKFFEMYLQFMFVFMFFPGLLLWAPFLNFRKFPRDPNMKNPWDKPTDPDSIKNVYLKYPYATPEDYDLD

SEQ ID NO: 1685 - DNA, 1482 bp, Arabidopsis thaliana
  misc_feature (1)..(1482): Ceres Seq. ID no. 12348643
aaatggatagtgaaggagcttcaagcgagtcttcttcttctggagatcagctcgagaagtggacagagtagtttcacatttgatttcagtttcattccgcacaatcaaatcggttgatgatttgtttgacttctttcagagagcaggatgagctgaagaagaaactgatcgcgtacgatgacttcacatggaagttatcttcatcaacggaactgtctcagggatcggagatacttaagtatgttggaggtgtagacatgagcttttgcaaagaagattcttccgtcgcatgcgcttgtctcgtcgttcttgagcttccttctctccgtgtagtccaccatgacttctctcttctccgcctccatgttccttatgtccctggatttcttgcctttcgtgaggctccggttcttttgcagattctgcagaagatgagagatgagaagcatccattctatcctcaggtactgatggtggatggaaatggaatacttcatccacgaggtataaacacacaactttacctttgttttgtagttgcatttcaagctctgtaattatggtgttagatgtaattgtcttctataggatttggcttggcgtgtcatttaggtgttcttgctcacctaccaaccattggggtcggaaagaatctgcatcatgtggatggtctgaatcaatctgaggttaaacagtcgcttcagctccaaataaacgagcatgagcaaactatcactttggtaggaaactctggaattacatggggagtagtaagtgactttgactgaacatctactgtagttgttgtgtctctttggtaataccgcgttatattagtagtgaattatcagttttagcaacgaaacttctccatagttgtggttttgataatcttgtgtaagatagtgaatttaatgatcaagttttacatattacgttcaacagggatttaggccaactctgagttctctaaagcccatatatgtatcggttggccatcgcatatcactggactctgccgttgaagttgtcaagataacctgcaagtaccgtgttccagaacctattagacaggcagatattagatcaagagcatatctccagaagcatcaaactgagtcttttaaagaactggcagtgcgaccaccggatcagactgaaccttaatccctcaagcaaccaagaacactattccacattacatagaaactctccaaagtctttaccaaagattgttaaatggacagattcaggcactgaagatccgccccaattatctccttcatttatctcactgacttgaagattgcaagctaaccaaggtaatcatgttatatccgatacattggaatttcctttccatacataccttaaacaagtgtaaatagaaaggctaggcaactggtaatttggttgtttgggcactgtatattgggagattttggggttctcgacaaacaattctatagctttgggtttggt

SEQ ID NO: 1686 - protein, 146 aa, Arabidopsis thaliana
  peptide (1)..(146): Ceres Seq. ID no. 12348644
  misc_feature (9)..(137): NCBI GI NO: 18417747 NR Description: putative protein; protein id: At4g31150
  misc_feature (9)..(146): NCBI GI NO: 7486498 NR Description: hypothetical protein F6E21
  misc_feature (10)..(137): NCBI GI NO: 28828773 NR Description: similar to Arabidopsis thaliana (Mouse-ear cress)
  misc_feature (8)..(137): NCBI GI NO: 31542775 NR Description: hypothetical protein FLJ35220 [Homo sapiens]
  misc_feature (8)..(137): NCBI GI NO: 34875599 NR Description: similar to chromosome 17 open reading frame 27
  misc_feature (9)..(73): NCBI GI NO: 21751158 NR Description: unnamed protein product [Homo sapiens]
  misc_feature (8)..(73): NCBI GI NO: 40555767 NR Description: Unknown (protein for MGC:74455) [Homo sapiens]
  misc_feature (79)..(137): NCBI GI NO: 28893575 NR Description: RIKEN cDNA A730011L01 gene [Mus musculus]
  misc_feature (46)..(130): NCBI GI NO: 15606007 NR Description: hypothetical protein [Aquifex aeolicus]
  misc_feature (11)..(137): NCBI GI NO: 19115244 NR Description: putative endonuclease [Schizosaccharomyces pombe]
MICLTSFREQDELKKKLIAYDDFTWKLSSSTELSQGSEILKYVGGVDMSFCKEDSSVACACLVVLELPSLRVVHHDFSLLRLHVPYVPGFLAFREAPVLLQILQKMRDEKHPFYPQVLMVDGNGILHPRGINTQLYLCFVVAFQAL

SEQ ID NO: 1687 - protein, 99 aa, Arabidopsis thaliana
  peptide (1)..(99): Ceres Seq. ID no. 12348645
  misc_feature (1)..(90): NCBI GI NO: 18417747 NR Description: putative protein; protein id: At4g31150
  misc_feature (1)..(99): NCBI GI NO: 7486498 NR Description: hypothetical protein F6E21
  misc_feature (1)..(90): NCBI GI NO: 28828773 NR Description: similar to Arabidopsis thaliana (Mouse-ear cress)
  misc_feature (1)..(90): NCBI GI NO: 31542775 NR Description: hypothetical protein FLJ35220 [Homo sapiens]
  misc_feature (1)..(90): NCBI GI NO: 34875599 NR Description: similar to chromosome 17 open reading frame 27
  misc_feature (1)..(26): NCBI GI NO: 21751158 NR Description: unnamed protein product [Homo sapiens]
  misc_feature (1)..(26): NCBI GI NO: 40555767 NR Description: Unknown (protein for MGC:74455) [Homo sapiens]
  misc_feature (32)..(90): NCBI GI NO: 28893575 NR Description: RIKEN cDNA A730011L01 gene [Mus musculus]
  misc_feature (1)..(83): NCBI GI NO: 15606007 NR Description: hypothetical protein [Aquifex aeolicus]
  misc_feature (1)..(90): NCBI GI NO: 19115244 NR Description: putative endonuclease [Schizosaccharomyces pombe]
MSFCKEDSSVACACLVVLELPSLRVVHHDFSLLRLHVPYVPGFLAFREAPVLLQILQKMRDEKHPFYPQVLMVDGNGILHPRGINTQLYLCFVVAFQAL

SEQ ID NO: 1688 - DNA, 1205 bp, Arabidopsis thaliana
  misc_feature (1)..(1205): Ceres Seq. ID no. 13504812
aattgaaaaactttaactcttttttttttcgtttttgggatttgccaacttcgatttctttggttgggatttgtttatacgtttccttcgatttcgctcgagcttcgatctgaaaagcttcgagcttttagacaaatccatggattcttcgccagtttctgctcgattcgatatattcgagatttatcgtagattctgtgctattcgatcaggacaacaattgtgtaataagaaaccctgtgatggcgaagaatctcaaagatttaacttgtctaaagaagcaataactcagctcttatatctagtagagaataagtttcaagctaggaactcgatttttgatgaattgtttaagttgatgtcacggctagacttaatggtggactttacggagtttacttgcttttacgattttgttttctttatgtgccgcgagaatgggcaaaagaatataactataagtagagctattactgcatggaaacttgttttggctgggagatttaggttacttaaccgctggtgtgactttatcgagaaaaatcaacggcacaatatttcagaagatacttggcaacaagtcttggcgtttagtcgttgtgtacatgagaatctagaaggatatgactctgaaggtgcatggcctgtcctaatagatgactttgtcgagcatatgtacagtattttaggaccgaataaggacactagcttgttctgcaaatgtggtgacacagaatctgaatcatgcctctatcaagaagatgagcatcacaaagattatcgccgcccacacacgggtttaagaaacattccaggtttaaagagaaaaacatcgaagaagaatgacgaagaagaagaagatgaagatgaagaagtgttagaaacccaaaactcttcttctttgctaaacttcaaacgaatcaaaaccagcaacagtccaaggtgttcatcaaagtccccttgttcaatcgagcgaagtctttcacaaggttttgcgagtcttttatcgactggagataaaccatgaaacactggaacatcgtcgcacatatatatagattatacaaagcaaaagaattctcaaggtgttgtctcattttttcctacctaaatacctcacttctttaaatgacagttgagttcttctttgttgtaagctatagaataatttgttccttcaatcattcataatttgatcttattcc

SEQ ID NO: 1689 - protein, 295 aa, Arabidopsis thaliana
  peptide (1)..(295): Ceres Seq. ID no. 13504813
  misc_feature (145)..(265): Pfam Name: DUF298 Pfam Description: Domain of unknown function
  misc_feature (1)..(295): NCBI GI NO: 15228555 NR Description: expressed protein [Arabidopsis thaliana]
  misc_feature (45)..(243): NCBI GI NO: 33146550 NR Description: leucine zipper protein-like
  misc_feature (45)..(180): NCBI GI NO: 34913252 NR Description: P0011H09.36
  misc_feature (68)..(177): NCBI GI NO: 24664675 NR Description: CG7427-PA [Drosophila melanogaster]
  misc_feature (68)..(192): NCBI GI NO: 7019967 NR Description: unnamed protein product [Homo sapiens]
  misc_feature (68)..(192): NCBI GI NO: 34784818 NR Description: RP42 homolog [Homo sapiens]
  misc_feature (68)..(180): NCBI GI NO: 15292985 NR Description: unknown protein [Arabidopsis thaliana]
  misc_feature (68)..(180): NCBI GI NO: 18399737 NR Description: expressed protein [Arabidopsis thaliana]
  misc_feature (68)..(191): NCBI GI NO: 34784120 NR Description: Unknown (protein for MGC:66414) [Danio rerio]
  misc_feature (86)..(191): NCBI GI NO: 18700658 NR Description: leucine zipper protein [Homo sapiens]
MDSSPVSARFDIFEIYRRFCAIRSGQQLCNKKPCDGEESQRFNLSKEAITQLLYLVENKFQARNSIFDELFKLMSRLDLMVDFTEFTCFYDFVFFMCRENGQKNITISRAITAWKLVLAGRFRLLNRWCDFIEKNQRHNISEDTWQQVLAFSRCVHENLEGYDSEGAWPVLIDDFVEHMYSILGPNKDTSLFCKCGDTESESCLYQEDEHHKDYRRPHTGLRNIPGLKRKTSKKNDEEEEDEDEEVLETQNSSSLLNFKRIKTSNSPRCSSKSPCSIERSLSQGFASLLSTGDKP

SEQ ID NO: 1690 - protein, 222 aa, Arabidopsis thaliana
  peptide (1)..(222): Ceres Seq. ID no. 13504814
  misc_feature (72)..(192): Pfam Name: DUF298 Pfam Description: Domain of unknown function
  misc_feature (1)..(222): NCBI GI NO: 15228555 NR Description: expressed protein [Arabidopsis thaliana]
  misc_feature (1)..(170): NCBI GI NO: 33146550 NR Description: leucine zipper protein-like
  misc_feature (1)..(107): NCBI GI NO: 34913252 NR Description: P0011H09.36
  misc_feature (1)..(104): NCBI GI NO: 24664675 NR Description: CG7427-PA [Drosophila melanogaster]
  misc_feature (1)..(119): NCBI GI NO: 7019967 NR Description: unnamed protein product [Homo sapiens]
  misc_feature (1)..(119): NCBI GI NO: 34784818 NR Description: RP42 homolog [Homo sapiens]
  misc_feature (1)..(107): NCBI GI NO: 15292985 NR Description: unknown protein [Arabidopsis thaliana]
  misc_feature (1)..(107): NCBI GI NO: 18399737 NR Description: expressed protein [Arabidopsis thaliana]
  misc_feature (1)..(118): NCBI GI NO: 34784120 NR Description: Unknown (protein for MGC:66414) [Danio rerio]
  misc_feature (13)..(118): NCBI GI NO: 18700658 NR Description: leucine zipper protein [Homo sapiens]
MSRLDLMVDFTEFTCFYDFVFFMCRENGQKNITISRAITAWKLVLAGRFRLLNRWCDFIEKNQRHNISEDTWQQVLAFSRCVHENLEGYDSEGAWPVLIDDFVEHMYSILGPNKDTSLFCKCGDTESESCLYQEDEHHKDYRRPHTGLRNIPGLKRKTSKKNDEEEEDEDEEVLETQNSSSLLNFKRIKTSNSPRCSSKSPCSIERSLSQGFASLLSTGDKP

SEQ ID NO: 1691 - protein, 216 aa, Arabidopsis thaliana
  peptide (1)..(216): Ceres Seq. ID no. 13504815
  misc_feature (66)..(186): Pfam Name: DUF298 Pfam Description: Domain of unknown function
  misc_feature (1)..(216): NCBI GI NO: 15228555 NR Description: expressed protein [Arabidopsis thaliana]
  misc_feature (1)..(164): NCBI GI NO: 33146550 NR Description: leucine zipper protein-like
  misc_feature (1)..(101): NCBI GI NO: 34913252 NR Description: P0011H09.36
  misc_feature (1)..(98): NCBI GI NO: 24664675 NR Description: CG7427-PA [Drosophila melanogaster]
  misc_feature (1)..(113): NCBI GI NO: 7019967 NR Description: unnamed protein product [Homo sapiens]
  misc_feature (1)..(113): NCBI GI NO: 34784818 NR Description: RP42 homolog [Homo sapiens]
  misc_feature (1)..(101): NCBI GI NO: 15292985 NR Description: unknown protein [Arabidopsis thaliana]
  misc_feature (1)..(101): NCBI GI NO: 18399737 NR Description: expressed protein [Arabidopsis thaliana]
  misc_feature (1)..(112): NCBI GI NO: 34784120 NR Description: Unknown (protein for MGC:66414) [Danio rerio]
  misc_feature (7)..(112): NCBI GI NO: 18700658 NR Description: leucine zipper protein [Homo sapiens]
MVDFTEFTCFYDFVFFMCRENGQKNITISRAITAWKLVLAGRFRLLNRWCDFIEKNQRHNISEDTWQQVLAFSRCVHENLEGYDSEGAWPVLIDDFVEHMYSILGPNKDTSLFCKCGDTESESCLYQEDEHHKDYRRPHTGLRNIPGLKRKTSKKNDEEEEDEDEEVLETQNSSSLLNFKRIKTSNSPRCSSKSPCSIERSLSQGFASLLSTGDKP

SEQ ID NO: 1692 - DNA, 1670 bp, Arabidopsis thaliana
  misc_feature (1)..(1670): Ceres Seq. ID no. 12562683
tctctctctctctttagctcttttttttttgttttcattaaagtttttattttattttctaccaaccaaaagcttttctctttggtttctcttatttagcttctaaccttgaggagaatcataccagaggattgaagtttgaaccttcaaagatcaaaatcaagaaaccaaaaaaaaacaaaaaaaatgtgggatctaaacgacgcaccacaccaaacacaaagagaagaagaatctgaagagttttgttattcttcaccaagtaaacgggttggatctttctctaattcaagctcttcagctgttgttatcgaagatggatccgatgacgatgaacttaaccgggtcagacccaataacccacttgtcacccatcagttcttccctgagatggattctaacggcggtggtgttgcttctggctttcctcgggctcactggtttggtgttaagttttgtcagtcggatctagccaccggatcgtccgcgggtaaagctaccaacgttgccgctgccgtagtggagccggcacagccgttgaaaaagagtcggcgtggaccaagatcaagaagttctcagtatagaggtgttacgttttaccggcgtaccggaagatgggaatctcatatttgggactgtgggaaacaagtttacttaggtggatttgacactgctcatgcagcagctcgagcatatgatagagctgctattaaattccgtggagtagaagcggatatcaatttcaacatcgacgattatgatgatgacttgaaacagatgactaatttaaccaaggaagagttcgtacacgtacttcgccgacaaagcacaggcttccctcgaggaagttcgaagtatagaggtgtcactttgcataagtgtggtcgttgggaagctcgaatgggtcaattcttaggcaaaaagtatgtttatttgggtttgttcgacaccgaggtcgaagctgctagagcttacgataaagctgcaatcaaatgtaacggcaaagacgccgtgaccaactttgatccgagtatttacgatgaggaactcaatgccgagtcatcagggaatcctactactccacaagatcacaacctcgatttgagcttgggaaattcggctaattcgaagcataaaagtcaagatatgcggctcaggatgaaccaacaacaacaagattctctccactctaatgaagttcttggattaggtcaaaccggaatgcttaaccatactcccaattcaaaccaccaatttccgggcagcagcaacattggtagcggaggcggattctcactgtttccggcggctgagaaccaccggtttgatggtcgggcctcgacgaaccaagtgttgacaaatgctgcagcatcatcaggattctctcctcatcatcacaatcagatttttaattctacttctactcctcatcaaaattggctgcagacaaatggcttccaacctcctctcatgagaccttcttgaatcttttatatttttaaggtttattattatataagaaaaacaaaaatgaacctttgaaatccccacatgttcttggtcatttcattaatcatcggcttatattttgcttattttcccctaaatcctcttgttaacttaggcgaacaaaaaaaattaatggaaatctttttccctccatcggttac

SEQ ID NO: 1693 - protein, 432 aa, Arabidopsis thaliana
  peptide (1)..(432): Ceres Seq. ID no. 12562684
  misc_feature (129)..(192): Pfam Name: Pfam Description:  AP2 domain
  misc_feature (1)..(432): NCBI GI NO: 15234566 NR Description: apetala2 protein; protein id: At4g36920.1
  misc_feature (1)..(420): NCBI GI NO: 28894443 NR Description: LIPLESS1 [Antirrhinum majus]
  misc_feature (1)..(407): NCBI GI NO: 28894445 NR Description: LIPLESS2 [Antirrhinum majus]
  misc_feature (14)..(427): NCBI GI NO: 13173164 NR Description: APETAL2-like protein [Pisum sativum]
  misc_feature (239)..(432): NCBI GI NO: 22135898 NR Description: APETALA2 protein [Arabidopsis thaliana]
  misc_feature (61)..(319): NCBI GI NO: 5081555 NR Description: PHAP2A protein [Petunia x hybrida]
  misc_feature (11)..(338): NCBI GI NO: 21717332 NR Description: transcription factor AHAP2 [Malus x domestica]
  misc_feature (24)..(320): NCBI GI NO: 38345500 NR Description: OSJNBa0010D21.13
  misc_feature (61)..(311): NCBI GI NO: 11181610 NR Description: APETALA2-related transcription factor 1
  misc_feature (61)..(374): NCBI GI NO: 15240234 NR Description: apetala2 family protein
MWDLNDAPHQTQREEESEEFCYSSPSKRVGSFSNSSSSAVVIEDGSDDDELNRVRPNNPLVTHQFFPEMDSNGGGVASGFPRAHWFGVKFCQSDLATGSSAGKATNVAAAVVEPAQPLKKSRRGPRSRSSQYRGVTFYRRTGRWESHIWDCGKQVYLGGFDTAHAAARAYDRAAIKFRGVEADINFNIDDYDDDLKQMTNLTKEEFVHVLRRQSTGFPRGSSKYRGVTLHKCGRWEARMGQFLGKKYVYLGLFDTEVEAARAYDKAAIKCNGKDAVTNFDPSIYDEELNAESSGNPTTPQDHNLDLSLGNSANSKHKSQDMRLRMNQQQQDSLHSNEVLGLGQTGMLNHTPNSNHQFPGSSNIGSGGGFSLFPAAENHRFDGRASTNQVLTNAAASSGFSPHHHNQIFNSTSTPHQNWLQTNGFQPPLMRPS

SEQ ID NO: 1694 - protein, 364 aa, Arabidopsis thaliana
  peptide (1)..(364): Ceres Seq. ID no. 12562685
  misc_feature (61)..(124): Pfam Name: Pfam Description:  AP2 domain
  misc_feature (1)..(364): NCBI GI NO: 15234566 NR Description: apetala2 protein; protein id: At4g36920.1
  misc_feature (1)..(352): NCBI GI NO: 28894443 NR Description: LIPLESS1 [Antirrhinum majus]
  misc_feature (1)..(339): NCBI GI NO: 28894445 NR Description: LIPLESS2 [Antirrhinum majus]
  misc_feature (1)..(359): NCBI GI NO: 13173164 NR Description: APETAL2-like protein [Pisum sativum]
  misc_feature (171)..(364): NCBI GI NO: 22135898 NR Description: APETALA2 protein [Arabidopsis thaliana]
  misc_feature (1)..(251): NCBI GI NO: 5081555 NR Description: PHAP2A protein [Petunia x hybrida]
  misc_feature (1)..(270): NCBI GI NO: 21717332 NR Description: transcription factor AHAP2 [Malus x domestica]
  misc_feature (1)..(252): NCBI GI NO: 38345500 NR Description: OSJNBa0010D21.13
  misc_feature (1)..(243): NCBI GI NO: 11181610 NR Description: APETALA2-related transcription factor 1
  misc_feature (1)..(306): NCBI GI NO: 15240234 NR Description: apetala2 family protein
MDSNGGGVASGFPRAHWFGVKFCQSDLATGSSAGKATNVAAAVVEPAQPLKKSRRGPRSRSSQYRGVTFYRRTGRWESHIWDCGKQVYLGGFDTAHAAARAYDRAAIKFRGVEADINFNIDDYDDDLKQMTNLTKEEFVHVLRRQSTGFPRGSSKYRGVTLHKCGRWEARMGQFLGKKYVYLGLFDTEVEAARAYDKAAIKCNGKDAVTNFDPSIYDEELNAESSGNPTTPQDHNLDLSLGNSANSKHKSQDMRLRMNQQQQDSLHSNEVLGLGQTGMLNHTPNSNHQFPGSSNIGSGGGFSLFPAAENHRFDGRASTNQVLTNAAASSGFSPHHHNQIFNSTSTPHQNWLQTNGFQPPLMRPS

SEQ ID NO: 1695 - protein, 235 aa, Arabidopsis thaliana
  peptide (1)..(235): Ceres Seq. ID no. 12562686
  misc_feature (24)..(88): Pfam Name: Pfam Description:  AP2 domain
  misc_feature (1)..(235): NCBI GI NO: 15234566 NR Description: apetala2 protein; protein id: At4g36920.1
  misc_feature (1)..(223): NCBI GI NO: 28894443 NR Description: LIPLESS1 [Antirrhinum majus]
  misc_feature (1)..(210): NCBI GI NO: 28894445 NR Description: LIPLESS2 [Antirrhinum majus]
  misc_feature (1)..(230): NCBI GI NO: 13173164 NR Description: APETAL2-like protein [Pisum sativum]
  misc_feature (42)..(235): NCBI GI NO: 22135898 NR Description: APETALA2 protein [Arabidopsis thaliana]
  misc_feature (1)..(122): NCBI GI NO: 5081555 NR Description: PHAP2A protein [Petunia x hybrida]
  misc_feature (1)..(141): NCBI GI NO: 21717332 NR Description: transcription factor AHAP2 [Malus x domestica]
  misc_feature (1)..(123): NCBI GI NO: 38345500 NR Description: OSJNBa0010D21.13
  misc_feature (1)..(114): NCBI GI NO: 11181610 NR Description: APETALA2-related transcription factor 1
  misc_feature (1)..(177): NCBI GI NO: 15240234 NR Description: apetala2 family protein
MTNLTKEEFVHVLRRQSTGFPRGSSKYRGVTLHKCGRWEARMGQFLGKKYVYLGLFDTEVEAARAYDKAAIKCNGKDAVTNFDPSIYDEELNAESSGNPTTPQDHNLDLSLGNSANSKHKSQDMRLRMNQQQQDSLHSNEVLGLGQTGMLNHTPNSNHQFPGSSNIGSGGGFSLFPAAENHRFDGRASTNQVLTNAAASSGFSPHHHNQIFNSTSTPHQNWLQTNGFQPPLMRPS

SEQ ID NO: 1696 - DNA, 1394 bp, Arabidopsis thaliana
  misc_feature (1)..(1394): Ceres Seq. ID no. 13491017
atattttcatataaataaacctctcaacctccacactttctcacccatcacacaatcctcaaaacagagtaacccaaaaaacagagcaatctctaaaaaatctcaagaaacctcactaaaatgggttcaacggcagagacacaattaactccggtgcaagtcaccgacgacgaagctgccctcttcgccatgcaactagccagtgcttccgttcttccgatggctttaaaatccgccttagagcttgaccttcttgagattatggccaagaatggttctcccatgtctcctaccgagatcgcttctaaacttccgaccaaaaatcctgaagctccggtcatgctcgaccgtatcctccgtcttcttacgtcttactccgtcttaacctgctccaaccgtaaactttccggtgatggcgttgaacggatttacgggcttggtccggtttgcaagtatttgaccaagaacgaagatggtgtttccattgctgctctttgtcttatgaaccaagacaaggttctcatggaaagctggtaccatttgaaggatgcaattcttgatggtgggattccattcaacaaggcttatggaatgagcgcgttcgagtaccacgggactgaccctagattcaacaaggtctttaacaatggaatgtctaaccattccacaatcaccatgaagaagattcttgagacctataagggttttgaaggattgacttctttggttgatgttggtggtggcattggtgctacactcaaaatgattgtctccaagtaccctaatcttaaaggcatcaactttgatctcccacatgtcatcgaagatgctccttctcatcctggtattgagcatgttggaggagatatgtttgtaagtgtccctaaaggtgatgccatattcatgaagtggatatgtcatgactggagtgacgaacattgcgtgaaattcttgaagaactgctacgagtcacttccagaggatggaaaagtgatattagcagagtgtatacttccagagacaccagactcaagcctctcaaccaaacaagtagtccatgtcgattgcattatgttggctcacaatcccggaggcaaagaacgaaccgagaaagagtttgaggcattagccaaagcatcaggcttcaagggcatcaaagttgtctgcgacgcttttggtgttaaccttattgagttactcaagaagctctaaaaacaaacaatgttcctatgaagatgatttatatgtaaacattatctcatatctccttccacggttccaaaactatgctgtttaataatggtttttacaagaatttgattatgagtttgtatttttgtttgtttggaacaaaattatgtgattatagggaaaaataaaatgagctattattg

SEQ ID NO: 1697 - protein, 363 aa, Arabidopsis thaliana
  peptide (1)..(363): Ceres Seq. ID no. 13491018
  misc_feature (97)..(338): Pfam Name: Pfam Description:  O-methyltransferase
  misc_feature (1)..(363): NCBI GI NO: 15239571 NR Description: O-methyltransferase 1 [Arabidopsis thaliana]
  misc_feature (1)..(363): NCBI GI NO: 2781394 NR Description: O-methyltransferase 1 [Arabidopsis thaliana]
  misc_feature (1)..(363): NCBI GI NO: 6760443 NR Description: O-methyltransferase [Fragaria x ananassa]
  misc_feature (1)..(363): NCBI GI NO: 29839344 NR Description: Caffeic acid 3-O-methyltransferase
  misc_feature (1)..(362): NCBI GI NO: 3913295 NR Description: Caffeic acid 3-O-methyltransferase
  misc_feature (1)..(362): NCBI GI NO: 231757 NR Description: Caffeic acid 3-O-methyltransferase 1
  misc_feature (1)..(361): NCBI GI NO: 7332271 NR Description: O-methyltransferase
  misc_feature (1)..(362): NCBI GI NO: 29839288 NR Description: Caffeic acid 3-O-methyltransferase 1
  misc_feature (1)..(361): NCBI GI NO: 444327 NR Description: O-methyltransferase
  misc_feature (1)..(358): NCBI GI NO: 7528266 NR Description: caffeic acid O-3-methyltransferase
MGSTAETQLTPVQVTDDEAALFAMQLASASVLPMALKSALELDLLEIMAKNGSPMSPTEIASKLPTKNPEAPVMLDRILRLLTSYSVLTCSNRKLSGDGVERIYGLGPVCKYLTKNEDGVSIAALCLMNQDKVLMESWYHLKDAILDGGIPFNKAYGMSAFEYHGTDPRFNKVFNNGMSNHSTITMKKILETYKGFEGLTSLVDVGGGIGATLKMIVSKYPNLKGINFDLPHVIEDAPSHPGIEHVGGDMFVSVPKGDAIFMKWICHDWSDEHCVKFLKNCYESLPEDGKVILAECILPETPDSSLSTKQVVHVDCIMLAHNPGGKERTEKEFEALAKASGFKGIKVVCDAFGVNLIELLKKL

SEQ ID NO: 1698 - protein, 340 aa, Arabidopsis thaliana
  peptide (1)..(340): Ceres Seq. ID no. 13491019
  misc_feature (74)..(315): Pfam Name: Pfam Description:  O-methyltransferase
  misc_feature (1)..(340): NCBI GI NO: 15239571 NR Description: O-methyltransferase 1 [Arabidopsis thaliana]
  misc_feature (1)..(340): NCBI GI NO: 2781394 NR Description: O-methyltransferase 1 [Arabidopsis thaliana]
  misc_feature (1)..(340): NCBI GI NO: 6760443 NR Description: O-methyltransferase [Fragaria x ananassa]
  misc_feature (1)..(340): NCBI GI NO: 29839344 NR Description: Caffeic acid 3-O-methyltransferase
  misc_feature (1)..(339): NCBI GI NO: 3913295 NR Description: Caffeic acid 3-O-methyltransferase
  misc_feature (1)..(339): NCBI GI NO: 231757 NR Description: Caffeic acid 3-O-methyltransferase 1
  misc_feature (1)..(338): NCBI GI NO: 7332271 NR Description: O-methyltransferase
  misc_feature (1)..(339): NCBI GI NO: 29839288 NR Description: Caffeic acid 3-O-methyltransferase 1
  misc_feature (1)..(338): NCBI GI NO: 444327 NR Description: O-methyltransferase
  misc_feature (1)..(335): NCBI GI NO: 7528266 NR Description: caffeic acid O-3-methyltransferase
MQLASASVLPMALKSALELDLLEIMAKNGSPMSPTEIASKLPTKNPEAPVMLDRILRLLTSYSVLTCSNRKLSGDGVERIYGLGPVCKYLTKNEDGVSIAALCLMNQDKVLMESWYHLKDAILDGGIPFNKAYGMSAFEYHGTDPRFNKVFNNGMSNHSTITMKKILETYKGFEGLTSLVDVGGGIGATLKMIVSKYPNLKGINFDLPHVIEDAPSHPGIEHVGGDMFVSVPKGDAIFMKWICHDWSDEHCVKFLKNCYESLPEDGKVILAECILPETPDSSLSTKQVVHVDCIMLAHNPGGKERTEKEFEALAKASGFKGIKVVCDAFGVNLIELLKKL

SEQ ID NO: 1699 - protein, 330 aa, Arabidopsis thaliana
  peptide (1)..(330): Ceres Seq. ID no. 13491020
  misc_feature (64)..(305): Pfam Name: Pfam Description:  O-methyltransferase
  misc_feature (1)..(330): NCBI GI NO: 15239571 NR Description: O-methyltransferase 1 [Arabidopsis thaliana]
  misc_feature (1)..(330): NCBI GI NO: 2781394 NR Description: O-methyltransferase 1 [Arabidopsis thaliana]
  misc_feature (1)..(330): NCBI GI NO: 6760443 NR Description: O-methyltransferase [Fragaria x ananassa]
  misc_feature (1)..(330): NCBI GI NO: 29839344 NR Description: Caffeic acid 3-O-methyltransferase
  misc_feature (1)..(329): NCBI GI NO: 3913295 NR Description: Caffeic acid 3-O-methyltransferase
  misc_feature (1)..(329): NCBI GI NO: 231757 NR Description: Caffeic acid 3-O-methyltransferase 1
  misc_feature (1)..(328): NCBI GI NO: 7332271 NR Description: O-methyltransferase
  misc_feature (1)..(329): NCBI GI NO: 29839288 NR Description: Caffeic acid 3-O-methyltransferase 1
  misc_feature (1)..(328): NCBI GI NO: 444327 NR Description: O-methyltransferase
  misc_feature (1)..(325): NCBI GI NO: 7528266 NR Description: caffeic acid O-3-methyltransferase
MALKSALELDLLEIMAKNGSPMSPTEIASKLPTKNPEAPVMLDRILRLLTSYSVLTCSNRKLSGDGVERIYGLGPVCKYLTKNEDGVSIAALCLMNQDKVLMESWYHLKDAILDGGIPFNKAYGMSAFEYHGTDPRFNKVFNNGMSNHSTITMKKILETYKGFEGLTSLVDVGGGIGATLKMIVSKYPNLKGINFDLPHVIEDAPSHPGIEHVGGDMFVSVPKGDAIFMKWICHDWSDEHCVKFLKNCYESLPEDGKVILAECILPETPDSSLSTKQVVHVDCIMLAHNPGGKERTEKEFEALAKASGFKGIKVVCDAFGVNLIELLKKL

SEQ ID NO: 1700 - DNA, 1853 bp, Arabidopsis thaliana
  misc_feature (1)..(1853): Ceres Seq. ID no. 13575178
gttttttctgttttggtcaacaatgcttctgtcttcagccacttagccgataaaaaaaaaaaaaaaaaaatgttacagattcagaaaaaatatcataagcctaactttcttatgatgatatttccggtttatgcttaagaaattctgcttgatactgaaatttcgtaattagccccattggtagcctttgctgctgcaacagttgcagtctcttcttcagtgttacggattcttattcttcagccctaaaaatcatcactttggaatcagaagcttgaatgatggaaggaagaagaatcatagcaaaccctagaccgtgtagcggtagtagaagagttattgctaagaagaggtctcgtcccgatggattcgtcaatagcgttaaaaagcttcaacgccgagaaatctcttctcgtatggatcgagctttctcaatcagcactgctcaagagagattccgcaatatgcgtctcgtggagcaatatgatacgcatgatcctaaaggatactgtttagtatcattacctaacttgttgaaacgaagcaaagttattgagattgttgctgctcgtgacattgtctttgctcttactctatctggtgtctgtgcatcttttagcagagagacgaataaaaaggtttgctttttaaatgttagtcctgatgaagtcattcggagtttgttctacaacaagaacaatgattctctcattactgtttctgtttacgcctctgacaattacagctctttgaaatgcagatccactagaatcgaatatattctgaggggtcaagcagacgcaggatttcctctttttgagtctgagtcactaaagtggccaggttttgttgagtttgatgatgttaatgggaaggtgctgacatattctgcacaggatagtgtttacaaggtgtttgatctgaaaaactatgccttgctatattcgatatcagacaaaaatgtacaagaaattaagatcagtccagggataatgctgttgattttcaagagagctgcgagtcatgttcctttgaagattctatcaatcgaagatggcactcttctgaagtccttccatcatttgcttcaccgaaataagaaagttgatttcattgaacaattcaatgaaaagcttctagttaagcaagagaacgagaatctacaaatacttgacgttcgaaatgctgagctgatagaagttagcagaactgacttcatgacaccatcagcattcatatttttgtatgagaatcagttgtttctaacattcaggaaccgaaatgtttctgtgtggaatttccgcggagagcttgtgacctcgtttgaggatcatcttctttggcatccagactgtaacacaaacaatatctacataacaagcgatcaagatctgatcatctcatattgcaaggcagatactgaagatcagtggatagaaggaaatgcggggtcgattaacataagcaatatcttgactggtaaatgcttagctaagataaaagcaaataatggtcctcctaaggaagaggactgcagcagtagtgatttggggaattcctctcgaaggagaagtgcggttgctgaggctttggaagacataaccgctctcttctacgacgaagaacggaatgaaatatacacaggaaacagacacggcctcctccatgtctggtctaattgaagctactcatcatttgttttgttttttttacattaatacaagagatctctgtatcttgttctgtttctcaattgtgtaatatcatgagatatgtaatttacttgtgtgtttgagtagcaattgtcgttgtaatgaaacagcaaatatttcaaattcgtctctcatttatgt

SEQ ID NO: 1701 - protein, 467 aa, Arabidopsis thaliana
  peptide (1)..(467): Ceres Seq. ID no. 13575179
  misc_feature (1)..(467): NCBI GI NO: 30687585 NR Description: expressed protein [Arabidopsis thaliana]
  misc_feature (2)..(467): NCBI GI NO: 25344227 NR Description: hypothetical protein At2g38630
  misc_feature (2)..(467): NCBI GI NO: 18410015 NR Description: expressed protein [Arabidopsis thaliana]
  misc_feature (2)..(467): NCBI GI NO: 11281174 NR Description: hypothetical protein F24B22
  misc_feature (2)..(467): NCBI GI NO: 15128395 NR Description: P0454H12.13
  misc_feature (2)..(467): NCBI GI NO: 34909262 NR Description: B1148D12.19
  misc_feature (16)..(122): NCBI GI NO: 37535068 NR Description: hypothetical protein
  misc_feature (170)..(209): NCBI GI NO: 37535068 NR Description: hypothetical protein
MMEGRRIIANPRPCSGSRRVIAKKRSRPDGFVNSVKKLQRREISSRMDRAFSISTAQERFRNMRLVEQYDTHDPKGYCLVSLPNLLKRSKVIEIVAARDIVFALTLSGVCASFSRETNKKVCFLNVSPDEVIRSLFYNKNNDSLITVSVYASDNYSSLKCRSTRIEYILRGQADAGFPLFESESLKWPGFVEFDDVNGKVLTYSAQDSVYKVFDLKNYALLYSISDKNVQEIKISPGIMLLIFKRAASHVPLKILSIEDGTLLKSFHHLLHRNKKVDFIEQFNEKLLVKQENENLQILDVRNAELIEVSRTDFMTPSAFIFLYENQLFLTFRNRNVSVWNFRGELVTSFEDHLLWHPDCNTNNIYITSDQDLIISYCKADTEDQWIEGNAGSINISNILTGKCLAKIKANNGPPKEEDCSSSDLGNSSRRRSAVAEALEDITALFYDEERNEIYTGNRHGLLHVWSN

SEQ ID NO: 1702 - protein, 466 aa, Arabidopsis thaliana
  peptide (1)..(466): Ceres Seq. ID no. 13575180
  misc_feature (1)..(466): NCBI GI NO: 30687585 NR Description: expressed protein [Arabidopsis thaliana]
  misc_feature (1)..(466): NCBI GI NO: 25344227 NR Description: hypothetical protein At2g38630
  misc_feature (1)..(466): NCBI GI NO: 18410015 NR Description: expressed protein [Arabidopsis thaliana]
  misc_feature (1)..(466): NCBI GI NO: 11281174 NR Description: hypothetical protein F24B22
  misc_feature (1)..(466): NCBI GI NO: 15128395 NR Description: P0454H12.13
  misc_feature (1)..(466): NCBI GI NO: 34909262 NR Description: B1148D12.19
  misc_feature (15)..(121): NCBI GI NO: 37535068 NR Description: hypothetical protein
  misc_feature (169)..(208): NCBI GI NO: 37535068 NR Description: hypothetical protein
MEGRRIIANPRPCSGSRRVIAKKRSRPDGFVNSVKKLQRREISSRMDRAFSISTAQERFRNMRLVEQYDTHDPKGYCLVSLPNLLKRSKVIEIVAARDIVFALTLSGVCASFSRETNKKVCFLNVSPDEVIRSLFYNKNNDSLITVSVYASDNYSSLKCRSTRIEYILRGQADAGFPLFESESLKWPGFVEFDDVNGKVLTYSAQDSVYKVFDLKNYALLYSISDKNVQEIKISPGIMLLIFKRAASHVPLKILSIEDGTLLKSFHHLLHRNKKVDFIEQFNEKLLVKQENENLQILDVRNAELIEVSRTDFMTPSAFIFLYENQLFLTFRNRNVSVWNFRGELVTSFEDHLLWHPDCNTNNIYITSDQDLIISYCKADTEDQWIEGNAGSINISNILTGKCLAKIKANNGPPKEEDCSSSDLGNSSRRRSAVAEALEDITALFYDEERNEIYTGNRHGLLHVWSN

SEQ ID NO: 1703 - protein, 421 aa, Arabidopsis thaliana
  peptide (1)..(421): Ceres Seq. ID no. 13575181
  misc_feature (1)..(421): NCBI GI NO: 30687585 NR Description: expressed protein [Arabidopsis thaliana]
  misc_feature (1)..(421): NCBI GI NO: 25344227 NR Description: hypothetical protein At2g38630
  misc_feature (1)..(421): NCBI GI NO: 18410015 NR Description: expressed protein [Arabidopsis thaliana]
  misc_feature (1)..(421): NCBI GI NO: 11281174 NR Description: hypothetical protein F24B22
  misc_feature (1)..(421): NCBI GI NO: 15128395 NR Description: P0454H12.13
  misc_feature (1)..(421): NCBI GI NO: 34909262 NR Description: B1148D12.19
  misc_feature (1)..(76): NCBI GI NO: 37535068 NR Description: hypothetical protein
  misc_feature (124)..(163): NCBI GI NO: 37535068 NR Description: hypothetical protein
MDRAFSISTAQERFRNMRLVEQYDTHDPKGYCLVSLPNLLKRSKVIEIVAARDIVFALTLSGVCASFSRETNKKVCFLNVSPDEVIRSLFYNKNNDSLITVSVYASDNYSSLKCRSTRIEYILRGQADAGFPLFESESLKWPGFVEFDDVNGKVLTYSAQDSVYKVFDLKNYALLYSISDKNVQEIKISPGIMLLIFKRAASHVPLKILSIEDGTLLKSFHHLLHRNKKVDFIEQFNEKLLVKQENENLQILDVRNAELIEVSRTDFMTPSAFIFLYENQLFLTFRNRNVSVWNFRGELVTSFEDHLLWHPDCNTNNIYITSDQDLIISYCKADTEDQWIEGNAGSINISNILTGKCLAKIKANNGPPKEEDCSSSDLGNSSRRRSAVAEALEDITALFYDEERNEIYTGNRHGLLHVWSN

SEQ ID NO: 1704 - DNA, 915 bp, Arabidopsis thaliana
  misc_feature (1)..(915): Ceres Seq. ID no. 12422053
acgaaagaagagaacaaagaagaaattttgaaaatagtgaaaatggtaaccgtaagccaaagtcacacgacgacgtttctcttcttcaccacatttctcttgatattcggatcaatctcagccgtccgtttgcttccacgaccaaacactacaacaaccaacgatctagatttcatccgaacaagctgcaacgctactctatatccagacgtctgcttcacgtcactctccggctacgcctctgccgttcaagacagtccggcgaggctagccaagctcgcaatcggcgtttcactttaacaagccaaatccactgcggcttttctctccaaactctcacgctctgccgctaaatactccggtgatggccaccaaacagcttccgccgtaatccgagactgcgtttcgaacgtcgaagacgcggtggacgagatgagaggatctctccgtcaactacgcgacatgaacggcagaggaggcggcacggcagctcggaggtcggtagaaacgtttaggttccagatgagtaacgtgcagacgtggatgagtgcagcattgacggatgaggacacgtgtacgaatggatttgaagatatggacgaaggaggattgattaagacgaccgtttgtgatcggctcgaggaagtgaagaggctaacgagtaatgctcttgcccttgtcaacacttacgccaacaatggagctccatgaccatgagaccatgagaccatgaggagttttaactttgatttaagtgtctctttatataatttaatacattgtggggtttaagttagagttatgtgtcgatttcatcatgttttacatttgtttttgtatcatccgagtttcttatgtttaaagggttcagagagatgttgtatctttgatttactaatcaaactgcacgatgat

SEQ ID NO: 1705 - protein, 116 aa, Arabidopsis thaliana
  peptide (1)..(116): Ceres Seq. ID no. 12422054
ERREQRRNFENSENGNRKPKSHDDVSLLHHISLDIRINLSRPFASTTKHYNNQRSRFHPNKLQRYSISRRLLHVTLRLRLCRSRQSGEASQARNRRFTLTSQIHCGFSLQTLTLCR

SEQ ID NO: 1706 - protein, 99 aa, Arabidopsis thaliana
  peptide (1)..(99): Ceres Seq. ID no. 12422055
  misc_feature (15)..(99): NCBI GI NO: 15226321 NR Description: unknown protein; protein id: At2g01610.1
  misc_feature (20)..(99): NCBI GI NO: 18394174 NR Description: expressed protein; protein id: At1g14890
  misc_feature (34)..(99): NCBI GI NO: 15220674 NR Description: Unknown protein; protein id: At1g23205
  misc_feature (53)..(99): NCBI GI NO: 21555465 NR Description: unknown [Arabidopsis thaliana]
  misc_feature (30)..(99): NCBI GI NO: 21554277 NR Description: unknown [Arabidopsis thaliana]
  misc_feature (30)..(99): NCBI GI NO: 18409660 NR Description: expressed protein; protein id: At1g70720
  misc_feature (30)..(99): NCBI GI NO: 25406069 NR Description: hypothetical protein F5A18.10
  misc_feature (27)..(99): NCBI GI NO: 15232790 NR Description: putative protein; protein id: At3g47380.1
  misc_feature (28)..(99): NCBI GI NO: 8096279 NR Description: DC1.2 homologue [Nicotiana tabacum]
  misc_feature (56)..(99): NCBI GI NO: 15241799 NR Description: ripening-related protein - like
TKEENKEEILKIVKMVTVSQSHTTTFLFFTTFLLIFGSISAVRLLPRPNTTTTNDLDFIRTSCNATLYPDVCFTSLSGYASAVQDSPARLAKLAIGVSL

SEQ ID NO: 1707 - protein, 92 aa, Arabidopsis thaliana
  peptide (1)..(92): Ceres Seq. ID no. 12422056
  misc_feature (1)..(92): NCBI GI NO: 15226321 NR Description: unknown protein; protein id: At2g01610.1
  misc_feature (1)..(91): NCBI GI NO: 18394174 NR Description: expressed protein; protein id: At1g14890
  misc_feature (1)..(84): NCBI GI NO: 15220674 NR Description: Unknown protein; protein id: At1g23205
  misc_feature (1)..(84): NCBI GI NO: 21555465 NR Description: unknown [Arabidopsis thaliana]
  misc_feature (1)..(88): NCBI GI NO: 21554277 NR Description: unknown [Arabidopsis thaliana]
  misc_feature (1)..(88): NCBI GI NO: 18409660 NR Description: expressed protein; protein id: At1g70720
  misc_feature (1)..(88): NCBI GI NO: 25406069 NR Description: hypothetical protein F5A18.10
  misc_feature (1)..(87): NCBI GI NO: 15232790 NR Description: putative protein; protein id: At3g47380.1
  misc_feature (1)..(87): NCBI GI NO: 8096279 NR Description: DC1.2 homologue [Nicotiana tabacum]
  misc_feature (1)..(87): NCBI GI NO: 15241799 NR Description: ripening-related protein - like
MRGSLRQLRDMNGRGGGTAARRSVETFRFQMSNVQTWMSAALTDEDTCTNGFEDMDEGGLIKTTVCDRLEEVKRLTSNALALVNTYANNGAP

SEQ ID NO: 1708 - protein, 85 aa, Arabidopsis thaliana
  peptide (1)..(85): Ceres Seq. ID no. 12422057
  misc_feature (1)..(85): NCBI GI NO: 15226321 NR Description: unknown protein; protein id: At2g01610.1
  misc_feature (6)..(85): NCBI GI NO: 18394174 NR Description: expressed protein; protein id: At1g14890
  misc_feature (20)..(85): NCBI GI NO: 15220674 NR Description: Unknown protein; protein id: At1g23205
  misc_feature (39)..(85): NCBI GI NO: 21555465 NR Description: unknown [Arabidopsis thaliana]
  misc_feature (16)..(85): NCBI GI NO: 21554277 NR Description: unknown [Arabidopsis thaliana]
  misc_feature (16)..(85): NCBI GI NO: 18409660 NR Description: expressed protein; protein id: At1g70720
  misc_feature (16)..(85): NCBI GI NO: 25406069 NR Description: hypothetical protein F5A18.10
  misc_feature (13)..(85): NCBI GI NO: 15232790 NR Description: putative protein; protein id: At3g47380.1
  misc_feature (14)..(85): NCBI GI NO: 8096279 NR Description: DC1.2 homologue [Nicotiana tabacum]
  misc_feature (42)..(85): NCBI GI NO: 15241799 NR Description: ripening-related protein - like
MVTVSQSHTTTFLFFTTFLLIFGSISAVRLLPRPNTTTTNDLDFIRTSCNATLYPDVCFTSLSGYASAVQDSPARLAKLAIGVSL

SEQ ID NO: 1709 - DNA, 2159 bp, Arabidopsis thaliana
  misc_feature (1)..(2159): Ceres Seq. ID no. 12336358
attcagtcgtaaaataaaaccgaatttgatttttatttttctctctcaaagtttttcttgggagagcaacaatggcgatgaggaagcttttatcgaagaaactcttcaatatcacgaatgttgcttcacagagtcttatgaattgtcgcatttcgtcttcttcgttagccgtacgaaccagagttccgaatgattcaacagatacaaccaaaatcgcaccggagcctggagatttggcgatgtcgcgaaggttcatgcataacagtgctatgattaggccggcggagattatgcagatgccggtgggagagagtttgattgagaaactccgtgagattgatggaagcaaggatcggattcgattagacggactttctccgccggagagggagacgagtttgacggtggcggatacgaagaagctgcttagagcggcgcagatcgagattgtgaaatcgaagctaagagaaacgggaagaagctggatgccgtataaggagtttgttagcgtttgtggtgaagcttcttcagatccagatctcggatctaaaatcgcgaagatgcttgatgattcagcaaacgtcatcgttttgggagattccgtttgtattagacctgatcaggtactttcttcgttcttcttctctagccttttagcattttgaaatcgtgctttgtctctgagatctctctgagtattgcagctgattgattgggagagataagagagagatttaaaaactctctgaaaaaaacggattaggttctcaaaagtttttgttcgattttgattttggaagctataccgaaaactgataccatttttattcggttggatctcttttcttttggttccaattcaacaggagaatcaaaaacctctgtgtttttaccagagttccataggaggttcccaagtttgagagagatggtgataaagaggaacagtttctacagagaccacaactctttttttttcccctaaaaaaaaaaccattggttggattagggttataaattgagtcaagaccctttggtgatttgataccaaaacctaaacataaaaaaacttcaaaagagagagttgagagaagcttactaactggttcttgggggttattagaaagtttatagagatgatgatgataatgggttgggtttatgtggagggattagtcaatagtggaagatcttaaccagaaacagggatatggggatggattgattgactttataaactagtcattgattcataaagatgtatttttgttgtgtgtttttgagtgtgctaattgtgtgtctcaaaagaaggtggtggaggtcttgttttacccagacattttctgtttttgtcttttgctattgtgtttgatcaggttaccaaatccattgaaggactgcttcctttgccaaagatccataacccaaatgaccctcggagaatcgagtttaaagagcttgaagctgaaaaggcagtgatcgatgtgaaagctcacactttggtgcggaaagagctttgggctggtctcggttacttgatcctacagactgcggggttcatgaggctaacgttttgggaactctcgtgggacgtgatggagccaatctgtttctatgtcacgtccgtgtactttatggctggttacgcgtttttcctcaggacatcgaaagagccttcttttgaagggttttaccaaagcaggttcgaggcgaaacagagaaagttgatgaatgagtatgagtttgatctggagaggtataatgaactgaagaagctgttttgctctaagccttcggatcatgtttccaagattcttggagctatcaagagttaaaattttgattaggggaaaaattgcttagattcaatgttgttgtcacaaatggtgtctgattttacctaactagagaattctaccccaaaaaaaagtaagaaaaaaacgaatgggtactactctcaaatttttcagttttcgaaaaaaagacaaagaggttgttcttattattgcggcttatgtaacatcagcgaagagttatgtttttgttttcgatttttattttttattttttttatttttttattttatgaccgatctaaaatttaacattgtgtaaataaatgtttgaaggtgtaatataatacagaattaattatctgc

SEQ ID NO: 1710 - protein, 197 aa, Arabidopsis thaliana
  peptide (1)..(197): Ceres Seq. ID no. 12336359
  misc_feature (147)..(197): Pfam Name: Pfam Description:  Protein of unknown function, DUF607
  misc_feature (3)..(186): NCBI GI NO: 15234535 NR Description: putative protein; protein id: At4g36820.1
  misc_feature (1)..(197): NCBI GI NO: 15224063 NR Description: hypothetical protein; protein id: At2g23790.1
  misc_feature (1)..(197): NCBI GI NO: 24496456 NR Description: hypothetical protein [Arabidopsis thaliana]
  misc_feature (20)..(188): NCBI GI NO: 14596231 NR Description: Unknown protein [Arabidopsis thaliana]
  misc_feature (20)..(188): NCBI GI NO: 15240047 NR Description: putative protein; protein id: At5g66650
  misc_feature (96)..(188): NCBI GI NO: 15239011 NR Description: unknown protein; protein id: At5g42610.1
  misc_feature (1)..(197): NCBI GI NO: 20330769 NR Description: Hypothetical protein
  misc_feature (110)..(197): NCBI GI NO: 37535778 NR Description: unknown protein
MAMRKLLSKKLFNITNVASQSLMNCRISSSSLAVRTRVPNDSTDTTKIAPEPGDLAMSRRFMHNSAMIRPAEIMQMPVGESLIEKLREIDGSKDRIRLDGLSPPERETSLTVADTKKLLRAAQIEIVKSKLRETGRSWMPYKEFVSVCGEASSDPDLGSKIAKMLDDSANVIVLGDSVCIRPDQVLSSFFFSSLLAF

SEQ ID NO: 1711 - protein, 195 aa, Arabidopsis thaliana
  peptide (1)..(195): Ceres Seq. ID no. 12336360
  misc_feature (145)..(195): Pfam Name: Pfam Description:  Protein of unknown function, DUF607
  misc_feature (1)..(184): NCBI GI NO: 15234535 NR Description: putative protein; protein id: At4g36820.1
  misc_feature (1)..(195): NCBI GI NO: 15224063 NR Description: hypothetical protein; protein id: At2g23790.1
  misc_feature (1)..(195): NCBI GI NO: 24496456 NR Description: hypothetical protein [Arabidopsis thaliana]
  misc_feature (18)..(186): NCBI GI NO: 14596231 NR Description: Unknown protein [Arabidopsis thaliana]
  misc_feature (18)..(186): NCBI GI NO: 15240047 NR Description: putative protein; protein id: At5g66650
  misc_feature (94)..(186): NCBI GI NO: 15239011 NR Description: unknown protein; protein id: At5g42610.1
  misc_feature (1)..(195): NCBI GI NO: 20330769 NR Description: Hypothetical protein
  misc_feature (108)..(195): NCBI GI NO: 37535778 NR Description: unknown protein
MRKLLSKKLFNITNVASQSLMNCRISSSSLAVRTRVPNDSTDTTKIAPEPGDLAMSRRFMHNSAMIRPAEIMQMPVGESLIEKLREIDGSKDRIRLDGLSPPERETSLTVADTKKLLRAAQIEIVKSKLRETGRSWMPYKEFVSVCGEASSDPDLGSKIAKMLDDSANVIVLGDSVCIRPDQVLSSFFFSSLLAF

SEQ ID NO: 1712 - protein, 175 aa, Arabidopsis thaliana
  peptide (1)..(175): Ceres Seq. ID no. 12336361
  misc_feature (125)..(175): Pfam Name: Pfam Description:  Protein of unknown function, DUF607
  misc_feature (1)..(164): NCBI GI NO: 15234535 NR Description: putative protein; protein id: At4g36820.1
  misc_feature (1)..(175): NCBI GI NO: 15224063 NR Description: hypothetical protein; protein id: At2g23790.1
  misc_feature (1)..(175): NCBI GI NO: 24496456 NR Description: hypothetical protein [Arabidopsis thaliana]
  misc_feature (1)..(166): NCBI GI NO: 14596231 NR Description: Unknown protein [Arabidopsis thaliana]
  misc_feature (1)..(166): NCBI GI NO: 15240047 NR Description: putative protein; protein id: At5g66650
  misc_feature (74)..(166): NCBI GI NO: 15239011 NR Description: unknown protein; protein id: At5g42610.1
  misc_feature (1)..(175): NCBI GI NO: 20330769 NR Description: Hypothetical protein
  misc_feature (88)..(175): NCBI GI NO: 37535778 NR Description: unknown protein
MNCRISSSSLAVRTRVPNDSTDTTKIAPEPGDLAMSRRFMHNSAMIRPAEIMQMPVGESLIEKLREIDGSKDRIRLDGLSPPERETSLTVADTKKLLRAAQIEIVKSKLRETGRSWMPYKEFVSVCGEASSDPDLGSKIAKMLDDSANVIVLGDSVCIRPDQVLSSFFFSSLLAF

SEQ ID NO: 1713 - DNA, 774 bp, Arabidopsis thaliana
  misc_feature (1)..(774): Ceres Seq. ID no. 12482158
atgaggatttatctgattttcctcgtggtggtttccttatttacctccgcgttttccgattcgattctcgagtacccgtcggaaatcgagagtcgacacaagaaagctgccgaagaagatgtcaatttgcattgtacgacctggagattcgcggcggagatgaacaatctcgcgccgtggaaaacaatcccggtggaatgtgccgattacgtgaaggactatgtgatgggtaaaggctacctcaccgatttggagagagtctctgaagaagctttgatcttcgcgagaagcatcgaattctccggcgatggcaaagatatttggattttcgatatcgatgagactctcttatccaatcttccttattacattgatcatggttttgggttggagctttttgatcattcggagtttgataagtgggtagagagaggagtggcaccagccatagcaccaagcttgaagctttaccaaagagtgttagatttgggatacaaagttttcttgcttacagggaggaaagagagtcacaggcttgtcactgttgaaaatctcatcaatgctggtttccagaactgggacaagcttattctcagatctccagaggaacagcacaaaatggcgacactatacaaatctgagaagagagatgagatggtgaaagagggatataggattagaggcaattcaggtgatcaatggagtgatttgttgggtacctccatgtctcaacgatctttcaaactcgcaaatccaatgtattatatcccctga

SEQ ID NO: 1714 - protein, 257 aa, Arabidopsis thaliana
  peptide (1)..(257): Ceres Seq. ID no. 12482159
  misc_feature (29)..(257): Pfam Name: Acid phosphatase Pfam Description: HAD superfamily, subfamily IIIB
  misc_feature (1)..(257): NCBI GI NO: 15241412 NR Description: acid phosphatase; protein id: At5g51260.1
  misc_feature (1)..(257): NCBI GI NO: 15234949 NR Description: acid phosphatase - like protein
  misc_feature (1)..(256): NCBI GI NO: 445113 NR Description: acid phosphatase 1
  misc_feature (1)..(256): NCBI GI NO: 130718 NR Description: Acid phosphatase precursor 1
  misc_feature (26)..(257): NCBI GI NO: 15233504 NR Description: acid phosphatase-like protein
  misc_feature (6)..(256): NCBI GI NO: 15233526 NR Description: acid phosphatase-like protein
  misc_feature (50)..(223): NCBI GI NO: 7705154 NR Description: acid phosphatase-1(1); Apase-1(1)
  misc_feature (25)..(256): NCBI GI NO: 7442053 NR Description: acid phosphatase (EC 3.1.3.-) - soybean
  misc_feature (1)..(255): NCBI GI NO: 2627233 NR Description: pod storage protein [Phaseolus vulgaris]
  misc_feature (1)..(255): NCBI GI NO: 7442055 NR Description: pod storage protein - kidney bean
MRIYLIFLVVVSLFTSAFSDSILEYPSEIESRHKKAAEEDVNLHCTTWRFAAEMNNLAPWKTIPVECADYVKDYVMGKGYLTDLERVSEEALIFARSIEFSGDGKDIWIFDIDETLLSNLPYYIDHGFGLELFDHSEFDKWVERGVAPAIAPSLKLYQRVLDLGYKVFLLTGRKESHRLVTVENLINAGFQNWDKLILRSPEEQHKMATLYKSEKRDEMVKEGYRIRGNSGDQWSDLLGTSMSQRSFKLANPMYYIP

SEQ ID NO: 1715 - protein, 204 aa, Arabidopsis thaliana
  peptide (1)..(204): Ceres Seq. ID no. 12482160
  misc_feature (1)..(204): Pfam Name: Acid phosphatase Pfam Description: HAD superfamily, subfamily IIIB
  misc_feature (1)..(204): NCBI GI NO: 15241412 NR Description: acid phosphatase; protein id: At5g51260.1
  misc_feature (1)..(204): NCBI GI NO: 15234949 NR Description: acid phosphatase - like protein
  misc_feature (1)..(203): NCBI GI NO: 445113 NR Description: acid phosphatase 1
  misc_feature (1)..(203): NCBI GI NO: 130718 NR Description: Acid phosphatase precursor 1
  misc_feature (1)..(204): NCBI GI NO: 15233504 NR Description: acid phosphatase-like protein
  misc_feature (1)..(203): NCBI GI NO: 15233526 NR Description: acid phosphatase-like protein
  misc_feature (1)..(170): NCBI GI NO: 7705154 NR Description: acid phosphatase-1(1); Apase-1(1)
  misc_feature (1)..(203): NCBI GI NO: 7442053 NR Description: acid phosphatase (EC 3.1.3.-) - soybean
  misc_feature (1)..(202): NCBI GI NO: 2627233 NR Description: pod storage protein [Phaseolus vulgaris]
  misc_feature (1)..(202): NCBI GI NO: 7442055 NR Description: pod storage protein - kidney bean
MNNLAPWKTIPVECADYVKDYVMGKGYLTDLERVSEEALIFARSIEFSGDGKDIWIFDIDETLLSNLPYYIDHGFGLELFDHSEFDKWVERGVAPAIAPSLKLYQRVLDLGYKVFLLTGRKESHRLVTVENLINAGFQNWDKLILRSPEEQHKMATLYKSEKRDEMVKEGYRIRGNSGDQWSDLLGTSMSQRSFKLANPMYYIP

SEQ ID NO: 1716 - protein, 182 aa, Arabidopsis thaliana
  peptide (1)..(182): Ceres Seq. ID no. 12482161
  misc_feature (1)..(182): Pfam Name: Acid phosphatase Pfam Description: HAD superfamily, subfamily IIIB
  misc_feature (1)..(182): NCBI GI NO: 15241412 NR Description: acid phosphatase; protein id: At5g51260.1
  misc_feature (1)..(182): NCBI GI NO: 15234949 NR Description: acid phosphatase - like protein
  misc_feature (1)..(181): NCBI GI NO: 445113 NR Description: acid phosphatase 1
  misc_feature (1)..(181): NCBI GI NO: 130718 NR Description: Acid phosphatase precursor 1
  misc_feature (1)..(182): NCBI GI NO: 15233504 NR Description: acid phosphatase-like protein
  misc_feature (1)..(181): NCBI GI NO: 15233526 NR Description: acid phosphatase-like protein
  misc_feature (1)..(148): NCBI GI NO: 7705154 NR Description: acid phosphatase-1(1); Apase-1(1)
  misc_feature (1)..(181): NCBI GI NO: 7442053 NR Description: acid phosphatase (EC 3.1.3.-) - soybean
  misc_feature (1)..(180): NCBI GI NO: 2627233 NR Description: pod storage protein [Phaseolus vulgaris]
  misc_feature (1)..(180): NCBI GI NO: 7442055 NR Description: pod storage protein - kidney bean
MGKGYLTDLERVSEEALIFARSIEFSGDGKDIWIFDIDETLLSNLPYYIDHGFGLELFDHSEFDKWVERGVAPAIAPSLKLYQRVLDLGYKVFLLTGRKESHRLVTVENLINAGFQNWDKLILRSPEEQHKMATLYKSEKRDEMVKEGYRIRGNSGDQWSDLLGTSMSQRSFKLANPMYYIP

SEQ ID NO: 1717 - DNA, 1181 bp, Arabidopsis thaliana
  misc_feature (1)..(1181): Ceres Seq. ID no. 12562314
atgctaaggagccctcccaaaaaagaacaacaaatcacatttttatataactgttaacataataatctcagcctcatcaacacacatatatagatagccaacatcacacaaacatagagattccaaaaaataaaaataaagaaaacataaatcctctgaggaaaaattccgatgagatgacagaaggtggagaatattctccggcgatgatgtcagcagagccattcttgaccatgaagaagatgaagaagagcaaccacaacaagaacaatcagagaaggtttagcgacgagcagatcaagtcactggagatgatgtttgagtctgagacaaggcttgagccaaggaagaaggttcaattagctagagagctagggttgcagccgaggcaagtggctatatggtttcagaacaagagggctcgttggaaatccaagcagctcgagactgagtacaacattctcagacaaaactacgacaacttggcttctcagttcgagtccttaaagaaagaaaaacaagctttagtctctgagttgcagaggctaaaagaggcgacgcaaaagaagacacaggaggaggaaaggcagtgtagtggagatcaagcggtggttgctctaagcagcacacatcatgaatcagaaaacgaagagaaccggaggcgtaaaccggaagaggttagaccggagatggagatgaaagatgataagggtcatcatggggttatgtgtgatcatcatgattatgaagatgatgataatggttatagtaacaacatcaagagagagtattttggtgggtttgaggaagaaccagatcacttaatgaacattgttgaaccagctgatagttgtttgacatcatctgatgattggagaggtttcaaatcagatactactactctcttggaccaatccagcaacaattacccttggcgggatttttggtcatgaaaacaataaactctaaacaagaagatgaaacagattgagactaaagattggatatatacatattcaaatcgaaatttaccggtctacatcgcatgaaccgagccacggatatagagatattcggtccagcaaatgactcgtttctcagcgagaattttgcaggattttgagctgaaattgtatggttttgtctgtataaatgatgtgtttagaaagacgtatattctc

SEQ ID NO: 1718 - protein, 258 aa, Arabidopsis thaliana
  peptide (1)..(258): Ceres Seq. ID no. 12562315
  misc_feature (30)..(86): Pfam Name: Pfam Description:  Homeobox domain
  misc_feature (1)..(258): NCBI GI NO: 15226424 NR Description: homeodomain transcription factor
  misc_feature (1)..(258): NCBI GI NO: 629527 NR Description: homeotic protein Athb-7 - Arabidopsis thaliana
  misc_feature (1)..(193): NCBI GI NO: 15228625 NR Description: homeobox-leucine zipper protein ATHB-12
  misc_feature (1)..(193): NCBI GI NO: 11357332 NR Description: homeobox-leucine zipper protein ATHB-12
  misc_feature (1)..(133): NCBI GI NO: 5031277 NR Description: homeobox leucine zipper protein [Prunus armeniaca]
  misc_feature (31)..(130): NCBI GI NO: 5006857 NR Description: homeodomain leucine zipper protein [Oryza sativa]
  misc_feature (33)..(159): NCBI GI NO: 29367373 NR Description: homeodomain leucine zipper protein-like protein
  misc_feature (32)..(131): NCBI GI NO: 37147908 NR Description: HD-ZIP [Capsicum annuum]
  misc_feature (23)..(194): NCBI GI NO: 22651698 NR Description: homeodomain protein Hfi22 [Nicotiana tabacum]
  misc_feature (12)..(144): NCBI GI NO: 13447045 NR Description: homeobox-leucine zipper protein HAHB-4
MTEGGEYSPAMMSAEPFLTMKKMKKSNHNKNNQRRFSDEQIKSLEMMFESETRLEPRKKVQLARELGLQPRQVAIWFQNKRARWKSKQLETEYNILRQNYDNLASQFESLKKEKQALVSELQRLKEATQKKTQEEERQCSGDQAVVALSSTHHESENEENRRRKPEEVRPEMEMKDDKGHHGVMCDHHDYEDDDNGYSNNIKREYFGGFEEEPDHLMNIVEPADSCLTSSDDWRGFKSDTTTLLDQSSNNYPWRDFWS

SEQ ID NO: 1719 - protein, 248 aa, Arabidopsis thaliana
  peptide (1)..(248): Ceres Seq. ID no. 12562316
  misc_feature (20)..(76): Pfam Name: Pfam Description:  Homeobox domain
  misc_feature (1)..(248): NCBI GI NO: 15226424 NR Description: homeodomain transcription factor
  misc_feature (1)..(248): NCBI GI NO: 629527 NR Description: homeotic protein Athb-7 - Arabidopsis thaliana
  misc_feature (1)..(183): NCBI GI NO: 15228625 NR Description: homeobox-leucine zipper protein ATHB-12
  misc_feature (1)..(183): NCBI GI NO: 11357332 NR Description: homeobox-leucine zipper protein ATHB-12
  misc_feature (1)..(123): NCBI GI NO: 5031277 NR Description: homeobox leucine zipper protein [Prunus armeniaca]
  misc_feature (21)..(120): NCBI GI NO: 5006857 NR Description: homeodomain leucine zipper protein [Oryza sativa]
  misc_feature (23)..(149): NCBI GI NO: 29367373 NR Description: homeodomain leucine zipper protein-like protein
  misc_feature (22)..(121): NCBI GI NO: 37147908 NR Description: HD-ZIP [Capsicum annuum]
  misc_feature (13)..(184): NCBI GI NO: 22651698 NR Description: homeodomain protein Hfi22 [Nicotiana tabacum]
  misc_feature (2)..(134): NCBI GI NO: 13447045 NR Description: homeobox-leucine zipper protein HAHB-4
MMSAEPFLTMKKMKKSNHNKNNQRRFSDEQIKSLEMMFESETRLEPRKKVQLARELGLQPRQVAIWFQNKRARWKSKQLETEYNILRQNYDNLASQFESLKKEKQALVSELQRLKEATQKKTQEEERQCSGDQAVVALSSTHHESENEENRRRKPEEVRPEMEMKDDKGHHGVMCDHHDYEDDDNGYSNNIKREYFGGFEEEPDHLMNIVEPADSCLTSSDDWRGFKSDTTTLLDQSSNNYPWRDFWS

SEQ ID NO: 1720 - protein, 247 aa, Arabidopsis thaliana
  peptide (1)..(247): Ceres Seq. ID no. 12562317
  misc_feature (19)..(75): Pfam Name: Pfam Description:  Homeobox domain
  misc_feature (1)..(247): NCBI GI NO: 15226424 NR Description: homeodomain transcription factor
  misc_feature (1)..(247): NCBI GI NO: 629527 NR Description: homeotic protein Athb-7 - Arabidopsis thaliana
  misc_feature (1)..(182): NCBI GI NO: 15228625 NR Description: homeobox-leucine zipper protein ATHB-12
  misc_feature (1)..(182): NCBI GI NO: 11357332 NR Description: homeobox-leucine zipper protein ATHB-12
  misc_feature (1)..(122): NCBI GI NO: 5031277 NR Description: homeobox leucine zipper protein [Prunus armeniaca]
  misc_feature (20)..(119): NCBI GI NO: 5006857 NR Description: homeodomain leucine zipper protein [Oryza sativa]
  misc_feature (22)..(148): NCBI GI NO: 29367373 NR Description: homeodomain leucine zipper protein-like protein
  misc_feature (21)..(120): NCBI GI NO: 37147908 NR Description: HD-ZIP [Capsicum annuum]
  misc_feature (12)..(183): NCBI GI NO: 22651698 NR Description: homeodomain protein Hfi22 [Nicotiana tabacum]
  misc_feature (1)..(133): NCBI GI NO: 13447045 NR Description: homeobox-leucine zipper protein HAHB-4
MSAEPFLTMKKMKKSNHNKNNQRRFSDEQIKSLEMMFESETRLEPRKKVQLARELGLQPRQVAIWFQNKRARWKSKQLETEYNILRQNYDNLASQFESLKKEKQALVSELQRLKEATQKKTQEEERQCSGDQAVVALSSTHHESENEENRRRKPEEVRPEMEMKDDKGHHGVMCDHHDYEDDDNGYSNNIKREYFGGFEEEPDHLMNIVEPADSCLTSSDDWRGFKSDTTTLLDQSSNNYPWRDFWS

SEQ ID NO: 1721 - DNA, 1127 bp, Arabidopsis thaliana
  misc_feature (1)..(1127): Ceres Seq. ID no. 13491200
atcaaccgtaaacttattgctttcttccttctggtagttccccaaaactcaaagtactctttttctgtgtaaacaaaaaaaaaatcaacggtactctttctcttctaagttgttgttccatggagaagagtttccagaaatcagctctccttgtgaccttgactctcttcttcttcattccagtttcaatctcggttccattcattctgtttcatgggattagagatcaatgctccaatggtggagtgagcagcttcgtacagctccttagcaacctctctagctcccatggatcttgcttagaaataggaaatggagagcaagattcggtgactatgccgcttacgcaacaagcgagtgtagcgtgtgagaaagttaaacagatgaaggatttgagtcaaggctacaacattgttgcacagtctcaaggaaacttggtagctagaggtctaatcgagttttgtgacaatgctcctccggtcttcaactatatatctttaggaggtcctcatgctggcatatccgacattcccaagtgtaattctacactttgcgagttgctgaaaacagcggtctacaccgacttcgtacaagatcatattgctccaagtggttatatcaagattcctacagatataaaagattacctggaacactccaagtatctgccaaagatcaacaacgagagacctaacgaaaggaacaccacttttaaagaccggttcactagcttgcacaacttggtccttgtcatgtttgagggtgatgcagtagtgattcctaaagaaagttcttggttcggatattacccggatggagcttccacacctcttttgtctcctcaacagacaaagctctatactgaggattggattggtctgaaaacattggatgctgccagaaaagttaagtttgtcagtgtccctggcgagcacctaagaatagcgcaagacgacgttgtaaaacacgtcgtgccttacctcaagaaccagcctgcgtctatgagtgaagatttggagatactgcatctatgattgagacttcattgttatgctctcttagaatcaaatttaaaagtgaagaactttagaggctcctttttcttaatcataaatccaaataatttc

SEQ ID NO: 1722 - protein, 304 aa, Arabidopsis thaliana
  peptide (1)..(304): Ceres Seq. ID no. 13491201
  misc_feature (21)..(289): Pfam Name: Pfam Description:  Palmitoyl protein thioesterase
  misc_feature (1)..(304): NCBI GI NO: 15236078 NR Description: palmitoyl protein thioesterase precursor, putative
  misc_feature (1)..(304): NCBI GI NO: 21554369 NR Description: palmitoyl-protein thioesterase precursor-like
  misc_feature (213)..(304): NCBI GI NO: 7488215 NR Description: probable thioesterase - Arabidopsis thaliana
  misc_feature (62)..(141): NCBI GI NO: 7488215 NR Description: probable thioesterase - Arabidopsis thaliana
  misc_feature (1)..(297): NCBI GI NO: 15236077 NR Description: palmitoyl protein thioesterase precursor, putative
  misc_feature (1)..(288): NCBI GI NO: 15236079 NR Description: palmitoyl protein thioesterase precursor, putative
  misc_feature (2)..(295): NCBI GI NO: 15238063 NR Description: palmitoyl protein thioesterase precursor, putative
  misc_feature (2)..(295): NCBI GI NO: 28393539 NR Description: putative palmitoyl-protein thioesterase precursor
  misc_feature (23)..(61): NCBI GI NO: 7488215 NR Description: probable thioesterase - Arabidopsis thaliana
  misc_feature (1)..(296): NCBI GI NO: 15238065 NR Description: palmitoyl protein thioesterase precursor, putative
MEKSFQKSALLVTLTLFFFIPVSISVPFILFHGIRDQCSNGGVSSFVQLLSNLSSSHGSCLEIGNGEQDSVTMPLTQQASVACEKVKQMKDLSQGYNIVAQSQGNLVARGLIEFCDNAPPVFNYISLGGPHAGISDIPKCNSTLCELLKTAVYTDFVQDHIAPSGYIKIPTDIKDYLEHSKYLPKINNERPNERNTTFKDRFTSLHNLVLVMFEGDAVVIPKESSWFGYYPDGASTPLLSPQQTKLYTEDWIGLKTLDAARKVKFVSVPGEHLRIAQDDVVKHVVPYLKNQPASMSEDLEILHL

SEQ ID NO: 1723 - protein, 232 aa, Arabidopsis thaliana
  peptide (1)..(232): Ceres Seq. ID no. 13491202
  misc_feature (1)..(217): Pfam Name: Pfam Description:  Palmitoyl protein thioesterase
  misc_feature (1)..(232): NCBI GI NO: 15236078 NR Description: palmitoyl protein thioesterase precursor, putative
  misc_feature (1)..(232): NCBI GI NO: 21554369 NR Description: palmitoyl-protein thioesterase precursor-like
  misc_feature (141)..(232): NCBI GI NO: 7488215 NR Description: probable thioesterase - Arabidopsis thaliana
  misc_feature (1)..(69): NCBI GI NO: 7488215 NR Description: probable thioesterase - Arabidopsis thaliana
  misc_feature (1)..(225): NCBI GI NO: 15236077 NR Description: palmitoyl protein thioesterase precursor, putative
  misc_feature (1)..(216): NCBI GI NO: 15236079 NR Description: palmitoyl protein thioesterase precursor, putative
  misc_feature (1)..(223): NCBI GI NO: 15238063 NR Description: palmitoyl protein thioesterase precursor, putative
  misc_feature (1)..(223): NCBI GI NO: 28393539 NR Description: putative palmitoyl-protein thioesterase precursor
  misc_feature (1)..(224): NCBI GI NO: 15238065 NR Description: palmitoyl protein thioesterase precursor, putative
  misc_feature (1)..(224): NCBI GI NO: 15232301 NR Description: palmitoyl protein thioesterase precursor, putative
MPLTQQASVACEKVKQMKDLSQGYNIVAQSQGNLVARGLIEFCDNAPPVFNYISLGGPHAGISDIPKCNSTLCELLKTAVYTDFVQDHIAPSGYIKIPTDIKDYLEHSKYLPKINNERPNERNTTFKDRFTSLHNLVLVMFEGDAVVIPKESSWFGYYPDGASTPLLSPQQTKLYTEDWIGLKTLDAARKVKFVSVPGEHLRIAQDDVVKHVVPYLKNQPASMSEDLEILHL

SEQ ID NO: 1724 - protein, 216 aa, Arabidopsis thaliana
  peptide (1)..(216): Ceres Seq. ID no. 13491203
  misc_feature (1)..(201): Pfam Name: Pfam Description:  Palmitoyl protein thioesterase
  misc_feature (1)..(216): NCBI GI NO: 15236078 NR Description: palmitoyl protein thioesterase precursor, putative
  misc_feature (1)..(216): NCBI GI NO: 21554369 NR Description: palmitoyl-protein thioesterase precursor-like
  misc_feature (125)..(216): NCBI GI NO: 7488215 NR Description: probable thioesterase - Arabidopsis thaliana
  misc_feature (1)..(53): NCBI GI NO: 7488215 NR Description: probable thioesterase - Arabidopsis thaliana
  misc_feature (1)..(209): NCBI GI NO: 15236077 NR Description: palmitoyl protein thioesterase precursor, putative
  misc_feature (1)..(200): NCBI GI NO: 15236079 NR Description: palmitoyl protein thioesterase precursor, putative
  misc_feature (1)..(207): NCBI GI NO: 15238063 NR Description: palmitoyl protein thioesterase precursor, putative
  misc_feature (1)..(207): NCBI GI NO: 28393539 NR Description: putative palmitoyl-protein thioesterase precursor
  misc_feature (1)..(208): NCBI GI NO: 15238065 NR Description: palmitoyl protein thioesterase precursor, putative
  misc_feature (1)..(208): NCBI GI NO: 15232301 NR Description: palmitoyl protein thioesterase precursor, putative
MKDLSQGYNIVAQSQGNLVARGLIEFCDNAPPVFNYISLGGPHAGISDIPKCNSTLCELLKTAVYTDFVQDHIAPSGYIKIPTDIKDYLEHSKYLPKINNERPNERNTTFKDRFTSLHNLVLVMFEGDAVVIPKESSWFGYYPDGASTPLLSPQQTKLYTEDWIGLKTLDAARKVKFVSVPGEHLRIAQDDVVKHVVPYLKNQPASMSEDLEILHL

SEQ ID NO: 1725 - DNA, 1622 bp, Arabidopsis thaliana
  misc_feature (1)..(1622): Ceres Seq. ID no. 13611369
  misc_feature (89)..(89): n is a, c, t, g, unknown, or other
aatataggtgcatttaaaacataacgttccctctcttgtcttcttatttttgctctctgttctttagaactgccattaacgagagtgangagagagacacacacacacagcgagtgaaaatgtctccggagaagaagagtcaaaacttccctccaataacggaatgcagagacggagagtacgattcgatagccgccgatcttgacgggactctgcttctctcaagaagctccttcccttacttcatgctcgtcgctgttgaagctggaagccttttacgtggactaatcctccttctctcgttaccattcgtcattatctcttacctattcgtatccgaatctcttggtatccagatcctcatcttcatctcattcgctggtctcaaaatccgcgatatcgaacttgtctctcgcgcagttcttccacggttttacgcggcggatgtgaggaaagacagttttgaggtgtttgataagtgtaagagaaaagtggtagtgacggcgaatccgattgtgatggtggaggcgtttgtgaaggattatcttggaggtgataaagttttgggaacagagattgaagttaaccctaaaaccaatagagccactggatttgtgaagaagcctggtgttcttgttggtgatcttaagaggttagccattttaaaagagtttggtaacgaatcacctgatctcggcctcggtgatcgaacctctgatcatgatttcatgtctctctgcaagaaaggttacatggttcatgcgaccaagtcagccacaacgattccaaaagaacgcttaaagaaccgcatagtcttccatgatgggcgtttagcgcaacgtccaactccgttaaacgccattatcacatacctatggcttccttttggtttcatcctctccatcattcgcgtctacttcaacctccctttacctgaaagatttgtccgttacacttacgagatgctcgggatccacttaaccattcgtggtcatcgtcctccacctccttcccctggaactcttggcaacctctatgtccttaaccaccgtaccgcgcttgatcccatcatcgttgctattgctcttggacgtaagatctgttgcgtcacttacagtgtctctcgtctctcccttatgctttctcctattcctgctgttgccctcacccgtgaccgtgccaccgatgctgccaacatgagaaaacttctcgagaaaggcgacttggtgatatgtccggaaggcacgacgtgtagagaagagtatctactgagatttagcgctctattcgcagagctaagcgaccggattgtgccagtagcgatgaactgtaaacaaggaatgttcaacgggaccacagttaggggtgtgaagttttgggacccttacttcttcttcatgaacccaagaccaagctatgaagccactttcttggatcgtttgcctgaagaaatgactgtcaacggtggtggcaagactcctatagaggtggctaattacgtccagaaagttatcggcgcggttttgggcttcgaatgcaccgaacttactcgcaaggataaatatcttttgcttggaggtaatgacggcaaggtggagtctatcaacaacaccaagaagtga

SEQ ID NO: 1726 - protein, 500 aa, Arabidopsis thaliana
  peptide (1)..(500): Ceres Seq. ID no. 13611370
  misc_feature (286)..(403): Pfam Name: Pfam Description:  Acyltransferase
  misc_feature (1)..(499): NCBI GI NO: 15223437 NR Description: expressed protein [Arabidopsis thaliana]
  misc_feature (1)..(499): NCBI GI NO: 17064780 NR Description: Unknown protein [Arabidopsis thaliana]
  misc_feature (1)..(492): NCBI GI NO: 15224445 NR Description: phospholipid/glycerol acyltransferase family
  misc_feature (212)..(500): NCBI GI NO: 15236797 NR Description: expressed protein [Arabidopsis thaliana]
  misc_feature (10)..(497): NCBI GI NO: 38000002 NR Description: unknown protein
  misc_feature (45)..(497): NCBI GI NO: 29788867 NR Description: hypothetical protein
  misc_feature (10)..(494): NCBI GI NO: 37534314 NR Description: hypothetical protein
  misc_feature (23)..(496): NCBI GI NO: 15229747 NR Description: expressed protein [Arabidopsis thaliana]
  misc_feature (23)..(496): NCBI GI NO: 15239924 NR Description: phospholipid/glycerol acyltransferase family
  misc_feature (1)..(208): NCBI GI NO: 15236810 NR Description: expressed protein [Arabidopsis thaliana]
MSPEKKSQNFPPITECRDGEYDSIAADLDGTLLLSRSSFPYFMLVAVEAGSLLRGLILLLSLPFVIISYLFVSESLGIQILIFISFAGLKIRDIELVSRAVLPRFYAADVRKDSFEVFDKCKRKVVVTANPIVMVEAFVKDYLGGDKVLGTEIEVNPKTNRATGFVKKPGVLVGDLKRLAILKEFGNESPDLGLGDRTSDHDFMSLCKKGYMVHATKSATTIPKERLKNRIVFHDGRLAQRPTPLNAIITYLWLPFGFILSIIRVYFNLPLPERFVRYTYEMLGIHLTIRGHRPPPPSPGTLGNLYVLNHRTALDPIIVAIALGRKICCVTYSVSRLSLMLSPIPAVALTRDRATDAANMRKLLEKGDLVICPEGTTCREEYLLRFSALFAELSDRIVPVAMNCKQGMFNGTTVRGVKFWDPYFFFMNPRPSYEATFLDRLPEEMTVNGGGKTPIEVANYVQKVIGAVLGFECTELTRKDKYLLLGGNDGKVESINNTKK

SEQ ID NO: 1727 - protein, 458 aa, Arabidopsis thaliana
  peptide (1)..(458): Ceres Seq. ID no. 13611371
  misc_feature (244)..(361): Pfam Name: Pfam Description:  Acyltransferase
  misc_feature (1)..(457): NCBI GI NO: 15223437 NR Description: expressed protein [Arabidopsis thaliana]
  misc_feature (1)..(457): NCBI GI NO: 17064780 NR Description: Unknown protein [Arabidopsis thaliana]
  misc_feature (1)..(450): NCBI GI NO: 15224445 NR Description: phospholipid/glycerol acyltransferase family
  misc_feature (170)..(458): NCBI GI NO: 15236797 NR Description: expressed protein [Arabidopsis thaliana]
  misc_feature (1)..(455): NCBI GI NO: 38000002 NR Description: unknown protein
  misc_feature (3)..(455): NCBI GI NO: 29788867 NR Description: hypothetical protein
  misc_feature (1)..(452): NCBI GI NO: 37534314 NR Description: hypothetical protein
  misc_feature (1)..(454): NCBI GI NO: 15229747 NR Description: expressed protein [Arabidopsis thaliana]
  misc_feature (1)..(454): NCBI GI NO: 15239924 NR Description: phospholipid/glycerol acyltransferase family
  misc_feature (1)..(166): NCBI GI NO: 15236810 NR Description: expressed protein [Arabidopsis thaliana]
MLVAVEAGSLLRGLILLLSLPFVIISYLFVSESLGIQILIFISFAGLKIRDIELVSRAVLPRFYAADVRKDSFEVFDKCKRKVVVTANPIVMVEAFVKDYLGGDKVLGTEIEVNPKTNRATGFVKKPGVLVGDLKRLAILKEFGNESPDLGLGDRTSDHDFMSLCKKGYMVHATKSATTIPKERLKNRIVFHDGRLAQRPTPLNAIITYLWLPFGFILSIIRVYFNLPLPERFVRYTYEMLGIHLTIRGHRPPPPSPGTLGNLYVLNHRTALDPIIVAIALGRKICCVTYSVSRLSLMLSPIPAVALTRDRATDAANMRKLLEKGDLVICPEGTTCREEYLLRFSALFAELSDRIVPVAMNCKQGMFNGTTVRGVKFWDPYFFFMNPRPSYEATFLDRLPEEMTVNGGGKTPIEVANYVQKVIGAVLGFECTELTRKDKYLLLGGNDGKVESINNTKK

SEQ ID NO: 1728 - protein, 367 aa, Arabidopsis thaliana
  peptide (1)..(367): Ceres Seq. ID no. 13611372
  misc_feature (153)..(270): Pfam Name: Pfam Description:  Acyltransferase
  misc_feature (1)..(366): NCBI GI NO: 15223437 NR Description: expressed protein [Arabidopsis thaliana]
  misc_feature (1)..(366): NCBI GI NO: 17064780 NR Description: Unknown protein [Arabidopsis thaliana]
  misc_feature (1)..(359): NCBI GI NO: 15224445 NR Description: phospholipid/glycerol acyltransferase family
  misc_feature (79)..(367): NCBI GI NO: 15236797 NR Description: expressed protein [Arabidopsis thaliana]
  misc_feature (1)..(364): NCBI GI NO: 38000002 NR Description: unknown protein
  misc_feature (1)..(364): NCBI GI NO: 29788867 NR Description: hypothetical protein
  misc_feature (1)..(361): NCBI GI NO: 37534314 NR Description: hypothetical protein
  misc_feature (1)..(363): NCBI GI NO: 15229747 NR Description: expressed protein [Arabidopsis thaliana]
  misc_feature (1)..(363): NCBI GI NO: 15239924 NR Description: phospholipid/glycerol acyltransferase family
  misc_feature (1)..(75): NCBI GI NO: 15236810 NR Description: expressed protein [Arabidopsis thaliana]
MVEAFVKDYLGGDKVLGTEIEVNPKTNRATGFVKKPGVLVGDLKRLAILKEFGNESPDLGLGDRTSDHDFMSLCKKGYMVHATKSATTIPKERLKNRIVFHDGRLAQRPTPLNAIITYLWLPFGFILSIIRVYFNLPLPERFVRYTYEMLGIHLTIRGHRPPPPSPGTLGNLYVLNHRTALDPIIVAIALGRKICCVTYSVSRLSLMLSPIPAVALTRDRATDAANMRKLLEKGDLVICPEGTTCREEYLLRFSALFAELSDRIVPVAMNCKQGMFNGTTVRGVKFWDPYFFFMNPRPSYEATFLDRLPEEMTVNGGGKTPIEVANYVQKVIGAVLGFECTELTRKDKYLLLGGNDGKVESINNTKK

SEQ ID NO: 1729 - DNA, 1983 bp, Arabidopsis thaliana
  misc_feature (1)..(1983): Ceres Seq. ID no. 13509881
  misc_feature (136)..(136): n is a, c, t, g, unknown, or other
  misc_feature (62)..(62): n is a, c, t, g, unknown, or other
aaaaactctcttataataatctctctcaccatttcttctcttctcttcagaagaaagaaagnaactcataaaggagaagaaagaagaacagaagagtttctctatctaaaactcattctttctttctctctctatnccagagttctgtctgtgaaaacacacaaatctaagagaagttatgaataaacaagatgttatgaaacttcagacttgtgttctgaaagtgaacgtacactgtgaagggtgtaagcataaagtgaagaaacaattgcagaaaatcgaaggtgtttactctgtaaaagcagatgtagaacaggggagagttactgttacagggaacattgacccagctcttctggttaagaaacttagcaaatcaggcaaacatgccgagatcttaggcggtggtggaggaggaggcggcggaggtggaaaggggtttcctaatctgaatgggcaatttgcaaatctcaacatgggtggaaacaataagcctaaaggtggaaaagagagtaaccaagtcaagggtaaagctggtggtggcggtggaggaggtcagaatcatggacatggtcagccaatgcaattgaatcctcaacagattcaacagatgatgatgatgaaggctgctcacggtggtggtggtggtggtcagatgaagatgccgcctatggcagctaaggatcagaagaagtcagttaagtttgctgatgatgaagacgatgagtttagtgaagatgattatgatgatgaggatttcagtgaagatgattatgatgatgatgagttcgatgatgatgaagatgatgatgatgagatgggtcatggtcatggacatggaggaggtgggggtaatcacatgcctcctaataagatgatgatgcctaacaagatgatgcctcagatgggtggtcatcatggtaatggtggtggacctaagggtcccaatgagataatgatgatgatgaatgggttcaaaggcggaggcggtggaggaaagaaaggcggtggtggcgggtttgagattccggtgcagatgaagggaatgggtgagggtaaaaatggaaaggatggtaaaaagggtaaaggaggagagaagggtaagaaagaagggaaagagaataaaggtgggggcaaaaccggaaaaacagatgccaaaagtggtggtggtggccttctagggtttttcaaaaagggtaaaagtgggaacggagatgagaagaagagcgctgggaagaaagatggccatgggggtaataaggtcaaatctcatggtgggggaggaggagttcagcattatgatagtgggcctaaaaaaggtggtggtgggaccaaaggaggaggccatgggggccttgacattgatgagctcatgaaacacagcaaaggaggaggaggaggaggtaacaagggcaatcataatcatagcgccaaagggattggtggtggcccaatgggtccaggcggtccgatgggtccaggcggtccgatgggtcaaggtggtccgatgggtatgatgggtccaggtggtccgatgagtatgatgggtccaggcggtcctatgggtccaatgggtggccaaggcggctcttacccagcggttcaaggcttgccaatgagtggaggtggaggatattatccagggccgcctcaggcaagtcagcaaatgaaccaacaacaatatatgcaaatgatgatgaaccaacagcagcaacaacaacaacaacaacaagctgtagctcatggtggctatggcggtggtcacggtggcgacatgtaccatccgatgatgtacgctcggccttatcctgcagttaattatgctcaccctccaccaatgccgcctcctcactcggattcttatactcatatgttcagcgatgagaatccaggtagttgtagtattatgtgatcatcttttgtaatgttatttagaatatggacatgtatgcttgtcttagtcttatgtttttttttttgggg

SEQ ID NO: 1730 - protein, 577 aa, Arabidopsis thaliana
  peptide (1)..(577): Ceres Seq. ID no. 13509882
  misc_feature (172)..(472): Pfam Name: Pfam Description:  S-antigen protein
  misc_feature (41)..(577): NCBI GI NO: 6729032 NR Description: unknown protein [Arabidopsis thaliana]
  misc_feature (1)..(577): NCBI GI NO: 15239643 NR Description: heavy-metal-associated domain-containing protein
  misc_feature (416)..(577): NCBI GI NO: 30687142 NR Description: heavy-metal-associated domain-containing protein
  misc_feature (1)..(164): NCBI GI NO: 30687142 NR Description: heavy-metal-associated domain-containing protein
  misc_feature (1)..(398): NCBI GI NO: 18397481 NR Description: heavy-metal-associated domain-containing protein
  misc_feature (104)..(577): NCBI GI NO: 27754558 NR Description: unknown protein [Arabidopsis thaliana]
  misc_feature (75)..(461): NCBI GI NO: 27754558 NR Description: unknown protein [Arabidopsis thaliana]
  misc_feature (214)..(485): NCBI GI NO: 34394861 NR Description: putative glycin-rich protein
  misc_feature (74)..(132): NCBI GI NO: 34394861 NR Description: putative glycin-rich protein
  misc_feature (75)..(133): NCBI GI NO: 34394861 NR Description: putative glycin-rich protein
MNKQDVMKLQTCVLKVNVHCEGCKHKVKKQLQKIEGVYSVKADVEQGRVTVTGNIDPALLVKKLSKSGKHAEILGGGGGGGGGGGKGFPNLNGQFANLNMGGNNKPKGGKESNQVKGKAGGGGGGGQNHGHGQPMQLNPQQIQQMMMMKAAHGGGGGGQMKMPPMAAKDQKKSVKFADDEDDEFSEDDYDDEDFSEDDYDDDEFDDDEDDDDEMGHGHGHGGGGGNHMPPNKMMMPNKMMPQMGGHHGNGGGPKGPNEIMMMMNGFKGGGGGGKKGGGGGFEIPVQMKGMGEGKNGKDGKKGKGGEKGKKEGKENKGGGKTGKTDAKSGGGGLLGFFKKGKSGNGDEKKSAGKKDGHGGNKVKSHGGGGGVQHYDSGPKKGGGGTKGGGHGGLDIDELMKHSKGGGGGGNKGNHNHSAKGIGGGPMGPGGPMGPGGPMGQGGPMGMMGPGGPMSMMGPGGPMGPMGGQGGSYPAVQGLPMSGGGGYYPGPPQASQQMNQQQYMQMMMNQQQQQQQQQQAVAHGGYGGGHGGDMYHPMMYARPYPAVNYAHPPPMPPPHSDSYTHMFSDENPGSCSIM

SEQ ID NO: 1731 - protein, 571 aa, Arabidopsis thaliana
  peptide (1)..(571): Ceres Seq. ID no. 13509883
  misc_feature (166)..(466): Pfam Name: Pfam Description:  S-antigen protein
  misc_feature (35)..(571): NCBI GI NO: 6729032 NR Description: unknown protein [Arabidopsis thaliana]
  misc_feature (1)..(571): NCBI GI NO: 15239643 NR Description: heavy-metal-associated domain-containing protein
  misc_feature (410)..(571): NCBI GI NO: 30687142 NR Description: heavy-metal-associated domain-containing protein
  misc_feature (1)..(158): NCBI GI NO: 30687142 NR Description: heavy-metal-associated domain-containing protein
  misc_feature (1)..(392): NCBI GI NO: 18397481 NR Description: heavy-metal-associated domain-containing protein
  misc_feature (98)..(571): NCBI GI NO: 27754558 NR Description: unknown protein [Arabidopsis thaliana]
  misc_feature (69)..(455): NCBI GI NO: 27754558 NR Description: unknown protein [Arabidopsis thaliana]
  misc_feature (208)..(479): NCBI GI NO: 34394861 NR Description: putative glycin-rich protein
  misc_feature (68)..(126): NCBI GI NO: 34394861 NR Description: putative glycin-rich protein
  misc_feature (69)..(127): NCBI GI NO: 34394861 NR Description: putative glycin-rich protein
MKLQTCVLKVNVHCEGCKHKVKKQLQKIEGVYSVKADVEQGRVTVTGNIDPALLVKKLSKSGKHAEILGGGGGGGGGGGKGFPNLNGQFANLNMGGNNKPKGGKESNQVKGKAGGGGGGGQNHGHGQPMQLNPQQIQQMMMMKAAHGGGGGGQMKMPPMAAKDQKKSVKFADDEDDEFSEDDYDDEDFSEDDYDDDEFDDDEDDDDEMGHGHGHGGGGGNHMPPNKMMMPNKMMPQMGGHHGNGGGPKGPNEIMMMMNGFKGGGGGGKKGGGGGFEIPVQMKGMGEGKNGKDGKKGKGGEKGKKEGKENKGGGKTGKTDAKSGGGGLLGFFKKGKSGNGDEKKSAGKKDGHGGNKVKSHGGGGGVQHYDSGPKKGGGGTKGGGHGGLDIDELMKHSKGGGGGGNKGNHNHSAKGIGGGPMGPGGPMGPGGPMGQGGPMGMMGPGGPMSMMGPGGPMGPMGGQGGSYPAVQGLPMSGGGGYYPGPPQASQQMNQQQYMQMMMNQQQQQQQQQQAVAHGGYGGGHGGDMYHPMMYARPYPAVNYAHPPPMPPPHSDSYTHMFSDENPGSCSIM

SEQ ID NO: 1732 - protein, 478 aa, Arabidopsis thaliana
  peptide (1)..(478): Ceres Seq. ID no. 13509884
  misc_feature (73)..(373): Pfam Name: Pfam Description:  S-antigen protein
  misc_feature (1)..(478): NCBI GI NO: 6729032 NR Description: unknown protein [Arabidopsis thaliana]
  misc_feature (1)..(478): NCBI GI NO: 15239643 NR Description: heavy-metal-associated domain-containing protein
  misc_feature (317)..(478): NCBI GI NO: 30687142 NR Description: heavy-metal-associated domain-containing protein
  misc_feature (1)..(65): NCBI GI NO: 30687142 NR Description: heavy-metal-associated domain-containing protein
  misc_feature (1)..(299): NCBI GI NO: 18397481 NR Description: heavy-metal-associated domain-containing protein
  misc_feature (5)..(478): NCBI GI NO: 27754558 NR Description: unknown protein [Arabidopsis thaliana]
  misc_feature (1)..(362): NCBI GI NO: 27754558 NR Description: unknown protein [Arabidopsis thaliana]
  misc_feature (115)..(386): NCBI GI NO: 34394861 NR Description: putative glycin-rich protein
  misc_feature (1)..(33): NCBI GI NO: 34394861 NR Description: putative glycin-rich protein
  misc_feature (1)..(34): NCBI GI NO: 34394861 NR Description: putative glycin-rich protein
MGGNNKPKGGKESNQVKGKAGGGGGGGQNHGHGQPMQLNPQQIQQMMMMKAAHGGGGGGQMKMPPMAAKDQKKSVKFADDEDDEFSEDDYDDEDFSEDDYDDDEFDDDEDDDDEMGHGHGHGGGGGNHMPPNKMMMPNKMMPQMGGHHGNGGGPKGPNEIMMMMNGFKGGGGGGKKGGGGGFEIPVQMKGMGEGKNGKDGKKGKGGEKGKKEGKENKGGGKTGKTDAKSGGGGLLGFFKKGKSGNGDEKKSAGKKDGHGGNKVKSHGGGGGVQHYDSGPKKGGGGTKGGGHGGLDIDELMKHSKGGGGGGNKGNHNHSAKGIGGGPMGPGGPMGPGGPMGQGGPMGMMGPGGPMSMMGPGGPMGPMGGQGGSYPAVQGLPMSGGGGYYPGPPQASQQMNQQQYMQMMMNQQQQQQQQQQAVAHGGYGGGHGGDMYHPMMYARPYPAVNYAHPPPMPPPHSDSYTHMFSDENPGSCSIM

SEQ ID NO: 1733 - DNA, 1207 bp, Arabidopsis thaliana
  misc_feature (1)..(1207): Ceres Seq. ID no. 12390595
acacctcacatccttttctttccccttctctcaaccttttggtggaaaaaaccagaaaatggggttgcatccaatttccgacgccaatgaacacaatcccttcggctctctcaccgccgacgaattctacgccaaacattccgttagccactcctccgctttcatcaccaaccctcgcggtctcaaactcttcactcaatggtggtcaccactccctccaactaaaccaatcggtatcatcgctgtcgttcatggcttcaccggcgaatccagttggttccttcagctcacatcaatcctcttcgctaaatccggtttcataacctgcgcaattgatcaccaaggccatggattctccgatggactcatcgctcatatccctgacatcaatcccgtcgtcgatgactgtatctctttcttcgatgacttccgtagccgtcaaacaccgtcagatctgccgtgttttctctactctgaatccctaggcggcgcgattgctctctacatctcgcttcgtcagagaggtgtttgggatggacttatcctcaacggagctatgtgtggaatcagcgataaattcaaaccgccgtggccgttggagcatttgctattcgtcgtcgcgaatcttatccctacttggcgcgttatccccactcgcggatctattcccgatgtttcgttcaaggagccgtggaagaggaagcttgccatggctagcccaaggaggacggtggcgaaaccacgggccgctactgcttatgagctgattcgtgtttgtaaggatctgcaggggaggtttgaggaagtggaggttccgcttctgattgtgcacggcggaggtgatgttgtatgcgacgtagcgtgtgttgaggagcttcatcggagagcgattagtgaggataagacgatcaagatctaccctgagttgtggcatcagatgattggggaatcggaggagaaagtcgatctggtttacggtgatatgctgagctggctcaagagtcgagctgaaaggaaggcacgcgccgccgttgatggaggagcagcttagagtcccttttgagtctttgggtgttgtattgtagtccaataggactgtgccatctggcaagaaactatttatggttttactgtttcgtaatcgtagcacatggtttacagttaaaccaatacctttgggtatcatcaataatataaaaaatcgttg

SEQ ID NO: 1734 - protein, 349 aa, Arabidopsis thaliana
  peptide (1)..(349): Ceres Seq. ID no. 12390596
  misc_feature (106)..(324): Pfam Name: Pfam Description:  alpha/beta hydrolase fold
  misc_feature (20)..(349): NCBI GI NO: 15239709 NR Description: phospholipase - like protein
  misc_feature (20)..(337): NCBI GI NO: 15242179 NR Description: lysophospholipase -like protein
  misc_feature (23)..(346): NCBI GI NO: 34894634 NR Description: P0028G04.16
  misc_feature (30)..(335): NCBI GI NO: 15220284 NR Description: lysophospholipase isolog; protein id: At1g11090.1
  misc_feature (38)..(335): NCBI GI NO: 34899776 NR Description: putative lysophospholipase isolog
  misc_feature (48)..(337): NCBI GI NO: 30687879 NR Description: hydrolase, alpha/beta fold family
  misc_feature (53)..(337): NCBI GI NO: 7487947 NR Description: lysophospholipase homolog F12L6
  misc_feature (47)..(335): NCBI GI NO: 7487948 NR Description: lysophospholipase homolog F12L6
  misc_feature (47)..(335): NCBI GI NO: 30687883 NR Description: esterase/lipase/thioesterase family
  misc_feature (48)..(336): NCBI GI NO: 18405038 NR Description: putative phospholipase; protein id: At2g39400
HLTSFSFPFSQPFGGKNQKMGLHPISDANEHNPFGSLTADEFYAKHSVSHSSAFITNPRGLKLFTQWWSPLPPTKPIGIIAVVHGFTGESSWFLQLTSILFAKSGFITCAIDHQGHGFSDGLIAHIPDINPVVDDCISFFDDFRSRQTPSDLPCFLYSESLGGAIALYISLRQRGVWDGLILNGAMCGISDKFKPPWPLEHLLFVVANLIPTWRVIPTRGSIPDVSFKEPWKRKLAMASPRRTVAKPRAATAYELIRVCKDLQGRFEEVEVPLLIVHGGGDVVCDVACVEELHRRAISEDKTIKIYPELWHQMIGESEEKVDLVYGDMLSWLKSRAERKARAAVDGGAA

SEQ ID NO: 1735 - protein, 330 aa, Arabidopsis thaliana
  peptide (1)..(330): Ceres Seq. ID no. 12390597
  misc_feature (87)..(305): Pfam Name: Pfam Description:  alpha/beta hydrolase fold
  misc_feature (1)..(330): NCBI GI NO: 15239709 NR Description: phospholipase - like protein
  misc_feature (1)..(318): NCBI GI NO: 15242179 NR Description: lysophospholipase -like protein
  misc_feature (4)..(327): NCBI GI NO: 34894634 NR Description: P0028G04.16
  misc_feature (11)..(316): NCBI GI NO: 15220284 NR Description: lysophospholipase isolog; protein id: At1g11090.1
  misc_feature (19)..(316): NCBI GI NO: 34899776 NR Description: putative lysophospholipase isolog
  misc_feature (29)..(318): NCBI GI NO: 30687879 NR Description: hydrolase, alpha/beta fold family
  misc_feature (34)..(318): NCBI GI NO: 7487947 NR Description: lysophospholipase homolog F12L6
  misc_feature (28)..(316): NCBI GI NO: 7487948 NR Description: lysophospholipase homolog F12L6
  misc_feature (28)..(316): NCBI GI NO: 30687883 NR Description: esterase/lipase/thioesterase family
  misc_feature (29)..(317): NCBI GI NO: 18405038 NR Description: putative phospholipase; protein id: At2g39400
MGLHPISDANEHNPFGSLTADEFYAKHSVSHSSAFITNPRGLKLFTQWWSPLPPTKPIGIIAVVHGFTGESSWFLQLTSILFAKSGFITCAIDHQGHGFSDGLIAHIPDINPVVDDCISFFDDFRSRQTPSDLPCFLYSESLGGAIALYISLRQRGVWDGLILNGAMCGISDKFKPPWPLEHLLFVVANLIPTWRVIPTRGSIPDVSFKEPWKRKLAMASPRRTVAKPRAATAYELIRVCKDLQGRFEEVEVPLLIVHGGGDVVCDVACVEELHRRAISEDKTIKIYPELWHQMIGESEEKVDLVYGDMLSWLKSRAERKARAAVDGGAA

SEQ ID NO: 1736 - DNA, 1646 bp, Arabidopsis thaliana
  misc_feature (1)..(1646): Ceres Seq. ID no. 13495734
ccaccaccaccttcgatcgatttctactaacttgttcttcttcttctttctcaactctcttgtcttttgtctctccaccaattttttcttgttctttctctctccaccacataaaaaaaaaaaacctagctttgtcccctcaactcactgattgaactgcttgattttcgattgatcatctgggtggttttgaatcgaagagtattgttgtattagtggctggtggctctccaaaagagtaaggccggagagagaaatcaatggcctctggcggcggagaggcggataaatcacttgaaatcgggtccgggaccgcggatcccaaaataggcggtactgggagcaggagcgccggagaagaacgatacttcagggcagatacactggatttcagtaaatgggatttgcatatgggtcaaacctctactagcagcgtcctcaccaattccgcttccacgagcgctcccgcaccggcgatgcaggaatgggagattgacctctccaaactcgatatgaagcacgtcctcgctcacggtacttacggcactgtctaccgcggtgtctacgccggccaagaagtcgcagtgaaagtgttagattggggagaagatggttacgccacaccagctgaaactacagctctccgtgcttccttcgagcaagaggtcgccgtctggcagaagctcgatcatcccaacgttaccaagtttataggagcatccatgggaacctctgatctgcggatccctcctgctggtgatactggcggacgtggtaacggtgcacatcctgcgagggcctgttgtgttgtggttgaatatgttgccggaggcacgcttaagaagttcctcatcaagaaatatagggccaaactacccatcaaggatgtcattcagctcgctttggatctcgctagagggcttagttacctccactccaaggcgattgtacatagggacgtgaagtcagagaacatgctgttacagcctaacaagacgctgaagatcgctgatttcggggtagctagagttgaagctcagaaccctcaagacatgacgggtgaaactggaacacttggatacatggcaccagaggttcttgaaggaaagccttacaacaggaaatgcgatgtctatagctttggggtatgcctctgggaaatatactgctgtgacatgccctatgctgactgtagttttgctgagatctctcacgccgttgttcataggaatctgagaccagagattccgaaatgctgcccgcatgcggtggcaaacatcatgaagagatgctgggacccgaatccagacaggcgtccggagatggaggaggtggtgaagctgcttgaagccatagacacaagcaaaggtggtggaatgatagctccggaccagtttcaggggtgcctctgtttcttcaaacctcgaggcccctgaatctctctccctctctttcctttttgctccgtgtctgatatattcttgagagctgcgtgattctttggattttgtatttactttgagctatgggagttggattggtgtgggttttgtcataagaatctttctgcgctctatgtatttatatacttaacacagtcgtgtataattcgattaagctttattttattttttgatgttgattcc

SEQ ID NO: 1737 - protein, 391 aa, Arabidopsis thaliana
  peptide (1)..(391): Ceres Seq. ID no. 13495735
  misc_feature (1)..(391): NCBI GI NO: 15229398 NR Description: protein kinase, putative (ATMRK1)
  misc_feature (1)..(391): NCBI GI NO: 21554375 NR Description: ATMRK1 [Arabidopsis thaliana]
  misc_feature (24)..(391): NCBI GI NO: 18403507 NR Description: protein kinase, putative [Arabidopsis thaliana]
  misc_feature (74)..(391): NCBI GI NO: 15232131 NR Description: protein kinase, putative [Arabidopsis thaliana]
  misc_feature (33)..(391): NCBI GI NO: 15233574 NR Description: protein kinase, putative [Arabidopsis thaliana]
  misc_feature (52)..(391): NCBI GI NO: 15240597 NR Description: protein kinase, putative [Arabidopsis thaliana]
  misc_feature (52)..(391): NCBI GI NO: 21553402 NR Description: protein kinase [Arabidopsis thaliana]
  misc_feature (74)..(391): NCBI GI NO: 34911620 NR Description: protein kinase -like
  misc_feature (74)..(391): NCBI GI NO: 29367399 NR Description: putative protein kinase
  misc_feature (2)..(390): NCBI GI NO: 14626298 NR Description: putative protein kinase
MASGGGEADKSLEIGSGTADPKIGGTGSRSAGEERYFRADTLDFSKWDLHMGQTSTSSVLTNSASTSAPAPAMQEWEIDLSKLDMKHVLAHGTYGTVYRGVYAGQEVAVKVLDWGEDGYATPAETTALRASFEQEVAVWQKLDHPNVTKFIGASMGTSDLRIPPAGDTGGRGNGAHPARACCVVVEYVAGGTLKKFLIKKYRAKLPIKDVIQLALDLARGLSYLHSKAIVHRDVKSENMLLQPNKTLKIADFGVARVEAQNPQDMTGETGTLGYMAPEVLEGKPYNRKCDVYSFGVCLWEIYCCDMPYADCSFAEISHAVVHRNLRPEIPKCCPHAVANIMKRCWDPNPDRRPEMEEVVKLLEAIDTSKGGGMIAPDQFQGCLCFFKPRGP

SEQ ID NO: 1738 - protein, 341 aa, Arabidopsis thaliana
  peptide (1)..(341): Ceres Seq. ID no. 13495736
  misc_feature (1)..(341): NCBI GI NO: 15229398 NR Description: protein kinase, putative (ATMRK1)
  misc_feature (1)..(341): NCBI GI NO: 21554375 NR Description: ATMRK1 [Arabidopsis thaliana]
  misc_feature (1)..(341): NCBI GI NO: 18403507 NR Description: protein kinase, putative [Arabidopsis thaliana]
  misc_feature (24)..(341): NCBI GI NO: 15232131 NR Description: protein kinase, putative [Arabidopsis thaliana]
  misc_feature (1)..(341): NCBI GI NO: 15233574 NR Description: protein kinase, putative [Arabidopsis thaliana]
  misc_feature (2)..(341): NCBI GI NO: 15240597 NR Description: protein kinase, putative [Arabidopsis thaliana]
  misc_feature (2)..(341): NCBI GI NO: 21553402 NR Description: protein kinase [Arabidopsis thaliana]
  misc_feature (24)..(341): NCBI GI NO: 34911620 NR Description: protein kinase -like
  misc_feature (24)..(341): NCBI GI NO: 29367399 NR Description: putative protein kinase
  misc_feature (1)..(340): NCBI GI NO: 14626298 NR Description: putative protein kinase
MGQTSTSSVLTNSASTSAPAPAMQEWEIDLSKLDMKHVLAHGTYGTVYRGVYAGQEVAVKVLDWGEDGYATPAETTALRASFEQEVAVWQKLDHPNVTKFIGASMGTSDLRIPPAGDTGGRGNGAHPARACCVVVEYVAGGTLKKFLIKKYRAKLPIKDVIQLALDLARGLSYLHSKAIVHRDVKSENMLLQPNKTLKIADFGVARVEAQNPQDMTGETGTLGYMAPEVLEGKPYNRKCDVYSFGVCLWEIYCCDMPYADCSFAEISHAVVHRNLRPEIPKCCPHAVANIMKRCWDPNPDRRPEMEEVVKLLEAIDTSKGGGMIAPDQFQGCLCFFKPRGP

SEQ ID NO: 1739 - protein, 319 aa, Arabidopsis thaliana
  peptide (1)..(319): Ceres Seq. ID no. 13495737
  misc_feature (1)..(319): NCBI GI NO: 15229398 NR Description: protein kinase, putative (ATMRK1)
  misc_feature (1)..(319): NCBI GI NO: 21554375 NR Description: ATMRK1 [Arabidopsis thaliana]
  misc_feature (1)..(319): NCBI GI NO: 18403507 NR Description: protein kinase, putative [Arabidopsis thaliana]
  misc_feature (2)..(319): NCBI GI NO: 15232131 NR Description: protein kinase, putative [Arabidopsis thaliana]
  misc_feature (1)..(319): NCBI GI NO: 15233574 NR Description: protein kinase, putative [Arabidopsis thaliana]
  misc_feature (1)..(319): NCBI GI NO: 15240597 NR Description: protein kinase, putative [Arabidopsis thaliana]
  misc_feature (1)..(319): NCBI GI NO: 21553402 NR Description: protein kinase [Arabidopsis thaliana]
  misc_feature (2)..(319): NCBI GI NO: 34911620 NR Description: protein kinase -like
  misc_feature (2)..(319): NCBI GI NO: 29367399 NR Description: putative protein kinase
  misc_feature (1)..(318): NCBI GI NO: 14626298 NR Description: putative protein kinase
MQEWEIDLSKLDMKHVLAHGTYGTVYRGVYAGQEVAVKVLDWGEDGYATPAETTALRASFEQEVAVWQKLDHPNVTKFIGASMGTSDLRIPPAGDTGGRGNGAHPARACCVVVEYVAGGTLKKFLIKKYRAKLPIKDVIQLALDLARGLSYLHSKAIVHRDVKSENMLLQPNKTLKIADFGVARVEAQNPQDMTGETGTLGYMAPEVLEGKPYNRKCDVYSFGVCLWEIYCCDMPYADCSFAEISHAVVHRNLRPEIPKCCPHAVANIMKRCWDPNPDRRPEMEEVVKLLEAIDTSKGGGMIAPDQFQGCLCFFKPRGP

SEQ ID NO: 1740 - DNA, 1064 bp, Arabidopsis thaliana
  misc_feature (1)..(1064): Ceres Seq. ID no. 12560070
caatcttttcttcgatctctttcttttttatctcttcatcgattgtgagaaaagttttgatttgtctctctatatctttcatctttcttatttttacactttgatagattctctatttttggaatctgattcatatgtttggggtttaatagtttcagctcaaagaaatctgggttaaagtgtgttagtgttcgtgtgttctctaaaggaaaatcctgaagaaaccaattgtaacttgtacactgggaaaatataagtgttcctgaggagtaaaagaggggaaaaagagaatgagaatagtccgggttaacgggaggcatagcgtctgggaagagtacagtgtctaacctcttcaaggctagtggcattcccgttgttgacgctgatgttgttgctcgagatgtattgaagaaaggaagcggtggatggaaaagagtcgttgcagcttttggtgaggagattctgcttcctagtggagaagtggatcggccaaaactcggtcagattgtgttctcgtctgattccaagcgtcaacttctaaacaagctgatggctccatacatatcaagtggtatcttctgggaaattctgaaacaatgggcgaagtggagctaaagtgatagttgtcgatatccctttgttgttcgaagtgaagatggataaatggactaaacctattgtggttgtgtgggttagtcaagagacacaacttaagagactgatggagagagatggattgagtgaggaagatgcaagaaacagagtgatggctcagatgccgttggattcgaaaagaagcaaagctgatgttgtgatcgataataatggctctcttgacgaccttcaccaacagttcgagaaggttttgattgaaattagaagaccattgacgtggatcgagttttggcgttcaaggcaaggagccttctcggtccttggttcagtgattttaggattatctgtttgcaaacagctcaaaattggctcttaacatttcacttctgttactgctaaaaaacttgttataatcttaaagctttgatttattattctcttgctctctc

SEQ ID NO: 1741 - protein, 111 aa, Arabidopsis thaliana
  peptide (1)..(111): Ceres Seq. ID no. 12560071
  misc_feature (1)..(62): Pfam Name: Pfam Description:  Dephospho-CoA kinase
  misc_feature (1)..(111): NCBI GI NO: 15225886 NR Description: unknown protein; protein id: At2g27490.1
  misc_feature (1)..(106): NCBI GI NO: 14587322 NR Description: P0460H02.3
  misc_feature (1)..(66): NCBI GI NO: 16800666 NR Description: similar to unknown proteins [Listeria innocua]
  misc_feature (1)..(71): NCBI GI NO: 21402627 NR Description: CoaE, Dephospho-CoA kinase
  misc_feature (1)..(71): NCBI GI NO: 16079958 NR Description: similar to hypothetical proteins
  misc_feature (1)..(73): NCBI GI NO: 29375465 NR Description: dephospho-CoA kinase, putative
  misc_feature (1)..(66): NCBI GI NO: 16803603 NR Description: similar to unknown proteins
  misc_feature (1)..(71): NCBI GI NO: 30022659 NR Description: Dephospho-CoA kinase [Bacillus cereus ATCC 14579]
  misc_feature (1)..(109): NCBI GI NO: 20151879 NR Description: RH63365p [Drosophila melanogaster]
  misc_feature (1)..(109): NCBI GI NO: 24644728 NR Description: CG1939-PA [Drosophila melanogaster]
MDKWTKPIVVVWVSQETQLKRLMERDGLSEEDARNRVMAQMPLDSKRSKADVVIDNNGSLDDLHQQFEKVLIEIRRPLTWIEFWRSRQGAFSVLGSVILGLSVCKQLKIGS

SEQ ID NO: 1742 - protein, 89 aa, Arabidopsis thaliana
  peptide (1)..(89): Ceres Seq. ID no. 12560072
  misc_feature (1)..(89): NCBI GI NO: 15225886 NR Description: unknown protein; protein id: At2g27490.1
  misc_feature (1)..(84): NCBI GI NO: 14587322 NR Description: P0460H02.3
  misc_feature (1)..(44): NCBI GI NO: 16800666 NR Description: similar to unknown proteins [Listeria innocua]
  misc_feature (1)..(49): NCBI GI NO: 21402627 NR Description: CoaE, Dephospho-CoA kinase
  misc_feature (1)..(49): NCBI GI NO: 16079958 NR Description: similar to hypothetical proteins
  misc_feature (1)..(51): NCBI GI NO: 29375465 NR Description: dephospho-CoA kinase, putative
  misc_feature (1)..(44): NCBI GI NO: 16803603 NR Description: similar to unknown proteins
  misc_feature (1)..(49): NCBI GI NO: 30022659 NR Description: Dephospho-CoA kinase [Bacillus cereus ATCC 14579]
  misc_feature (1)..(87): NCBI GI NO: 20151879 NR Description: RH63365p [Drosophila melanogaster]
  misc_feature (1)..(87): NCBI GI NO: 24644728 NR Description: CG1939-PA [Drosophila melanogaster]
MERDGLSEEDARNRVMAQMPLDSKRSKADVVIDNNGSLDDLHQQFEKVLIEIRRPLTWIEFWRSRQGAFSVLGSVILGLSVCKQLKIGS

SEQ ID NO: 1743 - protein, 74 aa, Arabidopsis thaliana
  peptide (1)..(74): Ceres Seq. ID no. 12560073
  misc_feature (1)..(74): NCBI GI NO: 15225886 NR Description: unknown protein; protein id: At2g27490.1
  misc_feature (1)..(69): NCBI GI NO: 14587322 NR Description: P0460H02.3
  misc_feature (1)..(29): NCBI GI NO: 16800666 NR Description: similar to unknown proteins [Listeria innocua]
  misc_feature (1)..(34): NCBI GI NO: 21402627 NR Description: CoaE, Dephospho-CoA kinase
  misc_feature (1)..(34): NCBI GI NO: 16079958 NR Description: similar to hypothetical proteins
  misc_feature (1)..(36): NCBI GI NO: 29375465 NR Description: dephospho-CoA kinase, putative
  misc_feature (1)..(29): NCBI GI NO: 16803603 NR Description: similar to unknown proteins
  misc_feature (1)..(34): NCBI GI NO: 30022659 NR Description: Dephospho-CoA kinase [Bacillus cereus ATCC 14579]
  misc_feature (1)..(72): NCBI GI NO: 20151879 NR Description: RH63365p [Drosophila melanogaster]
  misc_feature (1)..(72): NCBI GI NO: 24644728 NR Description: CG1939-PA [Drosophila melanogaster]
MAQMPLDSKRSKADVVIDNNGSLDDLHQQFEKVLIEIRRPLTWIEFWRSRQGAFSVLGSVILGLSVCKQLKIGS

SEQ ID NO: 1744 - DNA, 783 bp, Arabidopsis thaliana
  misc_feature (1)..(783): Ceres Seq. ID no. 12357676
ttggcgagaaaagttgagaactggaatcgaagaagcgatagggttttggttacttggagtgtgagtattttagttaccaccgcttgcaatttcaaattggtttcttttttccggtgacatttagtaagacaatggaagaaataagatcggcgatggagaagcaagtggatctcgtagcggatctggttgagaaactctccggagagctccgaacggggtttcaacctgcttacgataatttcttggggtttttccacgccattaattggaaggaaccttggattatgggtttaatggcgtttcatgctttgttgttactagtgactcttctttctagaaggcatctcaacttccatatgttcctcttcttattggctttggctggggtatactttgcagagaatctcaaccgggagttgaggaaaaactggaagagcttctcaactcaaaactactttgactcgaacggagtcttcctatcgactctctggtctgggaccacttttggtcattgcaatgataatcctgataaacacactcttttcgctttgctacttaatcgtaaagtggaaaagagctgagctcaggcatcgcgcaaggcttgctcataccaaggaggaatgatcccactttttttaatctcacatttatgtatactctcacacaatgcatcaaaactgttttgagttttttagtagaagctgctcttttatgtatttcgttttcaattgaatcgaattgtatcaaaccgaaccaaaccaaattattctacttcggtctgtt

SEQ ID NO: 1745 - protein, 149 aa, Arabidopsis thaliana
  peptide (1)..(149): Ceres Seq. ID no. 12357677
  misc_feature (1)..(122): NCBI GI NO: 21554376 NR Description: unknown [Arabidopsis thaliana]
  misc_feature (1)..(122): NCBI GI NO: 18399227 NR Description: Expressed protein; protein id: At1g34350
  misc_feature (1)..(122): NCBI GI NO: 38637052 NR Description: unknown protein
  misc_feature (1)..(47): NCBI GI NO: 25518732 NR Description: hypothetical protein F7P12.4
  misc_feature (46)..(82): NCBI GI NO: 25518732 NR Description: hypothetical protein F7P12.4
  misc_feature (40)..(121): NCBI GI NO: 24653051 NR Description: CG30051-PB [Drosophila melanogaster]
  misc_feature (45)..(121): NCBI GI NO: 11359939 NR Description: hypothetical protein DKFZp434C1714
  misc_feature (45)..(121): NCBI GI NO: 16359094 NR Description: Unknown (protein for IMAGE:4686355) [Homo sapiens]
  misc_feature (45)..(121): NCBI GI NO: 21595411 NR Description: Hypothetical protein DKFZp434C1714 [Homo sapiens]
  misc_feature (45)..(121): NCBI GI NO: 25286705 NR Description: cDNA sequence BC024093 [Mus musculus]
MEEIRSAMEKQVDLVADLVEKLSGELRTGFQPAYDNFLGFFHAINWKEPWIMGLMAFHALLLLVTLLSRRHLNFHMFLFLLALAGVYFAENLNRELRKNWKSFSTQNYFDSNGVFLSTLWSGTTFGHCNDNPDKHTLFALLLNRKVEKS

SEQ ID NO: 1746 - protein, 142 aa, Arabidopsis thaliana
  peptide (1)..(142): Ceres Seq. ID no. 12357678
  misc_feature (1)..(115): NCBI GI NO: 21554376 NR Description: unknown [Arabidopsis thaliana]
  misc_feature (1)..(115): NCBI GI NO: 18399227 NR Description: Expressed protein; protein id: At1g34350
  misc_feature (1)..(115): NCBI GI NO: 38637052 NR Description: unknown protein
  misc_feature (1)..(40): NCBI GI NO: 25518732 NR Description: hypothetical protein F7P12.4
  misc_feature (39)..(75): NCBI GI NO: 25518732 NR Description: hypothetical protein F7P12.4
  misc_feature (33)..(114): NCBI GI NO: 24653051 NR Description: CG30051-PB [Drosophila melanogaster]
  misc_feature (38)..(114): NCBI GI NO: 11359939 NR Description: hypothetical protein DKFZp434C1714
  misc_feature (38)..(114): NCBI GI NO: 16359094 NR Description: Unknown (protein for IMAGE:4686355) [Homo sapiens]
  misc_feature (38)..(114): NCBI GI NO: 21595411 NR Description: Hypothetical protein DKFZp434C1714 [Homo sapiens]
  misc_feature (38)..(114): NCBI GI NO: 25286705 NR Description: cDNA sequence BC024093 [Mus musculus]
MEKQVDLVADLVEKLSGELRTGFQPAYDNFLGFFHAINWKEPWIMGLMAFHALLLLVTLLSRRHLNFHMFLFLLALAGVYFAENLNRELRKNWKSFSTQNYFDSNGVFLSTLWSGTTFGHCNDNPDKHTLFALLLNRKVEKS

SEQ ID NO: 1747 - protein, 98 aa, Arabidopsis thaliana
  peptide (1)..(98): Ceres Seq. ID no. 12357679
  misc_feature (1)..(71): NCBI GI NO: 21554376 NR Description: unknown [Arabidopsis thaliana]
  misc_feature (1)..(71): NCBI GI NO: 18399227 NR Description: Expressed protein; protein id: At1g34350
  misc_feature (1)..(71): NCBI GI NO: 38637052 NR Description: unknown protein
  misc_feature (1)..(31): NCBI GI NO: 25518732 NR Description: hypothetical protein F7P12.4
  misc_feature (1)..(70): NCBI GI NO: 24653051 NR Description: CG30051-PB [Drosophila melanogaster]
  misc_feature (1)..(70): NCBI GI NO: 11359939 NR Description: hypothetical protein DKFZp434C1714
  misc_feature (1)..(70): NCBI GI NO: 16359094 NR Description: Unknown (protein for IMAGE:4686355) [Homo sapiens]
  misc_feature (1)..(70): NCBI GI NO: 21595411 NR Description: Hypothetical protein DKFZp434C1714 [Homo sapiens]
  misc_feature (1)..(70): NCBI GI NO: 25286705 NR Description: cDNA sequence BC024093 [Mus musculus]
  misc_feature (1)..(70): NCBI GI NO: 34864175 NR Description: similar to cDNA sequence BC024093
MGLMAFHALLLLVTLLSRRHLNFHMFLFLLALAGVYFAENLNRELRKNWKSFSTQNYFDSNGVFLSTLWSGTTFGHCNDNPDKHTLFALLLNRKVEKS

SEQ ID NO: 1748 - DNA, 1233 bp, Arabidopsis thaliana
  misc_feature (1)..(1233): Ceres Seq. ID no. 12336540
aattactttagagatttcccaaattccgtctcgaagatgtcaacggagagacgtgcttcgtcgaatccaatgaccaacgaagagaacgctatgttccttgatatattgcatgaagcaccattatttggtcacaggaaatctagaagccttgttggaagttacctctatatgcttctattggcaggttatgctattttagctgctggtgctccttggatgtttcaccgagtccaacagttgaccccttcattgctctgctgctgcgatgttgcgcttttggttgtcacaggtgtctttcaacaatactttgtttatcaagtccagaaaatacgtctccagggttattacagtttcagtcaaaagttgaagcatgttgttcgtctgccatttgcaatcgctgcatatgggactgctgcaatgcttcttgtgatagtgtggaggcctcaaatccacattctttctatttcttctttgcaacggatcatcatgttggttgaagcagtgggcgctggctttttcatgggtttatacatcggttatgtgcaccaatacaattccgtgaattcccggccagatgtcttgaagtcattatattctcctcttcagccgtcaagttctatggaaggtttgaggtattatgaaggccggctttctgatcaacaaacggctttgttacaatatcaacgtgaaaatctccattttctaagcgaggagattctgtgcttgcaagagaaacttagcaaatatgaacaatctgatgatggaagcacacctcaggttgatctcgcacatcttttagctgctcgagatcaagagctgaggacactttcagctgagatgaatcagcttcagtctgagctacggcttgctcgttctttaatagccgagagagatgcagaggtgcagcgtgtcaacagtaccaacaaccagtatatcgaagaaaacgaaagactgagggcaattttgagtgaatggagcatgcgggcagcgaatcttgagagagctttggaagtggaacggatgtcgaactcagaactacagaaggaagtagcaagcacgcgtagaaagcagatgcttgagacaacaacgtctgagcaaccttaattctaatatgggaatcaaagcttatataggtttttaacataatctctaaagtttgatggtgtaactataaagatcatggaatgtgtctactgaaagaagtttgtgtagtaaacggctcttttgtttttt

SEQ ID NO: 1749 - protein, 367 aa, Arabidopsis thaliana
  peptide (1)..(367): Ceres Seq. ID no. 12336541
  misc_feature (13)..(367): NCBI GI NO: 18396221 NR Description: Expressed protein; protein id: At2g06005
  misc_feature (140)..(367): NCBI GI NO: 20453094 NR Description: At2g06010/F5K7.23 [Arabidopsis thaliana]
  misc_feature (211)..(314): NCBI GI NO: 25411202 NR Description: hypothetical protein At2g06010
  misc_feature (238)..(359): NCBI GI NO: 15242018 NR Description: putative protein; protein id: At5g20580.1
NYFRDFPNSVSKMSTERRASSNPMTNEENAMFLDILHEAPLFGHRKSRSLVGSYLYMLLLAGYAILAAGAPWMFHRVQQLTPSLLCCCDVALLVVTGVFQQYFVYQVQKIRLQGYYSFSQKLKHVVRLPFAIAAYGTAAMLLVIVWRPQIHILSISSLQRIIMLVEAVGAGFFMGLYIGYVHQYNSVNSRPDVLKSLYSPLQPSSSMEGLRYYEGRLSDQQTALLQYQRENLHFLSEEILCLQEKLSKYEQSDDGSTPQVDLAHLLAARDQELRTLSAEMNQLQSELRLARSLIAERDAEVQRVNSTNNQYIEENERLRAILSEWSMRAANLERALEVERMSNSELQKEVASTRRKQMLETTTSEQP

SEQ ID NO: 1750 - protein, 355 aa, Arabidopsis thaliana
  peptide (1)..(355): Ceres Seq. ID no. 12336542
  misc_feature (1)..(355): NCBI GI NO: 18396221 NR Description: Expressed protein; protein id: At2g06005
  misc_feature (128)..(355): NCBI GI NO: 20453094 NR Description: At2g06010/F5K7.23 [Arabidopsis thaliana]
  misc_feature (199)..(302): NCBI GI NO: 25411202 NR Description: hypothetical protein At2g06010
  misc_feature (226)..(347): NCBI GI NO: 15242018 NR Description: putative protein; protein id: At5g20580.1
MSTERRASSNPMTNEENAMFLDILHEAPLFGHRKSRSLVGSYLYMLLLAGYAILAAGAPWMFHRVQQLTPSLLCCCDVALLVVTGVFQQYFVYQVQKIRLQGYYSFSQKLKHVVRLPFAIAAYGTAAMLLVIVWRPQIHILSISSLQRIIMLVEAVGAGFFMGLYIGYVHQYNSVNSRPDVLKSLYSPLQPSSSMEGLRYYEGRLSDQQTALLQYQRENLHFLSEEILCLQEKLSKYEQSDDGSTPQVDLAHLLAARDQELRTLSAEMNQLQSELRLARSLIAERDAEVQRVNSTNNQYIEENERLRAILSEWSMRAANLERALEVERMSNSELQKEVASTRRKQMLETTTSEQP

SEQ ID NO: 1751 - protein, 344 aa, Arabidopsis thaliana
  peptide (1)..(344): Ceres Seq. ID no. 12336543
  misc_feature (1)..(344): NCBI GI NO: 18396221 NR Description: Expressed protein; protein id: At2g06005
  misc_feature (117)..(344): NCBI GI NO: 20453094 NR Description: At2g06010/F5K7.23 [Arabidopsis thaliana]
  misc_feature (188)..(291): NCBI GI NO: 25411202 NR Description: hypothetical protein At2g06010
  misc_feature (215)..(336): NCBI GI NO: 15242018 NR Description: putative protein; protein id: At5g20580.1
MTNEENAMFLDILHEAPLFGHRKSRSLVGSYLYMLLLAGYAILAAGAPWMFHRVQQLTPSLLCCCDVALLVVTGVFQQYFVYQVQKIRLQGYYSFSQKLKHVVRLPFAIAAYGTAAMLLVIVWRPQIHILSISSLQRIIMLVEAVGAGFFMGLYIGYVHQYNSVNSRPDVLKSLYSPLQPSSSMEGLRYYEGRLSDQQTALLQYQRENLHFLSEEILCLQEKLSKYEQSDDGSTPQVDLAHLLAARDQELRTLSAEMNQLQSELRLARSLIAERDAEVQRVNSTNNQYIEENERLRAILSEWSMRAANLERALEVERMSNSELQKEVASTRRKQMLETTTSEQP

SEQ ID NO: 1752 - DNA, 721 bp, Arabidopsis thaliana
  misc_feature (1)..(721): Ceres Seq. ID no. 13646117
acaacacaacttcagctttaagacagctaaaactaaatacaaagaaacagagatgggtttggttacagaggaggtgagagctaaggcagagatgtacaccggagatgagatatgtagagagaagacaaagtgtttcctcaaggaaatatctatgcccaatggtttattaccattgaaggatatagaagaggttgggtatgacagagagtcaggtgttgtatggctgaagcagaagaagagcatcactcacaagttcacagagatagataagcttgtctcctatggaaccgaagtcacagccattgttgagaccgggaaaatcaagaagctcactggagtcaaagccaaggaacttcttatttgggtcactatcaatgagatctataccgaggaaccccctaccaagatcacgttcaagacaccgaccacactgtccaggactttcccggtctcaacaatggctgtgacttcggttctattggacacatcgttgcttactacatcttggctacttccagcaatggatacgacccaagcttctttggatgattcttttcaatgtcaatctctcgtatatgtatatgtatatgtttgacttgtgttgcaagctatctaatctgttctctatctctgtttcttcttctgttgttgttgttgttgtctaagacttgtccctctttttgcaaatgttttatttctccatttacaaatattggtttgc

SEQ ID NO: 1753 - protein, 197 aa, Arabidopsis thaliana
  peptide (1)..(197): Ceres Seq. ID no. 13646118
  misc_feature (20)..(155): Pfam Name: Pfam Description:  Protein of unknown function, DUF538
  misc_feature (18)..(155): NCBI GI NO: 18391006 NR Description: expressed protein [Arabidopsis thaliana]
  misc_feature (18)..(158): NCBI GI NO: 18405887 NR Description: expressed protein [Arabidopsis thaliana]
  misc_feature (23)..(172): NCBI GI NO: 34915418 NR Description: hypothetical protein~similar to Arabidopsis thalianachromosome1
  misc_feature (23)..(155): NCBI GI NO: 34915410 NR Description: hypothetical protein~similar to Arabidopsis thalianachromosome1
  misc_feature (23)..(155): NCBI GI NO: 34915422 NR Description: hypothetical protein~similar to Arabidopsis thalianachromosome1
  misc_feature (23)..(155): NCBI GI NO: 34915426 NR Description: hypothetical protein~similar to Arabidopsis thalianachromosome1
  misc_feature (23)..(154): NCBI GI NO: 34903866 NR Description: unnamed protein product
  misc_feature (23)..(155): NCBI GI NO: 33146557 NR Description: unknown protein
  misc_feature (23)..(155): NCBI GI NO: 34915376 NR Description: hypothetical protein~similar to Oryza sativa chromosome 7
  misc_feature (23)..(155): NCBI GI NO: 34915416 NR Description: hypothetical protein~similar to Arabidopsis thalianachromosome1
QHNFSFKTAKTKYKETEMGLVTEEVRAKAEMYTGDEICREKTKCFLKEISMPNGLLPLKDIEEVGYDRESGVVWLKQKKSITHKFTEIDKLVSYGTEVTAIVETGKIKKLTGVKAKELLIWVTINEIYTEEPPTKITFKTPTTLSRTFPVSTMAVTSVLLDTSLLTTSWLLPAMDTTQASLDDSFQCQSLVYVYVYV

SEQ ID NO: 1754 - protein, 180 aa, Arabidopsis thaliana
  peptide (1)..(180): Ceres Seq. ID no. 13646119
  misc_feature (3)..(138): Pfam Name: Pfam Description:  Protein of unknown function, DUF538
  misc_feature (1)..(138): NCBI GI NO: 18391006 NR Description: expressed protein [Arabidopsis thaliana]
  misc_feature (1)..(141): NCBI GI NO: 18405887 NR Description: expressed protein [Arabidopsis thaliana]
  misc_feature (6)..(155): NCBI GI NO: 34915418 NR Description: hypothetical protein~similar to Arabidopsis thalianachromosome1
  misc_feature (6)..(138): NCBI GI NO: 34915410 NR Description: hypothetical protein~similar to Arabidopsis thalianachromosome1
  misc_feature (6)..(138): NCBI GI NO: 34915422 NR Description: hypothetical protein~similar to Arabidopsis thalianachromosome1
  misc_feature (6)..(138): NCBI GI NO: 34915426 NR Description: hypothetical protein~similar to Arabidopsis thalianachromosome1
  misc_feature (6)..(137): NCBI GI NO: 34903866 NR Description: unnamed protein product
  misc_feature (6)..(138): NCBI GI NO: 33146557 NR Description: unknown protein
  misc_feature (6)..(138): NCBI GI NO: 34915376 NR Description: hypothetical protein~similar to Oryza sativa chromosome 7
  misc_feature (6)..(138): NCBI GI NO: 34915416 NR Description: hypothetical protein~similar to Arabidopsis thalianachromosome1
MGLVTEEVRAKAEMYTGDEICREKTKCFLKEISMPNGLLPLKDIEEVGYDRESGVVWLKQKKSITHKFTEIDKLVSYGTEVTAIVETGKIKKLTGVKAKELLIWVTINEIYTEEPPTKITFKTPTTLSRTFPVSTMAVTSVLLDTSLLTTSWLLPAMDTTQASLDDSFQCQSLVYVYVYV

SEQ ID NO: 1755 - protein, 167 aa, Arabidopsis thaliana
  peptide (1)..(167): Ceres Seq. ID no. 13646120
  misc_feature (1)..(125): Pfam Name: Pfam Description:  Protein of unknown function, DUF538
  misc_feature (1)..(125): NCBI GI NO: 18391006 NR Description: expressed protein [Arabidopsis thaliana]
  misc_feature (1)..(128): NCBI GI NO: 18405887 NR Description: expressed protein [Arabidopsis thaliana]
  misc_feature (1)..(142): NCBI GI NO: 34915418 NR Description: hypothetical protein~similar to Arabidopsis thalianachromosome1
  misc_feature (1)..(125): NCBI GI NO: 34915410 NR Description: hypothetical protein~similar to Arabidopsis thalianachromosome1
  misc_feature (1)..(125): NCBI GI NO: 34915422 NR Description: hypothetical protein~similar to Arabidopsis thalianachromosome1
  misc_feature (1)..(125): NCBI GI NO: 34915426 NR Description: hypothetical protein~similar to Arabidopsis thalianachromosome1
  misc_feature (1)..(124): NCBI GI NO: 34903866 NR Description: unnamed protein product
  misc_feature (1)..(125): NCBI GI NO: 33146557 NR Description: unknown protein
  misc_feature (1)..(125): NCBI GI NO: 34915376 NR Description: hypothetical protein~similar to Oryza sativa chromosome 7
  misc_feature (1)..(125): NCBI GI NO: 34915416 NR Description: hypothetical protein~similar to Arabidopsis thalianachromosome1
MYTGDEICREKTKCFLKEISMPNGLLPLKDIEEVGYDRESGVVWLKQKKSITHKFTEIDKLVSYGTEVTAIVETGKIKKLTGVKAKELLIWVTINEIYTEEPPTKITFKTPTTLSRTFPVSTMAVTSVLLDTSLLTTSWLLPAMDTTQASLDDSFQCQSLVYVYVYV

SEQ ID NO: 1756 - DNA, 1370 bp, Arabidopsis thaliana
  misc_feature (1)..(1370): Ceres Seq. ID no. 13491770
aattaaccgtcacgagctacatgctctgtatcttcagatttcctaaatacttacaattcccattccaattctgatttggttaatccaaaacaaaaaaaaaggaaactttcttttaccctaaatctataaaaacgaaacccttcttcacaaatctttgttcttcgtaatctctcttaaaagcttttgtttcaatttcaatggagtgggttcgaggagaaacaattgggttcggaaccttctctactgtcagtacagcgacaaagtctagaaactccggcgactttcctgcacttatcgctgtgaagtcgacgggttcttacggcgccgcttcactctccaacgagaaatcggtgttggattcactccgtgattgtcctgagatcatacggtgttacggcgaggattcaactgtggagaacggagaagagatgcataacttgttcttagagtacgcttcgagaggaagcttagcgaggtacatgaagaaacttggcggtgagggtttaccggagtccaccgtacgtcgctacacaggatcggtgcttcgagggttacgtcatattcacgctaaagggtttgcacactgcgatataaaactcgggaatattctgttattcaacgacggctctgttaaaattgccgattttggtttggcgatgagagttcacggagatttaacggcgttaagaaaaagtgaggagattagagggactccgttatacatggcaccggaatctgttaatgataatgagtatggatcagcggctgacgtgtgggctttaggatgtgctgtagttgagatgttgagtggcaaaacggcatggagtgttaaagaaggatcacacttcatgtcgcttttgatacgtatcggtgttggtgatgagttaccgaagattccagagatgttgtccgaagaaggcaaggatttcttgtcgaagtgttttgttaaagatcaagcgaaaagatggacggctgagatgcttttaaaccattcattcgtagccattgatcttgaagatgatcaccgagaagacttcgttgtgaaggttaaggaagaggataaagtattgatgtctccaaagtgtccctttgagtttgatgattgggattcttttacattggattcaaacccatcgttggattctccggtggagagacttgggagtttggttagtggttcgatccctgattggtctgtcggtgagagttgggtttcagtccggtgatgaaagtgatatgaaaacagaggaaaaacagagtgtttggaaggctaggttttttttagcacctagttagacccattctacgattcttgttcgtattctttaggtgtaattgatttgttaatacaattcattctagtgttcctc

SEQ ID NO: 1757 - protein, 342 aa, Arabidopsis thaliana
  peptide (1)..(342): Ceres Seq. ID no. 13491771
  misc_feature (3)..(268): Pfam Name: Pfam Description:  Protein kinase domain
  misc_feature (1)..(342): NCBI GI NO: 21554379 NR Description: protein kinase-like protein [Arabidopsis thaliana]
  misc_feature (1)..(342): NCBI GI NO: 15229715 NR Description: protein kinase-related [Arabidopsis thaliana]
  misc_feature (1)..(342): NCBI GI NO: 15240194 NR Description: protein kinase family [Arabidopsis thaliana]
  misc_feature (1)..(342): NCBI GI NO: 17979279 NR Description: unknown protein [Arabidopsis thaliana]
  misc_feature (1)..(341): NCBI GI NO: 25407778 NR Description: MAP3K-like protein kinase
  misc_feature (1)..(341): NCBI GI NO: 34911472 NR Description: NPK1-related protein kinase-like protein
  misc_feature (1)..(269): NCBI GI NO: 15222311 NR Description: protein kinase family [Arabidopsis thaliana]
  misc_feature (1)..(342): NCBI GI NO: 15227689 NR Description: protein kinase family [Arabidopsis thaliana]
  misc_feature (1)..(342): NCBI GI NO: 15236903 NR Description: protein kinase family [Arabidopsis thaliana]
  misc_feature (1)..(342): NCBI GI NO: 19423926 NR Description: unknown protein [Arabidopsis thaliana]
MEWVRGETIGFGTFSTVSTATKSRNSGDFPALIAVKSTGSYGAASLSNEKSVLDSLRDCPEIIRCYGEDSTVENGEEMHNLFLEYASRGSLARYMKKLGGEGLPESTVRRYTGSVLRGLRHIHAKGFAHCDIKLGNILLFNDGSVKIADFGLAMRVHGDLTALRKSEEIRGTPLYMAPESVNDNEYGSAADVWALGCAVVEMLSGKTAWSVKEGSHFMSLLIRIGVGDELPKIPEMLSEEGKDFLSKCFVKDQAKRWTAEMLLNHSFVAIDLEDDHREDFVVKVKEEDKVLMSPKCPFEFDDWDSFTLDSNPSLDSPVERLGSLVSGSIPDWSVGESWVSVR

SEQ ID NO: 1758 - protein, 265 aa, Arabidopsis thaliana
  peptide (1)..(265): Ceres Seq. ID no. 13491772
  misc_feature (1)..(191): Pfam Name: Pfam Description:  Protein kinase domain
  misc_feature (1)..(265): NCBI GI NO: 21554379 NR Description: protein kinase-like protein [Arabidopsis thaliana]
  misc_feature (1)..(265): NCBI GI NO: 15229715 NR Description: protein kinase-related [Arabidopsis thaliana]
  misc_feature (1)..(265): NCBI GI NO: 15240194 NR Description: protein kinase family [Arabidopsis thaliana]
  misc_feature (1)..(265): NCBI GI NO: 17979279 NR Description: unknown protein [Arabidopsis thaliana]
  misc_feature (1)..(264): NCBI GI NO: 25407778 NR Description: MAP3K-like protein kinase
  misc_feature (1)..(264): NCBI GI NO: 34911472 NR Description: NPK1-related protein kinase-like protein
  misc_feature (1)..(192): NCBI GI NO: 15222311 NR Description: protein kinase family [Arabidopsis thaliana]
  misc_feature (1)..(265): NCBI GI NO: 15227689 NR Description: protein kinase family [Arabidopsis thaliana]
  misc_feature (1)..(265): NCBI GI NO: 15236903 NR Description: protein kinase family [Arabidopsis thaliana]
  misc_feature (1)..(265): NCBI GI NO: 19423926 NR Description: unknown protein [Arabidopsis thaliana]
MHNLFLEYASRGSLARYMKKLGGEGLPESTVRRYTGSVLRGLRHIHAKGFAHCDIKLGNILLFNDGSVKIADFGLAMRVHGDLTALRKSEEIRGTPLYMAPESVNDNEYGSAADVWALGCAVVEMLSGKTAWSVKEGSHFMSLLIRIGVGDELPKIPEMLSEEGKDFLSKCFVKDQAKRWTAEMLLNHSFVAIDLEDDHREDFVVKVKEEDKVLMSPKCPFEFDDWDSFTLDSNPSLDSPVERLGSLVSGSIPDWSVGESWVSVR

SEQ ID NO: 1759 - protein, 248 aa, Arabidopsis thaliana
  peptide (1)..(248): Ceres Seq. ID no. 13491773
  misc_feature (1)..(174): Pfam Name: Pfam Description:  Protein kinase domain
  misc_feature (1)..(248): NCBI GI NO: 21554379 NR Description: protein kinase-like protein [Arabidopsis thaliana]
  misc_feature (1)..(248): NCBI GI NO: 15229715 NR Description: protein kinase-related [Arabidopsis thaliana]
  misc_feature (1)..(248): NCBI GI NO: 15240194 NR Description: protein kinase family [Arabidopsis thaliana]
  misc_feature (1)..(248): NCBI GI NO: 17979279 NR Description: unknown protein [Arabidopsis thaliana]
  misc_feature (1)..(247): NCBI GI NO: 25407778 NR Description: MAP3K-like protein kinase
  misc_feature (1)..(247): NCBI GI NO: 34911472 NR Description: NPK1-related protein kinase-like protein
  misc_feature (1)..(175): NCBI GI NO: 15222311 NR Description: protein kinase family [Arabidopsis thaliana]
  misc_feature (1)..(248): NCBI GI NO: 15227689 NR Description: protein kinase family [Arabidopsis thaliana]
  misc_feature (1)..(248): NCBI GI NO: 15236903 NR Description: protein kinase family [Arabidopsis thaliana]
  misc_feature (1)..(248): NCBI GI NO: 19423926 NR Description: unknown protein [Arabidopsis thaliana]
MKKLGGEGLPESTVRRYTGSVLRGLRHIHAKGFAHCDIKLGNILLFNDGSVKIADFGLAMRVHGDLTALRKSEEIRGTPLYMAPESVNDNEYGSAADVWALGCAVVEMLSGKTAWSVKEGSHFMSLLIRIGVGDELPKIPEMLSEEGKDFLSKCFVKDQAKRWTAEMLLNHSFVAIDLEDDHREDFVVKVKEEDKVLMSPKCPFEFDDWDSFTLDSNPSLDSPVERLGSLVSGSIPDWSVGESWVSVR

SEQ ID NO: 1760 - DNA, 1659 bp, Arabidopsis thaliana
  misc_feature (1)..(1659): Ceres Seq. ID no. 13491319
ttcactcaccaaaatagatctaaaacatggaaaccaaaaccctaattttctcaattctcttcgttgttctctctctcatttacttaattggaaaactcaagcgaaagccaaatctacctccgagtccggcatggtcattaccggtgattggtcatctccgccttctcaaaccaccgattcatcgcacattcctctccctctctcaatccctaaacaatgctccgatcttctccctccgactcggtaaccgactcgttttcgtgaactcgtcacactcgatcgccgaggaatgtttcaccaaaaacgacgtcgtactggcgaacagaccaaacttcatcctcgctaaacacgttgcgtacgattacacaaccatgatcgcagcttcctacggtgaccactggcgtaacctccgccgcatcggctccgtcgagatattctccaatcaccgtctcaatagctttttgtctattcgtaaagacgagatccgacgacttgtgtttcgtctttctcggaacttttcacaagagtttgtgaaagtggatatgaaatcaatgttatctgacttaacattcaacaacattttaagaatggtggccggaaaacgttactacggagacggtgttgaggatgatccggaggctaaacgtgtccggcagcttatagcggatgtggtggcttgtgctggtgctggaaacgctgttgattacttaccggttttgcggttggtttcagattacgagacacgggttaagaagttggcgggtaggctcgacgagttcttgcaaggattggttgatgagaaacgagaagctaaggagaaaggaaacactatgatcgatcacttgcttactctgcaagaatcccaaccggattacttcacggatcgtatcattaaaggaaacatgctcgctttgatactagcagggaccgacacatcagcggttacgttagaatgggcattgtcgaacgtgttgaaccatccggatgtattgaacaaggcgagagatgaaatcgatagaaagataggtttagacaggcttatggatgaatcagatatctcaaacctgccttatctccaaaacattgtgtctgaaacgttgcgcctttatcctgcggctcccatgcttcttcctcacgttgcctcggaagattgtaaagttgcaggatacgatatgccgcgtggcacgatactattgaccaatgtgtgggctatacacagagatcctcagctatgggatgatccaatgagcttcaagccagagaggtttgagaaagaaggagaagctcagaagctaatgccgtttgggttaggaagaagggcgtgtcctggttctggactggctcatcggcttataaacctgactcttggatcattgattcagtgtttggaatgggagaagattggagaagaagtggatatgagtgaaggcaaaggtgttacaatgcctaaagccaagcctttggaagccatgtgcagagcacgtccctctgttgttaaaatcttcaacgagtccgtttgacgtttagacttttggtaatggctatgtatacattagataactagttatgtttgtatgttttctttttttttggtgaaaatattatgtttgtatgttatatgagaatattttaccaatattcctagatgatattttgggc

SEQ ID NO: 1761 - protein, 497 aa, Arabidopsis thaliana
  peptide (1)..(497): Ceres Seq. ID no. 13491320
  misc_feature (1)..(497): NCBI GI NO: 15235536 NR Description: cytochrome P450, putative [Arabidopsis thaliana]
  misc_feature (1)..(494): NCBI GI NO: 21554381 NR Description: cytochrome P450-like protein
  misc_feature (1)..(496): NCBI GI NO: 15235535 NR Description: cytochrome P450 family [Arabidopsis thaliana]
  misc_feature (1)..(496): NCBI GI NO: 15235534 NR Description: cytochrome P450 family [Arabidopsis thaliana]
  misc_feature (97)..(496): NCBI GI NO: 25282574 NR Description: probable cytochrome P450 F28G11.4
  misc_feature (2)..(101): NCBI GI NO: 25282574 NR Description: probable cytochrome P450 F28G11.4
  misc_feature (3)..(491): NCBI GI NO: 15235517 NR Description: cytochrome P450 family [Arabidopsis thaliana]
  misc_feature (1)..(496): NCBI GI NO: 15228472 NR Description: cytochrome P450 family [Arabidopsis thaliana]
  misc_feature (6)..(492): NCBI GI NO: 15235533 NR Description: cytochrome P450 family [Arabidopsis thaliana]
  misc_feature (7)..(494): NCBI GI NO: 30692923 NR Description: cytochrome P450 91A1 [Arabidopsis thaliana]
METKTLIFSILFVVLSLIYLIGKLKRKPNLPPSPAWSLPVIGHLRLLKPPIHRTFLSLSQSLNNAPIFSLRLGNRLVFVNSSHSIAEECFTKNDVVLANRPNFILAKHVAYDYTTMIAASYGDHWRNLRRIGSVEIFSNHRLNSFLSIRKDEIRRLVFRLSRNFSQEFVKVDMKSMLSDLTFNNILRMVAGKRYYGDGVEDDPEAKRVRQLIADVVACAGAGNAVDYLPVLRLVSDYETRVKKLAGRLDEFLQGLVDEKREAKEKGNTMIDHLLTLQESQPDYFTDRIIKGNMLALILAGTDTSAVTLEWALSNVLNHPDVLNKARDEIDRKIGLDRLMDESDISNLPYLQNIVSETLRLYPAAPMLLPHVASEDCKVAGYDMPRGTILLTNVWAIHRDPQLWDDPMSFKPERFEKEGEAQKLMPFGLGRRACPGSGLAHRLINLTLGSLIQCLEWEKIGEEVDMSEGKGVTMPKAKPLEAMCRARPSVVKIFNESV

SEQ ID NO: 1762 - protein, 382 aa, Arabidopsis thaliana
  peptide (1)..(382): Ceres Seq. ID no. 13491321
  misc_feature (1)..(382): NCBI GI NO: 15235536 NR Description: cytochrome P450, putative [Arabidopsis thaliana]
  misc_feature (1)..(379): NCBI GI NO: 21554381 NR Description: cytochrome P450-like protein
  misc_feature (1)..(381): NCBI GI NO: 15235535 NR Description: cytochrome P450 family [Arabidopsis thaliana]
  misc_feature (1)..(381): NCBI GI NO: 15235534 NR Description: cytochrome P450 family [Arabidopsis thaliana]
  misc_feature (1)..(381): NCBI GI NO: 25282574 NR Description: probable cytochrome P450 F28G11.4
  misc_feature (1)..(376): NCBI GI NO: 15235517 NR Description: cytochrome P450 family [Arabidopsis thaliana]
  misc_feature (1)..(381): NCBI GI NO: 15228472 NR Description: cytochrome P450 family [Arabidopsis thaliana]
  misc_feature (1)..(377): NCBI GI NO: 15235533 NR Description: cytochrome P450 family [Arabidopsis thaliana]
  misc_feature (1)..(379): NCBI GI NO: 30692923 NR Description: cytochrome P450 91A1 [Arabidopsis thaliana]
  misc_feature (1)..(379): NCBI GI NO: 25282604 NR Description: cytochrome P450 monooxygenase
MIAASYGDHWRNLRRIGSVEIFSNHRLNSFLSIRKDEIRRLVFRLSRNFSQEFVKVDMKSMLSDLTFNNILRMVAGKRYYGDGVEDDPEAKRVRQLIADVVACAGAGNAVDYLPVLRLVSDYETRVKKLAGRLDEFLQGLVDEKREAKEKGNTMIDHLLTLQESQPDYFTDRIIKGNMLALILAGTDTSAVTLEWALSNVLNHPDVLNKARDEIDRKIGLDRLMDESDISNLPYLQNIVSETLRLYPAAPMLLPHVASEDCKVAGYDMPRGTILLTNVWAIHRDPQLWDDPMSFKPERFEKEGEAQKLMPFGLGRRACPGSGLAHRLINLTLGSLIQCLEWEKIGEEVDMSEGKGVTMPKAKPLEAMCRARPSVVKIFNESV

SEQ ID NO: 1763 - protein, 325 aa, Arabidopsis thaliana
  peptide (1)..(325): Ceres Seq. ID no. 13491322
  misc_feature (1)..(325): NCBI GI NO: 15235536 NR Description: cytochrome P450, putative [Arabidopsis thaliana]
  misc_feature (1)..(322): NCBI GI NO: 21554381 NR Description: cytochrome P450-like protein
  misc_feature (1)..(324): NCBI GI NO: 15235535 NR Description: cytochrome P450 family [Arabidopsis thaliana]
  misc_feature (1)..(324): NCBI GI NO: 15235534 NR Description: cytochrome P450 family [Arabidopsis thaliana]
  misc_feature (1)..(324): NCBI GI NO: 25282574 NR Description: probable cytochrome P450 F28G11.4
  misc_feature (1)..(319): NCBI GI NO: 15235517 NR Description: cytochrome P450 family [Arabidopsis thaliana]
  misc_feature (1)..(324): NCBI GI NO: 15228472 NR Description: cytochrome P450 family [Arabidopsis thaliana]
  misc_feature (1)..(320): NCBI GI NO: 15235533 NR Description: cytochrome P450 family [Arabidopsis thaliana]
  misc_feature (1)..(322): NCBI GI NO: 30692923 NR Description: cytochrome P450 91A1 [Arabidopsis thaliana]
  misc_feature (1)..(322): NCBI GI NO: 25282604 NR Description: cytochrome P450 monooxygenase
MKSMLSDLTFNNILRMVAGKRYYGDGVEDDPEAKRVRQLIADVVACAGAGNAVDYLPVLRLVSDYETRVKKLAGRLDEFLQGLVDEKREAKEKGNTMIDHLLTLQESQPDYFTDRIIKGNMLALILAGTDTSAVTLEWALSNVLNHPDVLNKARDEIDRKIGLDRLMDESDISNLPYLQNIVSETLRLYPAAPMLLPHVASEDCKVAGYDMPRGTILLTNVWAIHRDPQLWDDPMSFKPERFEKEGEAQKLMPFGLGRRACPGSGLAHRLINLTLGSLIQCLEWEKIGEEVDMSEGKGVTMPKAKPLEAMCRARPSVVKIFNESV

SEQ ID NO: 1764 - DNA, 1205 bp, Arabidopsis thaliana
  misc_feature (1)..(1205): Ceres Seq. ID no. 12603454
aattttccttttgggactcggactctctctctagtctctatatatatttatgcaattcccggaaaatctgtttttttctttctctattgtcatcatcccacacactaaccaaattaaccatgaaccgtaatcaacacaaaccaatgtttgttacattcctcatcaatattcttctcctccaacttctaaaccttaccaatgcatcaccatccccaccaataacagccctatacgccttcggcgactccacagtggactccggtaacaacaattacattcccactcttttccagagcaaccatcctccctatggtaaatcctttccgtccaaactctccaccggaaggttctccgacggaaaactcgccaccgacttcatagtctcctctctaggactcaaacccactctaccagcttacctcaacccttcggtcaaacctgtagatcttttgaccggcgttagtttcgcctcggccggaggtggtttagatgatcggacggcaaagtcatcattgactattaccatggacaagcaatggagttacttcgaagaggcgctgggtaaaatgaagagtttggttggagactcggagactaatcgggtgattaagaatgctgtgttcgtcattagtgcggggactaatgatatgatctttaatgtttacgatcatgttcttgggagtttgatctccgtttcggattatcaagattctctactaaccaaagtcgaagtttttgtccagagactatacgaggcaggagcacgaaggattacaatagctggactaccaccaatcggatgccttccggtgcaagtaacacttactagcatcaatactcctcgcatcttccatcatcggatctgtacggaacatcagaacgatgattctcgggtttacaatcaaaagctacagaagctaatcttcggtctcagtcagaggtttcgaggttccaaagttctttaccttgatatctactctccgttaatagacatgatcaaacatcctcgtaaatacggactagaggaaacattgagaggatgttgtgggacagggctacttgaggcaggacctctatgccaaccattgtctcggacttgtgacgatgtttccaagtatttattctttgattctgtgcatccttcacagacggcttattctgtcatcgctagtttcgccttacaaaaattgtttcctctcctctaa

SEQ ID NO: 1765 - protein, 400 aa, Arabidopsis thaliana
  peptide (1)..(400): Ceres Seq. ID no. 12603455
  misc_feature (76)..(392): Pfam Name: Pfam Description:  GDSL-like Lipase/Acylhydrolase
  misc_feature (40)..(400): NCBI GI NO: 15225668 NR Description: putative GDSL-motif lipase hydrolase
  misc_feature (48)..(400): NCBI GI NO: 4587999 NR Description: hypothetical APG protein [Arabidopsis thaliana]
  misc_feature (46)..(400): NCBI GI NO: 21537117 NR Description: putative GDSL-motif lipase/hydrolase
  misc_feature (46)..(390): NCBI GI NO: 15225096 NR Description: putative GDSL-motif lipase/hydrolase
  misc_feature (46)..(390): NCBI GI NO: 21592974 NR Description: proline-rich protein, putative
  misc_feature (61)..(400): NCBI GI NO: 18390708 NR Description: expressed protein; protein id: At1g06990
  misc_feature (61)..(400): NCBI GI NO: 25336267 NR Description: hypothetical protein
  misc_feature (46)..(391): NCBI GI NO: 15227734 NR Description: putative GDSL-motif lipase/hydrolase
  misc_feature (46)..(390): NCBI GI NO: 15217963 NR Description: proline-rich protein, putative
  misc_feature (46)..(390): NCBI GI NO: 25336283 NR Description: hypothetical protein RXF26
FSFWDSDSLSSLYIYLCNSRKICFFLSLLSSSHTLTKLTMNRNQHKPMFVTFLINILLLQLLNLTNASPSPPITALYAFGDSTVDSGNNNYIPTLFQSNHPPYGKSFPSKLSTGRFSDGKLATDFIVSSLGLKPTLPAYLNPSVKPVDLLTGVSFASAGGGLDDRTAKSSLTITMDKQWSYFEEALGKMKSLVGDSETNRVIKNAVFVISAGTNDMIFNVYDHVLGSLISVSDYQDSLLTKVEVFVQRLYEAGARRITIAGLPPIGCLPVQVTLTSINTPRIFHHRICTEHQNDDSRVYNQKLQKLIFGLSQRFRGSKVLYLDIYSPLIDMIKHPRKYGLEETLRGCCGTGLLEAGPLCQPLSRTCDDVSKYLFFDSVHPSQTAYSVIASFALQKLFPLL

SEQ ID NO: 1766 - protein, 361 aa, Arabidopsis thaliana
  peptide (1)..(361): Ceres Seq. ID no. 12603456
  misc_feature (37)..(353): Pfam Name: Pfam Description:  GDSL-like Lipase/Acylhydrolase
  misc_feature (1)..(361): NCBI GI NO: 15225668 NR Description: putative GDSL-motif lipase hydrolase
  misc_feature (9)..(361): NCBI GI NO: 4587999 NR Description: hypothetical APG protein [Arabidopsis thaliana]
  misc_feature (7)..(361): NCBI GI NO: 21537117 NR Description: putative GDSL-motif lipase/hydrolase
  misc_feature (7)..(351): NCBI GI NO: 15225096 NR Description: putative GDSL-motif lipase/hydrolase
  misc_feature (7)..(351): NCBI GI NO: 21592974 NR Description: proline-rich protein, putative
  misc_feature (22)..(361): NCBI GI NO: 18390708 NR Description: expressed protein; protein id: At1g06990
  misc_feature (22)..(361): NCBI GI NO: 25336267 NR Description: hypothetical protein
  misc_feature (7)..(352): NCBI GI NO: 15227734 NR Description: putative GDSL-motif lipase/hydrolase
  misc_feature (7)..(351): NCBI GI NO: 15217963 NR Description: proline-rich protein, putative
  misc_feature (7)..(351): NCBI GI NO: 25336283 NR Description: hypothetical protein RXF26
MNRNQHKPMFVTFLINILLLQLLNLTNASPSPPITALYAFGDSTVDSGNNNYIPTLFQSNHPPYGKSFPSKLSTGRFSDGKLATDFIVSSLGLKPTLPAYLNPSVKPVDLLTGVSFASAGGGLDDRTAKSSLTITMDKQWSYFEEALGKMKSLVGDSETNRVIKNAVFVISAGTNDMIFNVYDHVLGSLISVSDYQDSLLTKVEVFVQRLYEAGARRITIAGLPPIGCLPVQVTLTSINTPRIFHHRICTEHQNDDSRVYNQKLQKLIFGLSQRFRGSKVLYLDIYSPLIDMIKHPRKYGLEETLRGCCGTGLLEAGPLCQPLSRTCDDVSKYLFFDSVHPSQTAYSVIASFALQKLFPLL

SEQ ID NO: 1767 - protein, 353 aa, Arabidopsis thaliana
  peptide (1)..(353): Ceres Seq. ID no. 12603457
  misc_feature (29)..(345): Pfam Name: Pfam Description:  GDSL-like Lipase/Acylhydrolase
  misc_feature (1)..(353): NCBI GI NO: 15225668 NR Description: putative GDSL-motif lipase hydrolase
  misc_feature (1)..(353): NCBI GI NO: 4587999 NR Description: hypothetical APG protein [Arabidopsis thaliana]
  misc_feature (1)..(353): NCBI GI NO: 21537117 NR Description: putative GDSL-motif lipase/hydrolase
  misc_feature (1)..(343): NCBI GI NO: 15225096 NR Description: putative GDSL-motif lipase/hydrolase
  misc_feature (1)..(343): NCBI GI NO: 21592974 NR Description: proline-rich protein, putative
  misc_feature (14)..(353): NCBI GI NO: 18390708 NR Description: expressed protein; protein id: At1g06990
  misc_feature (14)..(353): NCBI GI NO: 25336267 NR Description: hypothetical protein
  misc_feature (1)..(344): NCBI GI NO: 15227734 NR Description: putative GDSL-motif lipase/hydrolase
  misc_feature (1)..(343): NCBI GI NO: 15217963 NR Description: proline-rich protein, putative
  misc_feature (1)..(343): NCBI GI NO: 25336283 NR Description: hypothetical protein RXF26
MFVTFLINILLLQLLNLTNASPSPPITALYAFGDSTVDSGNNNYIPTLFQSNHPPYGKSFPSKLSTGRFSDGKLATDFIVSSLGLKPTLPAYLNPSVKPVDLLTGVSFASAGGGLDDRTAKSSLTITMDKQWSYFEEALGKMKSLVGDSETNRVIKNAVFVISAGTNDMIFNVYDHVLGSLISVSDYQDSLLTKVEVFVQRLYEAGARRITIAGLPPIGCLPVQVTLTSINTPRIFHHRICTEHQNDDSRVYNQKLQKLIFGLSQRFRGSKVLYLDIYSPLIDMIKHPRKYGLEETLRGCCGTGLLEAGPLCQPLSRTCDDVSKYLFFDSVHPSQTAYSVIASFALQKLFPLL

SEQ ID NO: 1768 - DNA, 1520 bp, Arabidopsis thaliana
  misc_feature (1)..(1520): Ceres Seq. ID no. 12336366
gtattaaaagaaagaaagaaaaaaaaaggagaggagaagaagcagtggagagagagcatgtgaataaaaagcgtgaagctttttgatatctctttctcttcctcttcctttctcctccgatagatttcgccggcgatggcggtggactccttagaaacggagattgacacggcggtgcgtgttgtccacctcgcttcttctctctgtgttaaagttcaagagaagcttcatcttcctaacggtggtcacgttaagtctaaagacgatgattcccctgtcaccgtcgctgattttggtgtacaagcaattgtgagctgggttttagctgaagtgtttggtgatcaaaacctttcaattgttgctgaagaagacactgagacactctctgaggctgattctttaggtcttttaggagctgtgtcgaatgcggttaatgaagcattgtccgaagctcagaactacgggcttccgaagccagttaagccattggggtctagtgaaattcttaaggctattagtagatgtaactctgttggaggacctaaaggaaggcattgggttcttgatcctgttgatggaacgttagggtttgttcgtggggatcagtatgctgttgctttagctttgatagagaatggtaaagttcttttgggtgtactaggatgtcctaattatccggttaagaaagaatgtttaagtaatggttgtaaccaagctatgaagacgaaagctgttgctggttcagtatcgaaaggatgtgttatgtatgcaaagagaggtagtggtcaagcttggatgcaacctttgatcgttggaggaataccagaatctgcaacacttcttaaggtttcttcagttgatgatccggttttagctacagtttgtgagccagtagagagagcaaactcaaaccacttgttcactgcaggacttgccaatagcatgggagttagaaagcagcctatgcgagtgtatagcatggtgaaatatgcagcgattgcacgtggagacgctgaagtgtttatgaagtttgcacagtcaagttacaaagagaagatatgggatcacgcagctggagttgttattgtggaagaagctggtggtgtggtgactgatgcgggagggagaaacttagacttctcgaaaggtgtttacttggaaggtcttgaccgtggaatcatcgcatgttctggtcaagttttacatgagaagattataggtgctgtttatgctagttgggaatcttccagtctctgaaaaagcttatccacaatccgtagtttggtgcagcatcatcgagccaaagcaaaggaggaacaagggccattacggtttaggatgagcaagggccagtttcaatgaatgtgaatggcggagaagtaaatatagtcgaggaagcagcggtaaaagtaagaatctagtttatttacctatctaagagtaataaagctgctgcatttcacgaacccttatgttctatgatctttaatggatgatatcatttttaatcttcgtcctgt

SEQ ID NO: 1769 - protein, 373 aa, Arabidopsis thaliana
  peptide (1)..(373): Ceres Seq. ID no. 12336367
  misc_feature (1)..(373): NCBI GI NO: 15239631 NR Description: putative protein; protein id: At5g54390
  misc_feature (1)..(373): NCBI GI NO: 2736075 NR Description: PAP-specific phosphatase; HAL2-like protein
  misc_feature (9)..(373): NCBI GI NO: 15451579 NR Description: Putative PAP-specific phosphatase [Oryza sativa]
  misc_feature (20)..(356): NCBI GI NO: 15237567 NR Description: 3
  misc_feature (5)..(342): NCBI GI NO: 18424775 NR Description: 3
  misc_feature (5)..(342): NCBI GI NO: 21618152 NR Description: 3(2),5-bisphosphate nucleotidase
  misc_feature (5)..(364): NCBI GI NO: 40744789 NR Description: hypothetical protein AN1769.2
  misc_feature (123)..(356): NCBI GI NO: 14268820 NR Description: diphosphonucleotide phosphatase 1 [Zea mays]
  misc_feature (123)..(356): NCBI GI NO: 3913517 NR Description: 3'
  misc_feature (117)..(373): NCBI GI NO: 15237589 NR Description: 3(2),5-bisphosphate nucleotidase (emb|CAB05889
MAVDSLETEIDTAVRVVHLASSLCVKVQEKLHLPNGGHVKSKDDDSPVTVADFGVQAIVSWVLAEVFGDQNLSIVAEEDTETLSEADSLGLLGAVSNAVNEALSEAQNYGLPKPVKPLGSSEILKAISRCNSVGGPKGRHWVLDPVDGTLGFVRGDQYAVALALIENGKVLLGVLGCPNYPVKKECLSNGCNQAMKTKAVAGSVSKGCVMYAKRGSGQAWMQPLIVGGIPESATLLKVSSVDDPVLATVCEPVERANSNHLFTAGLANSMGVRKQPMRVYSMVKYAAIARGDAEVFMKFAQSSYKEKIWDHAAGVVIVEEAGGVVTDAGGRNLDFSKGVYLEGLDRGIIACSGQVLHEKIIGAVYASWESSSL

SEQ ID NO: 1770 - DNA, 1257 bp, Arabidopsis thaliana
  misc_feature (1)..(1257): Ceres Seq. ID no. 12481865
aaggacctgatttctctctctcattctctcaacgaaatctcgatctcgtcgaggaagaagaagaacccagatcagaaaacataacaacaatgtcgtcgtctgcgaagaaacaaaccctgttcatatcgacattaatcatctcatggtactcttcaaacatcggtgttcttctcctcaacaagttccttctctcgaattacggattcaaattcccgatttttctcacaatgtgtcacatgtccgcttgcgctatccttagctacatctccattgttttcctcaagcttgttcctctccaacatctcaaatctcgttctcaattccttaaggttgctactctcagcatcgtcttttgtgcttccgtcgtcggtggtaacatctcccttcgttaccttcctgtctctttcaatcaagccgtcggtgctacgacgccgtttttcacggctctgtttgcttatcttatgacctttaagagagaagcttgggttacttatggtgctctcgtccctgtcgtcgccggtgtcgtcatcgccagtgggggtgagccaggatttcactggtttgggttcataatgtgcattagtgctactgcggcaagagcctttaaatctgttcttcaaggcatcttactttcttcagagggggaaaaattgaactcaatgaatttgatgttgtatatgtctcccatagctgtcattgctcttcttcccgttacgctatttatggaaccagacgtgatcagtgtgaccttgacgcttgcaaaacaacatcagtacatgtggatacttcttctggttaactctgtcatggcttattcagccaatctgttgaattttctggttaccaaacacacaagcgccctcaccctccaggttcttggaaatgctaaaggagcagttgcagtggtgatttctatcttgatctttcaaaacccggttacggttatgggaattggcgggtactccataaccgtccttggggtggttgcttatggagagacaaaacgcagatttagatgaactctcagacattagcaagtgagacaacatagcttctctatgtttgtttcttcatctgttcaagactcatccttaggacctgaaatttttgggcatttaggagatgagaatttatcaatagtgattttttgtaactattttatacgcactttatcatgtaatatgtatttggactatgttagatttgatggtgagataatcatttttgtgtgtttcctggttgaaataccattttggc

SEQ ID NO: 1771 - protein, 338 aa, Arabidopsis thaliana
  peptide (1)..(338): Ceres Seq. ID no. 12481866
  misc_feature (55)..(178): Pfam Name: Pfam Description:  Integral membrane protein DUF6
  misc_feature (30)..(338): NCBI GI NO: 15237644 NR Description: phosphate/phosphoenolpyruvate translocator
  misc_feature (30)..(338): NCBI GI NO: 17064798 NR Description: phosphate/phosphoenolpyruvate translocator-like
  misc_feature (2)..(338): NCBI GI NO: 15228248 NR Description: unknown protein; protein id: At3g10290.1
  misc_feature (40)..(336): NCBI GI NO: 27476065 NR Description: Putative phosphate/phosphoenolpyruvate translocator protein
  misc_feature (40)..(336): NCBI GI NO: 9759107 NR Description: phosphate/phosphoenolpyruvate translocator protein-like
  misc_feature (40)..(336): NCBI GI NO: 30681126 NR Description: phosphate translocator-related
  misc_feature (181)..(336): NCBI GI NO: 15229717 NR Description: integral membrane protein, putative
  misc_feature (40)..(182): NCBI GI NO: 15229717 NR Description: integral membrane protein, putative
  misc_feature (30)..(336): NCBI GI NO: 15221371 NR Description: hypothetical protein; protein id: At1g12500.1
  misc_feature (35)..(331): NCBI GI NO: 15219121 NR Description: glucose 6 phosphate/phosphate translocator
GPDFSLSFSQRNLDLVEEEEEPRSENITTMSSSAKKQTLFISTLIISWYSSNIGVLLLNKFLLSNYGFKFPIFLTMCHMSACAILSYISIVFLKLVPLQHLKSRSQFLKVATLSIVFCASVVGGNISLRYLPVSFNQAVGATTPFFTALFAYLMTFKREAWVTYGALVPVVAGVVIASGGEPGFHWFGFIMCISATAARAFKSVLQGILLSSEGEKLNSMNLMLYMSPIAVIALLPVTLFMEPDVISVTLTLAKQHQYMWILLLVNSVMAYSANLLNFLVTKHTSALTLQVLGNAKGAVAVVISILIFQNPVTVMGIGGYSITVLGVVAYGETKRRFR

SEQ ID NO: 1772 - protein, 309 aa, Arabidopsis thaliana
  peptide (1)..(309): Ceres Seq. ID no. 12481867
  misc_feature (26)..(149): Pfam Name: Pfam Description:  Integral membrane protein DUF6
  misc_feature (1)..(309): NCBI GI NO: 15237644 NR Description: phosphate/phosphoenolpyruvate translocator
  misc_feature (1)..(309): NCBI GI NO: 17064798 NR Description: phosphate/phosphoenolpyruvate translocator-like
  misc_feature (1)..(309): NCBI GI NO: 15228248 NR Description: unknown protein; protein id: At3g10290.1
  misc_feature (11)..(307): NCBI GI NO: 27476065 NR Description: Putative phosphate/phosphoenolpyruvate translocator protein
  misc_feature (11)..(307): NCBI GI NO: 9759107 NR Description: phosphate/phosphoenolpyruvate translocator protein-like
  misc_feature (11)..(307): NCBI GI NO: 30681126 NR Description: phosphate translocator-related
  misc_feature (152)..(307): NCBI GI NO: 15229717 NR Description: integral membrane protein, putative
  misc_feature (11)..(153): NCBI GI NO: 15229717 NR Description: integral membrane protein, putative
  misc_feature (1)..(307): NCBI GI NO: 15221371 NR Description: hypothetical protein; protein id: At1g12500.1
  misc_feature (6)..(302): NCBI GI NO: 15219121 NR Description: glucose 6 phosphate/phosphate translocator
MSSSAKKQTLFISTLIISWYSSNIGVLLLNKFLLSNYGFKFPIFLTMCHMSACAILSYISIVFLKLVPLQHLKSRSQFLKVATLSIVFCASVVGGNISLRYLPVSFNQAVGATTPFFTALFAYLMTFKREAWVTYGALVPVVAGVVIASGGEPGFHWFGFIMCISATAARAFKSVLQGILLSSEGEKLNSMNLMLYMSPIAVIALLPVTLFMEPDVISVTLTLAKQHQYMWILLLVNSVMAYSANLLNFLVTKHTSALTLQVLGNAKGAVAVVISILIFQNPVTVMGIGGYSITVLGVVAYGETKRRFR

SEQ ID NO: 1773 - protein, 263 aa, Arabidopsis thaliana
  peptide (1)..(263): Ceres Seq. ID no. 12481868
  misc_feature (1)..(103): Pfam Name: Pfam Description:  Integral membrane protein DUF6
  misc_feature (1)..(263): NCBI GI NO: 15237644 NR Description: phosphate/phosphoenolpyruvate translocator
  misc_feature (1)..(263): NCBI GI NO: 17064798 NR Description: phosphate/phosphoenolpyruvate translocator-like
  misc_feature (1)..(263): NCBI GI NO: 15228248 NR Description: unknown protein; protein id: At3g10290.1
  misc_feature (1)..(261): NCBI GI NO: 27476065 NR Description: Putative phosphate/phosphoenolpyruvate translocator protein
  misc_feature (1)..(261): NCBI GI NO: 9759107 NR Description: phosphate/phosphoenolpyruvate translocator protein-like
  misc_feature (1)..(261): NCBI GI NO: 30681126 NR Description: phosphate translocator-related
  misc_feature (106)..(261): NCBI GI NO: 15229717 NR Description: integral membrane protein, putative
  misc_feature (1)..(107): NCBI GI NO: 15229717 NR Description: integral membrane protein, putative
  misc_feature (1)..(261): NCBI GI NO: 15221371 NR Description: hypothetical protein; protein id: At1g12500.1
  misc_feature (1)..(256): NCBI GI NO: 15219121 NR Description: glucose 6 phosphate/phosphate translocator
MCHMSACAILSYISIVFLKLVPLQHLKSRSQFLKVATLSIVFCASVVGGNISLRYLPVSFNQAVGATTPFFTALFAYLMTFKREAWVTYGALVPVVAGVVIASGGEPGFHWFGFIMCISATAARAFKSVLQGILLSSEGEKLNSMNLMLYMSPIAVIALLPVTLFMEPDVISVTLTLAKQHQYMWILLLVNSVMAYSANLLNFLVTKHTSALTLQVLGNAKGAVAVVISILIFQNPVTVMGIGGYSITVLGVVAYGETKRRFR

SEQ ID NO: 1774 - DNA, 1611 bp, Arabidopsis thaliana
  misc_feature (1)..(1611): Ceres Seq. ID no. 13499676
aaattaaaagtcaatcatatcaaatcccaaatcctcccagatgtttttatcatcttcttcttcctgaagatttgatttcattttcctctctttcagatccctattctcatggcttctggatcttactggtgctatagttgtagccgattcgtttgggtttccgattcaatctcttgccctgattgcgacggtggtttcctcgaactcatccaagagcctctcgatttcacaccttccgattccttcaccaccaccaccaccactcaacatcgcagccccactcgcttccctcctccttcttcttcttcctccaccccatccgcttctatgcacgccgataacagtcccactcctaccatcgttactcgtacacgaagcaatcgatctcctaatccagttattgttctccgtggatctgctgctgctccttcttctgatgttgtttccgaaggtttagatcgatctgcttttcagatgtattacgatgatggtactgattctggtcttagacctttaccaccgagtatgactgagtttttgttaggttctggatttgatcgtttgttagatcagatctctcagatcgagcttaacaccaatcggaatcttcgttcttgtgaacatccaccggcttctaaatcggccattgaagctttgcctctgattgaaatcgatccgactcatctcttatcggattctcaatctcattgcgctgtttgcaaagagaatttcgttttgaaatcatctgctcgcgagatgccttgtaatcacatctatcatcctgattgtattcttccttggcttgcgattcgtaactcttgtccggtttgccgtcatgagctaccggcggaggatctcaccgacggaaccggtgctgctttgactgctgttaccgctactgcagaggaagaggaagactcagctgcggggttaacgatttggaggttaccaggtggaggattcgctgtagggagaatccctggtggttggagaggtggagatagaatgatgccggtggtttacacggaggttgatggtggtagactcggtgatgagagacttccgagaagagtagcttggggttcgagaagaggtggaagagatggtggaggtagtagagagagaggtggtggctttgcgggtcggatcatgaggcttttcggatgttttagtggatcatctggatccattgctgctgctgctgctgcatcatccgggtccgggtccagaattcgggttactcgtagaaccaggtcgttctctatgttcagtacggcgtcgtcttcgtcaaggagacgaaattggctagcgtgattactagaattaccaagctctcttctcaggtgaaaactaaacacgaaagaacacactcttcttctgtttaaatttttcctatgttccttattaagtttttgtctatttcagtgtaatgattatattcattcctaaaatttgaatctatgcgagtaaattgatacaaaattaggtgacatagtgtcttcagtggcaaatttaggaggatatgttactgtgagtctgtgactagataagtgagagtgtagatgaattgaagaatgtactctgaaggagattcatagttgttctatttgt

SEQ ID NO: 1775 - protein, 401 aa, Arabidopsis thaliana
  peptide (1)..(401): Ceres Seq. ID no. 13499677
  misc_feature (201)..(241): Pfam Name: RING finger Pfam Description: Zinc finger, C3HC4 type
  misc_feature (1)..(401): NCBI GI NO: 18405141 NR Description: RING-H2 finger protein (RHC2a)
  misc_feature (3)..(398): NCBI GI NO: 8885559 NR Description: emb|CAB62332
  misc_feature (3)..(398): NCBI GI NO: 18424254 NR Description: expressed protein [Arabidopsis thaliana]
  misc_feature (61)..(369): NCBI GI NO: 14719329 NR Description: putative RING-H2 finger protein [Oryza sativa]
  misc_feature (83)..(360): NCBI GI NO: 15232595 NR Description: expressed protein [Arabidopsis thaliana]
  misc_feature (102)..(295): NCBI GI NO: 34902106 NR Description: unknown protein
  misc_feature (149)..(311): NCBI GI NO: 34906008 NR Description: putative RING-H2 finger protein RHC2a
  misc_feature (6)..(249): NCBI GI NO: 11994207 NR Description: gene_id:MPN9.20~unknown protein
  misc_feature (6)..(249): NCBI GI NO: 15231003 NR Description: expressed protein [Arabidopsis thaliana]
  misc_feature (5)..(273): NCBI GI NO: 18405518 NR Description: RING-H2 finger protein (RHC1a)
MASGSYWCYSCSRFVWVSDSISCPDCDGGFLELIQEPLDFTPSDSFTTTTTTQHRSPTRFPPPSSSSSTPSASMHADNSPTPTIVTRTRSNRSPNPVIVLRGSAAAPSSDVVSEGLDRSAFQMYYDDGTDSGLRPLPPSMTEFLLGSGFDRLLDQISQIELNTNRNLRSCEHPPASKSAIEALPLIEIDPTHLLSDSQSHCAVCKENFVLKSSAREMPCNHIYHPDCILPWLAIRNSCPVCRHELPAEDLTDGTGAALTAVTATAEEEEDSAAGLTIWRLPGGGFAVGRIPGGWRGGDRMMPVVYTEVDGGRLGDERLPRRVAWGSRRGGRDGGGSRERGGGFAGRIMRLFGCFSGSSGSIAAAAAASSGSGSRIRVTRRTRSFSMFSTASSSSRRRNWLA

SEQ ID NO: 1776 - protein, 328 aa, Arabidopsis thaliana
  peptide (1)..(328): Ceres Seq. ID no. 13499678
  misc_feature (128)..(168): Pfam Name: RING finger Pfam Description: Zinc finger, C3HC4 type
  misc_feature (1)..(328): NCBI GI NO: 18405141 NR Description: RING-H2 finger protein (RHC2a)
  misc_feature (1)..(325): NCBI GI NO: 8885559 NR Description: emb|CAB62332
  misc_feature (1)..(325): NCBI GI NO: 18424254 NR Description: expressed protein [Arabidopsis thaliana]
  misc_feature (1)..(296): NCBI GI NO: 14719329 NR Description: putative RING-H2 finger protein [Oryza sativa]
  misc_feature (10)..(287): NCBI GI NO: 15232595 NR Description: expressed protein [Arabidopsis thaliana]
  misc_feature (29)..(222): NCBI GI NO: 34902106 NR Description: unknown protein
  misc_feature (76)..(238): NCBI GI NO: 34906008 NR Description: putative RING-H2 finger protein RHC2a
  misc_feature (1)..(176): NCBI GI NO: 11994207 NR Description: gene_id:MPN9.20~unknown protein
  misc_feature (1)..(176): NCBI GI NO: 15231003 NR Description: expressed protein [Arabidopsis thaliana]
  misc_feature (1)..(200): NCBI GI NO: 18405518 NR Description: RING-H2 finger protein (RHC1a)
MHADNSPTPTIVTRTRSNRSPNPVIVLRGSAAAPSSDVVSEGLDRSAFQMYYDDGTDSGLRPLPPSMTEFLLGSGFDRLLDQISQIELNTNRNLRSCEHPPASKSAIEALPLIEIDPTHLLSDSQSHCAVCKENFVLKSSAREMPCNHIYHPDCILPWLAIRNSCPVCRHELPAEDLTDGTGAALTAVTATAEEEEDSAAGLTIWRLPGGGFAVGRIPGGWRGGDRMMPVVYTEVDGGRLGDERLPRRVAWGSRRGGRDGGGSRERGGGFAGRIMRLFGCFSGSSGSIAAAAAASSGSGSRIRVTRRTRSFSMFSTASSSSRRRNWLA

SEQ ID NO: 1777 - protein, 279 aa, Arabidopsis thaliana
  peptide (1)..(279): Ceres Seq. ID no. 13499679
  misc_feature (79)..(119): Pfam Name: RING finger Pfam Description: Zinc finger, C3HC4 type
  misc_feature (1)..(279): NCBI GI NO: 18405141 NR Description: RING-H2 finger protein (RHC2a)
  misc_feature (1)..(276): NCBI GI NO: 8885559 NR Description: emb|CAB62332
  misc_feature (1)..(276): NCBI GI NO: 18424254 NR Description: expressed protein [Arabidopsis thaliana]
  misc_feature (1)..(247): NCBI GI NO: 14719329 NR Description: putative RING-H2 finger protein [Oryza sativa]
  misc_feature (1)..(238): NCBI GI NO: 15232595 NR Description: expressed protein [Arabidopsis thaliana]
  misc_feature (1)..(173): NCBI GI NO: 34902106 NR Description: unknown protein
  misc_feature (27)..(189): NCBI GI NO: 34906008 NR Description: putative RING-H2 finger protein RHC2a
  misc_feature (1)..(127): NCBI GI NO: 11994207 NR Description: gene_id:MPN9.20~unknown protein
  misc_feature (1)..(127): NCBI GI NO: 15231003 NR Description: expressed protein [Arabidopsis thaliana]
  misc_feature (1)..(151): NCBI GI NO: 18405518 NR Description: RING-H2 finger protein (RHC1a)
MYYDDGTDSGLRPLPPSMTEFLLGSGFDRLLDQISQIELNTNRNLRSCEHPPASKSAIEALPLIEIDPTHLLSDSQSHCAVCKENFVLKSSAREMPCNHIYHPDCILPWLAIRNSCPVCRHELPAEDLTDGTGAALTAVTATAEEEEDSAAGLTIWRLPGGGFAVGRIPGGWRGGDRMMPVVYTEVDGGRLGDERLPRRVAWGSRRGGRDGGGSRERGGGFAGRIMRLFGCFSGSSGSIAAAAAASSGSGSRIRVTRRTRSFSMFSTASSSSRRRNWLA

SEQ ID NO: 1778 - DNA, 1232 bp, Arabidopsis thaliana
  misc_feature (1)..(1232): Ceres Seq. ID no. 13489097
attgatataggcgaactaattaataagactttaaaatgtctctctatcactctcttagcattttcctcctcctatctctctgccatggctcttacagtcttcaaccacgtcgagttcctcatctagacgggattctcccaaatggaaacttcgagataacccctctcaaatcaaacatgaagggtcgacaaataatcggggctaactctcttcctcattgggaaatcgccgggcacgtggagctagtctccggtggacctcagcctggaggattctatttccccgttccacgtggagtccacgcggttagactcggaaacttgggcaccatctctcagaacgtgagggtgaagagtggtttggtctactctctaacgttcggagctacgaggacttgtgctcaggatgagaacatcaaagtctctgtgcctggtcaggccaatgagcttccgctccagaccgtctttagctccgacggtggagacacttacgcttgggctttcaaggcaacttctgatgtggttaaggtcactttccataaccctggtgttcaagaagaccgcacgtgtggacctctcttagatgttgtcgcaatcaaggagattcttcctctccggtataccagaggaaacttggtgaaaaatggaggattcgagatcggtccacatgttttcgctaatttctcaaccggaatcttgattccagcaagaatccaagacttcatctctcctcttccgggatggatcgtcgaatcccttaaaccagtgaagtatatcgatagacgtcatttcaaagttccttatggacaaggggccgtcgagctagttgccggaagagaaagcgcaatagctcagatcatccgaaccatcgctggtaaagcctatatgctctcattcgcggttggtgatgcacaaaacggttgccacgggtcgatgatggtggaagcgttcgcaggaagagaaccgtttaagctttcttttatgtcagaaggtaaaggagcgttcaaaacagggcattttaggtttgttgctgattcggatcgaacgaggctaacgttttatagtgcgttttatcatacaaagcttcatgacttcggccatctttgtgggcctgttcttgatagcgttgttgttaccctggcccgttaacaatttgtggcttttaattcttattagactgaatattcgaaacactatactctattcgtaacgaatttgtggttgcactaaaag

SEQ ID NO: 1779 - protein, 370 aa, Arabidopsis thaliana
  peptide (1)..(370): Ceres Seq. ID no. 13489098
  misc_feature (48)..(370): Pfam Name: Pfam Description:  Protein of unknown function, DUF642
  misc_feature (1)..(370): NCBI GI NO: 15227437 NR Description: expressed protein [Arabidopsis thaliana]
  misc_feature (1)..(369): NCBI GI NO: 15227439 NR Description: expressed protein [Arabidopsis thaliana]
  misc_feature (1)..(367): NCBI GI NO: 18398135 NR Description: expressed protein [Arabidopsis thaliana]
  misc_feature (48)..(367): NCBI GI NO: 12321555 NR Description: unknown protein, 5' partial [Arabidopsis thaliana]
  misc_feature (24)..(366): NCBI GI NO: 30102997 NR Description: unknown protein
  misc_feature (7)..(370): NCBI GI NO: 7488898 NR Description: hypothetical protein - castor bean
  misc_feature (31)..(370): NCBI GI NO: 15239049 NR Description: expressed protein [Arabidopsis thaliana]
  misc_feature (31)..(370): NCBI GI NO: 18418018 NR Description: expressed protein [Arabidopsis thaliana]
  misc_feature (31)..(370): NCBI GI NO: 21554402 NR Description: unknown [Arabidopsis thaliana]
  misc_feature (31)..(370): NCBI GI NO: 23397043 NR Description: unknown protein [Arabidopsis thaliana]
MSLYHSLSIFLLLSLCHGSYSLQPRRVPHLDGILPNGNFEITPLKSNMKGRQIIGANSLPHWEIAGHVELVSGGPQPGGFYFPVPRGVHAVRLGNLGTISQNVRVKSGLVYSLTFGATRTCAQDENIKVSVPGQANELPLQTVFSSDGGDTYAWAFKATSDVVKVTFHNPGVQEDRTCGPLLDVVAIKEILPLRYTRGNLVKNGGFEIGPHVFANFSTGILIPARIQDFISPLPGWIVESLKPVKYIDRRHFKVPYGQGAVELVAGRESAIAQIIRTIAGKAYMLSFAVGDAQNGCHGSMMVEAFAGREPFKLSFMSEGKGAFKTGHFRFVADSDRTRLTFYSAFYHTKLHDFGHLCGPVLDSVVVTLAR

SEQ ID NO: 1780 - protein, 323 aa, Arabidopsis thaliana
  peptide (1)..(323): Ceres Seq. ID no. 13489099
  misc_feature (1)..(323): Pfam Name: Pfam Description:  Protein of unknown function, DUF642
  misc_feature (1)..(323): NCBI GI NO: 15227437 NR Description: expressed protein [Arabidopsis thaliana]
  misc_feature (1)..(322): NCBI GI NO: 15227439 NR Description: expressed protein [Arabidopsis thaliana]
  misc_feature (1)..(320): NCBI GI NO: 18398135 NR Description: expressed protein [Arabidopsis thaliana]
  misc_feature (1)..(320): NCBI GI NO: 12321555 NR Description: unknown protein, 5' partial [Arabidopsis thaliana]
  misc_feature (1)..(319): NCBI GI NO: 30102997 NR Description: unknown protein
  misc_feature (1)..(323): NCBI GI NO: 7488898 NR Description: hypothetical protein - castor bean
  misc_feature (1)..(323): NCBI GI NO: 15239049 NR Description: expressed protein [Arabidopsis thaliana]
  misc_feature (1)..(323): NCBI GI NO: 18418018 NR Description: expressed protein [Arabidopsis thaliana]
  misc_feature (1)..(323): NCBI GI NO: 21554402 NR Description: unknown [Arabidopsis thaliana]
  misc_feature (1)..(323): NCBI GI NO: 23397043 NR Description: unknown protein [Arabidopsis thaliana]
MKGRQIIGANSLPHWEIAGHVELVSGGPQPGGFYFPVPRGVHAVRLGNLGTISQNVRVKSGLVYSLTFGATRTCAQDENIKVSVPGQANELPLQTVFSSDGGDTYAWAFKATSDVVKVTFHNPGVQEDRTCGPLLDVVAIKEILPLRYTRGNLVKNGGFEIGPHVFANFSTGILIPARIQDFISPLPGWIVESLKPVKYIDRRHFKVPYGQGAVELVAGRESAIAQIIRTIAGKAYMLSFAVGDAQNGCHGSMMVEAFAGREPFKLSFMSEGKGAFKTGHFRFVADSDRTRLTFYSAFYHTKLHDFGHLCGPVLDSVVVTLAR

SEQ ID NO: 1781 - DNA, 1220 bp, Arabidopsis thaliana
  misc_feature (1)..(1220): Ceres Seq. ID no. 12329420
aacccaacaaattcattctaaatacatttcttttcactcaagaaattaaaatttcgaaaagtttgttaaaatgaatgcacacatgctcaatctccttgtcatagtcatttttgtagtttctttcgatgtccaagcactcagtcctcactactacgaccatacttgtccacaagccgaccacattgtaaccaatgcagtcaagaaagccatgtcaaacgaccaaactgtccctgctgcgcttttgaggatgcatttccacgactgtttcgtcagaggatgtgatggctcagttctcttagactctaaggggaagaacaaagcagagaaagatggacctcctaacatctcactccatgcattttatgtgattgacaatgcaaagaaggcattagaagaacaatgtcccggtatcgtctcttgcgccgacattctttcacttgcggcaagagatgctgtcgctctctcaggagggcctacatgggcagtgccaaaagggagaaaagatggaagaatatcaaaggcaatagaaacaagacaactaccagctcctactttcaacatttctcaattgcgtcaaaattttggccaaagaggcctctctatgcatgatcttgttgctctctctggaggtcatacactaggattcgcccactgttcatcgttccagaataggctccataaattcaacacacaaaaggaggttgacccaacactaaacccctcattcgcagccaggttggagggagtgtgcccggcccataacacggtgaagaatgctggatcgaacatggatggaaccgtgacgtcattcgacaatatctactacaagatgcttatccaaggcaagtcactattctcatccgacgaatcgcttcttgcagtaccctctactaagaaactcgtggccaaatatgcaaattccaacgaagagttcgagagggcttttgtgaaatcgatgatcaagatgagtagtatcagtgggaatggcaatgaggtcagacttaactgcagaagggttcgctagaatctcaatctacgcttccaacatcacgttactactacatttttatgtctttcgttttctttcgtcacattgattacttgtgaatgggcctttctaaagattaaggcagaggttcttgtatcagaattatctatcaatctctcgtgtgtgcttgtataggcatttatttacaagtaataagatcttttctctttct

SEQ ID NO: 1782 - protein, 317 aa, Arabidopsis thaliana
  peptide (1)..(317): Ceres Seq. ID no. 12329421
  misc_feature (39)..(284): Pfam Name: Pfam Description:  Peroxidase
  misc_feature (1)..(317): NCBI GI NO: 15238309 NR Description: peroxidase, putative; protein id: At5g42180
  misc_feature (6)..(310): NCBI GI NO: 4204765 NR Description: peroxidase [Glycine max]
  misc_feature (3)..(310): NCBI GI NO: 4204763 NR Description: peroxidase [Glycine max]
  misc_feature (9)..(315): NCBI GI NO: 7484677 NR Description: peroxidase (EC 1.11.1.7) prx11 precursor - spinach
  misc_feature (8)..(316): NCBI GI NO: 15242213 NR Description: peroxidase, putative; protein id: At5g51890
  misc_feature (38)..(315): NCBI GI NO: 2956707 NR Description: peroxidase [Spinacia oleracea]
  misc_feature (27)..(314): NCBI GI NO: 34902230 NR Description: Putative peroxidase
  misc_feature (9)..(314): NCBI GI NO: 34902232 NR Description: Putative peroxidase
  misc_feature (1)..(316): NCBI GI NO: 18418208 NR Description: peroxidase, putative; protein id: At4g33420
  misc_feature (1)..(316): NCBI GI NO: 26397921 NR Description: Peroxidase 47 precursor (Atperox P47) (ATP32)
MNAHMLNLLVIVIFVVSFDVQALSPHYYDHTCPQADHIVTNAVKKAMSNDQTVPAALLRMHFHDCFVRGCDGSVLLDSKGKNKAEKDGPPNISLHAFYVIDNAKKALEEQCPGIVSCADILSLAARDAVALSGGPTWAVPKGRKDGRISKAIETRQLPAPTFNISQLRQNFGQRGLSMHDLVALSGGHTLGFAHCSSFQNRLHKFNTQKEVDPTLNPSFAARLEGVCPAHNTVKNAGSNMDGTVTSFDNIYYKMLIQGKSLFSSDESLLAVPSTKKLVAKYANSNEEFERAFVKSMIKMSSISGNGNEVRLNCRRVR

SEQ ID NO: 1783 - protein, 313 aa, Arabidopsis thaliana
  peptide (1)..(313): Ceres Seq. ID no. 12329422
  misc_feature (35)..(280): Pfam Name: Pfam Description:  Peroxidase
  misc_feature (1)..(313): NCBI GI NO: 15238309 NR Description: peroxidase, putative; protein id: At5g42180
  misc_feature (2)..(306): NCBI GI NO: 4204765 NR Description: peroxidase [Glycine max]
  misc_feature (1)..(306): NCBI GI NO: 4204763 NR Description: peroxidase [Glycine max]
  misc_feature (5)..(311): NCBI GI NO: 7484677 NR Description: peroxidase (EC 1.11.1.7) prx11 precursor - spinach
  misc_feature (4)..(312): NCBI GI NO: 15242213 NR Description: peroxidase, putative; protein id: At5g51890
  misc_feature (34)..(311): NCBI GI NO: 2956707 NR Description: peroxidase [Spinacia oleracea]
  misc_feature (23)..(310): NCBI GI NO: 34902230 NR Description: Putative peroxidase
  misc_feature (5)..(310): NCBI GI NO: 34902232 NR Description: Putative peroxidase
  misc_feature (1)..(312): NCBI GI NO: 18418208 NR Description: peroxidase, putative; protein id: At4g33420
  misc_feature (1)..(312): NCBI GI NO: 26397921 NR Description: Peroxidase 47 precursor (Atperox P47) (ATP32)
MLNLLVIVIFVVSFDVQALSPHYYDHTCPQADHIVTNAVKKAMSNDQTVPAALLRMHFHDCFVRGCDGSVLLDSKGKNKAEKDGPPNISLHAFYVIDNAKKALEEQCPGIVSCADILSLAARDAVALSGGPTWAVPKGRKDGRISKAIETRQLPAPTFNISQLRQNFGQRGLSMHDLVALSGGHTLGFAHCSSFQNRLHKFNTQKEVDPTLNPSFAARLEGVCPAHNTVKNAGSNMDGTVTSFDNIYYKMLIQGKSLFSSDESLLAVPSTKKLVAKYANSNEEFERAFVKSMIKMSSISGNGNEVRLNCRRVR

SEQ ID NO: 1784 - protein, 271 aa, Arabidopsis thaliana
  peptide (1)..(271): Ceres Seq. ID no. 12329423
  misc_feature (1)..(238): Pfam Name: Pfam Description:  Peroxidase
  misc_feature (1)..(271): NCBI GI NO: 15238309 NR Description: peroxidase, putative; protein id: At5g42180
  misc_feature (1)..(264): NCBI GI NO: 4204765 NR Description: peroxidase [Glycine max]
  misc_feature (1)..(264): NCBI GI NO: 4204763 NR Description: peroxidase [Glycine max]
  misc_feature (1)..(269): NCBI GI NO: 7484677 NR Description: peroxidase (EC 1.11.1.7) prx11 precursor - spinach
  misc_feature (1)..(270): NCBI GI NO: 15242213 NR Description: peroxidase, putative; protein id: At5g51890
  misc_feature (1)..(269): NCBI GI NO: 2956707 NR Description: peroxidase [Spinacia oleracea]
  misc_feature (1)..(268): NCBI GI NO: 34902230 NR Description: Putative peroxidase
  misc_feature (1)..(268): NCBI GI NO: 34902232 NR Description: Putative peroxidase
  misc_feature (1)..(270): NCBI GI NO: 18418208 NR Description: peroxidase, putative; protein id: At4g33420
  misc_feature (1)..(270): NCBI GI NO: 26397921 NR Description: Peroxidase 47 precursor (Atperox P47) (ATP32)
MSNDQTVPAALLRMHFHDCFVRGCDGSVLLDSKGKNKAEKDGPPNISLHAFYVIDNAKKALEEQCPGIVSCADILSLAARDAVALSGGPTWAVPKGRKDGRISKAIETRQLPAPTFNISQLRQNFGQRGLSMHDLVALSGGHTLGFAHCSSFQNRLHKFNTQKEVDPTLNPSFAARLEGVCPAHNTVKNAGSNMDGTVTSFDNIYYKMLIQGKSLFSSDESLLAVPSTKKLVAKYANSNEEFERAFVKSMIKMSSISGNGNEVRLNCRRVR

SEQ ID NO: 1785 - DNA, 1136 bp, Arabidopsis thaliana
  misc_feature (1)..(1136): Ceres Seq. ID no. 12562322
aattagaatctttcccgacaaagaaatagctctaagcacgacctttttcttcctaagtcgccggcgagacaaaaaaaacataatcccgacggttacacgtaccggataattgtatttaagttgaatccgctttgtactttcctcacagccaaagatttttccttactaggattttcattttctcttctgttttcgtttcaaattcagaaaatcttccgtttcaatccggtttatatcggtttttagcaatgtcgatggtaactgtcaaagttagcaacgtttctcttgaagcaacagaaagagatctcaaggagttcttctctttttccggcgatattgcttacctcgagactcaaagcgagaatgatggttctaaattagcatatgtcacattcaaggatttacaaggagctgaaaccgcagttctcctcaccggatcgacgattgttgattcatcggtcacagttacaatgtcaccagattaccaactacctcctgatgctttagcttccattgaatcattgaaagagagcaataaatcatcatctcctacgcgagaagatgtatcggtatttagaaaagctgaagatgttgtaagtggtatgatttcaaaagggtttgttttaggtaaagacgctatagctaaagcgaagagtcttgatgagaagcatcagttgacatcaacagcttcagctagagttacatctttcgacaaaagaatcggattcacggagaaaatcaacaccgggactacagttgtgagcgaaaaagttaaagaagttgatcagaagtttcaagtcacagagaaaacaaaatcagcaatagctgctgctgagcagacagtgagcaatgctggttctgctataatgaaaaaccggtatgttttaaccggtgccacgtgggttacgggtgcgtttaacagagtgagtaaagctgctgaagaagttggacaaaaggcgaaagagaaagttggtttggctgaggaagaagaagaagagaagaagaaagtggttgatgaagttgctatagttcatctgactgaatcaccaaaggctttagaccaatcagaacaagattcaaaactccctgaatcaaaatcacagccacacaaggagcttaacgcaagtgttgtttga

SEQ ID NO: 1786 - protein, 295 aa, Arabidopsis thaliana
  peptide (1)..(295): Ceres Seq. ID no. 12562323
  misc_feature (6)..(73): Pfam Name: a.k.a. RRM, RBD, or RNP domain Pfam Description: RNA recognition motif.
  misc_feature (1)..(295): NCBI GI NO: 30695063 NR Description: RNA recognition motif (RRM)-containing protein
  misc_feature (3)..(295): NCBI GI NO: 8809670 NR Description: gene_id:MSD23
  misc_feature (1)..(282): NCBI GI NO: 18414951 NR Description: RRM-containing protein; protein id: At4g17720
  misc_feature (3)..(282): NCBI GI NO: 7485085 NR Description: hypothetical protein - Arabidopsis thaliana
  misc_feature (1)..(250): NCBI GI NO: 38347069 NR Description: OSJNBa0006A01.10
  misc_feature (5)..(288): NCBI GI NO: 38344181 NR Description: OSJNBa0053K19.20
  misc_feature (1)..(249): NCBI GI NO: 34897896 NR Description: ESTs D15336
  misc_feature (1)..(265): NCBI GI NO: 18071362 NR Description: putative splicing regulatory protein
  misc_feature (1)..(268): NCBI GI NO: 21592997 NR Description: unknown [Arabidopsis thaliana]
  misc_feature (1)..(268): NCBI GI NO: 15237419 NR Description: RRM-containing protein; protein id: At5g16840
MSMVTVKVSNVSLEATERDLKEFFSFSGDIAYLETQSENDGSKLAYVTFKDLQGAETAVLLTGSTIVDSSVTVTMSPDYQLPPDALASIESLKESNKSSSPTREDVSVFRKAEDVVSGMISKGFVLGKDAIAKAKSLDEKHQLTSTASARVTSFDKRIGFTEKINTGTTVVSEKVKEVDQKFQVTEKTKSAIAAAEQTVSNAGSAIMKNRYVLTGATWVTGAFNRVSKAAEEVGQKAKEKVGLAEEEEEEKKKVVDEVAIVHLTESPKALDQSEQDSKLPESKSQPHKELNASVV

SEQ ID NO: 1787 - protein, 293 aa, Arabidopsis thaliana
  peptide (1)..(293): Ceres Seq. ID no. 12562324
  misc_feature (4)..(71): Pfam Name: a.k.a. RRM, RBD, or RNP domain Pfam Description: RNA recognition motif.
  misc_feature (1)..(293): NCBI GI NO: 30695063 NR Description: RNA recognition motif (RRM)-containing protein
  misc_feature (1)..(293): NCBI GI NO: 8809670 NR Description: gene_id:MSD23
  misc_feature (1)..(280): NCBI GI NO: 18414951 NR Description: RRM-containing protein; protein id: At4g17720
  misc_feature (1)..(280): NCBI GI NO: 7485085 NR Description: hypothetical protein - Arabidopsis thaliana
  misc_feature (1)..(248): NCBI GI NO: 38347069 NR Description: OSJNBa0006A01.10
  misc_feature (3)..(286): NCBI GI NO: 38344181 NR Description: OSJNBa0053K19.20
  misc_feature (1)..(247): NCBI GI NO: 34897896 NR Description: ESTs D15336
  misc_feature (1)..(263): NCBI GI NO: 18071362 NR Description: putative splicing regulatory protein
  misc_feature (1)..(266): NCBI GI NO: 21592997 NR Description: unknown [Arabidopsis thaliana]
  misc_feature (1)..(266): NCBI GI NO: 15237419 NR Description: RRM-containing protein; protein id: At5g16840
MVTVKVSNVSLEATERDLKEFFSFSGDIAYLETQSENDGSKLAYVTFKDLQGAETAVLLTGSTIVDSSVTVTMSPDYQLPPDALASIESLKESNKSSSPTREDVSVFRKAEDVVSGMISKGFVLGKDAIAKAKSLDEKHQLTSTASARVTSFDKRIGFTEKINTGTTVVSEKVKEVDQKFQVTEKTKSAIAAAEQTVSNAGSAIMKNRYVLTGATWVTGAFNRVSKAAEEVGQKAKEKVGLAEEEEEEKKKVVDEVAIVHLTESPKALDQSEQDSKLPESKSQPHKELNASVV

SEQ ID NO: 1788 - protein, 221 aa, Arabidopsis thaliana
  peptide (1)..(221): Ceres Seq. ID no. 12562325
  misc_feature (1)..(221): NCBI GI NO: 30695063 NR Description: RNA recognition motif (RRM)-containing protein
  misc_feature (1)..(221): NCBI GI NO: 8809670 NR Description: gene_id:MSD23
  misc_feature (1)..(208): NCBI GI NO: 18414951 NR Description: RRM-containing protein; protein id: At4g17720
  misc_feature (1)..(208): NCBI GI NO: 7485085 NR Description: hypothetical protein - Arabidopsis thaliana
  misc_feature (1)..(176): NCBI GI NO: 38347069 NR Description: OSJNBa0006A01.10
  misc_feature (1)..(214): NCBI GI NO: 38344181 NR Description: OSJNBa0053K19.20
  misc_feature (1)..(175): NCBI GI NO: 34897896 NR Description: ESTs D15336
  misc_feature (1)..(191): NCBI GI NO: 18071362 NR Description: putative splicing regulatory protein
  misc_feature (1)..(194): NCBI GI NO: 21592997 NR Description: unknown [Arabidopsis thaliana]
  misc_feature (1)..(194): NCBI GI NO: 15237419 NR Description: RRM-containing protein; protein id: At5g16840
MSPDYQLPPDALASIESLKESNKSSSPTREDVSVFRKAEDVVSGMISKGFVLGKDAIAKAKSLDEKHQLTSTASARVTSFDKRIGFTEKINTGTTVVSEKVKEVDQKFQVTEKTKSAIAAAEQTVSNAGSAIMKNRYVLTGATWVTGAFNRVSKAAEEVGQKAKEKVGLAEEEEEEKKKVVDEVAIVHLTESPKALDQSEQDSKLPESKSQPHKELNASVV

SEQ ID NO: 1789 - DNA, 3042 bp, Arabidopsis thaliana
  misc_feature (1)..(3042): Ceres Seq. ID no. 12489473
aaacaaaaaaaaaaattcacccaaaaaaaaaaaacctcgttgccttcttcttcgccgttacagtcctctttctttcttcaattcgccgtcaaaatcttctctttctcttcccccgccggtccttcaccaatcctctgatctctctacacacgaacctttgattttgaccaacgtcgatgcatgttcatgactagtctcttcctcaatccttcaatttcatcaattcacgtcgatttcgtatccgattcgttgttctagctctttgtgtggtgttagggttttaagattttggaattggggtttggagtttgtgatgtttgaagtcaaaatggggtcaaagatgtgcatgaacgcttcatgtggtacgacttctactgttgaatggaagaaaggttggcctcttcgatctggtcttctcgctgatctctgttatcgttgcggatctgcgtatgagagttctctattctgtgaacaatttcataaggaccaatctggttggagggaatgctatttgtgtagcaagagactacattgtggatgcattgcttctaaggtaacgattgagttaatggactatggtggtgttggttgtagtacatgtgcttgctgccatcaactcaatttgaacacaaggggtgagaatccaggtgtttttagcagattgccaatgaaaacgttagctgataggcaacatgtaaatggcgaaagcggaggaagaaacgaaggcgatctcttttctcagccactagtcatgggcggagataaaagggaagagttcatgcctcaccgtgggtttggtaagctaatgagtccagaaagtacaaccaccgggcataggctggatgctgctggggaaatgcatgaatcatcacctttacagccatctttaaatatgggtttggctgtgaatccgtttagcccatcttttgcaaccgaggctgtcgagggaatgaaacacatcagtccttctcagtccaacatggtccattgctctgcttctaatatactgcaaaagccatcaagacctgctatttcaactcctcctgtggctagtaaatccgctcaggcgcggattggaaggcctcctgtcgaagggcgagggagaggccacttgcttccgcggtattggccaaaatatacggataaagaggttcagcagatctctggaaatttgaatttgaacattgtacctctctttgagaaaactcttagtgccagtgatgctggtcgcattggtcgtctagttcttccaaaagcctgtgcagaggcatattttcctccgattagtcaatccgaaggcattcctttgaaaatccaagatgtgaggggtagggagtggacgttccagttcagatattggcccaataacaatagtagaatgtatgttttagaaggtgtcactccatgcatacagtccatgatgctacaggctggtgatacagtaactttcagtcgggttgatcctggcggaaaactaatcatgggttccaggaaggcagctaatgctggagacatgcagggttgtgggctcaccaacggaacatcaactgaggacacatcatcgtctggtgtaacagaaaacccaccctccataaatggttcctcgtgtatttcactaataccgaaagagttgaatggtatgcctgagaatttgaacagtgagactaacgggggcaggataggtgatgatcctacacgagttaaagagaagaagagaactcgaaccattggtgcaaaaaataagagacttcttttgcatagtgaagaatctatggagctgagactcacttgggaagaagctcaggacttgcttcgtccctctcctagtgtaaagcctaccatcgttgtcattgaggagcaagaaattgaagaatatgacgaacctcctgtctttggaaagaggactatagtcactacaaaaccttcaggtgaacaggaacgatgggcaacttgcgacgactgctctaaatggagaaggttacctgtagatgctcttctttcctttaaatggacatgtatagacaatgtttgggatgtgagtaggtgttcatgttctgcaccggaggagagtctgaaggaacttgagaatgttcttaaagtaggaagagagcacaagaagagaagaactggggaaagccaggcagcaaaaagtcagcaagaaccgtgtggtttggacgcactggcgagtgcagcagtcttaggagacacaataggcgagccagaggtagcgaccacgaccagacatccaaggcacagggctggatgctcttgcatcgtgtgcattcagccaccaagtgggaaaggtaggcacaagcctacatgtggctgcactgtgtgtagcaccgtgaagagaaggttcaagacgcttatgatgaggaggaagaagaagcagttggagcgcgatgtaacagcagcagaagataagaagaagaaggacatggaactggctgagtctgataagagtaaggaggagaaggaagtgaacacagcgagaatagacctgaacagtgatccatacaataaagaagatgttgaagctgttgcggtggagaaagaagagagtcgaaaaagagcaataggacagtgttcgggcgtggtggctcaagacgccagtgatgttttaggagttacagagttagaaggagagggtaagaatgttcgtgaagagccgagagtttcaagctgatatggaaggaaaaagggaaagggtaaaagccaaagtcatagccagttttattaatatgctgagaccaagagtaggagaagaagaagagaaagagagagagagagagagagagagaagtacagttttgtgtttgattctgtcatagttgtaggaaaaataagtttctggttctaaacagcgacaatgtcccatcttttgttttttgtttttgtttttgtatttttatggtatcgtgttgagtttggggtttatagtatgtctccattaatctaggttttgttgtagaaggcaaatggagctttgtgcttggtgatgaaacagttgagttgatttttttttttgtaattgttttcaac

SEQ ID NO: 1790 - protein, 790 aa, Arabidopsis thaliana
  peptide (1)..(790): Ceres Seq. ID no. 12489474
  misc_feature (294)..(398): Pfam Name: Pfam Description:  B3 DNA binding domain
  misc_feature (396)..(740): NCBI GI NO: 34394741 NR Description: VP1/ABI3 family regulatory protein-like
  misc_feature (211)..(431): NCBI GI NO: 34394741 NR Description: VP1/ABI3 family regulatory protein-like
  misc_feature (6)..(96): NCBI GI NO: 34394741 NR Description: VP1/ABI3 family regulatory protein-like
  misc_feature (169)..(697): NCBI GI NO: 34898718 NR Description: similar to VP1/ABI3 family regulatory protein
  misc_feature (9)..(97): NCBI GI NO: 34898718 NR Description: similar to VP1/ABI3 family regulatory protein
  misc_feature (70)..(536): NCBI GI NO: 15236645 NR Description: similar to putative VP1/ABI3 family regulatory protein
  misc_feature (585)..(784): NCBI GI NO: 15236645 NR Description: similar to putative VP1/ABI3 family regulatory protein
  misc_feature (70)..(431): NCBI GI NO: 15234504 NR Description: VP1 like protein; protein id: At4g21550.1
  misc_feature (628)..(739): NCBI GI NO: 15234504 NR Description: VP1 like protein; protein id: At4g21550.1
  misc_feature (44)..(97): NCBI GI NO: 15234504 NR Description: VP1 like protein; protein id: At4g21550.1
MFEVKMGSKMCMNASCGTTSTVEWKKGWPLRSGLLADLCYRCGSAYESSLFCEQFHKDQSGWRECYLCSKRLHCGCIASKVTIELMDYGGVGCSTCACCHQLNLNTRGENPGVFSRLPMKTLADRQHVNGESGGRNEGDLFSQPLVMGGDKREEFMPHRGFGKLMSPESTTTGHRLDAAGEMHESSPLQPSLNMGLAVNPFSPSFATEAVEGMKHISPSQSNMVHCSASNILQKPSRPAISTPPVASKSAQARIGRPPVEGRGRGHLLPRYWPKYTDKEVQQISGNLNLNIVPLFEKTLSASDAGRIGRLVLPKACAEAYFPPISQSEGIPLKIQDVRGREWTFQFRYWPNNNSRMYVLEGVTPCIQSMMLQAGDTVTFSRVDPGGKLIMGSRKAANAGDMQGCGLTNGTSTEDTSSSGVTENPPSINGSSCISLIPKELNGMPENLNSETNGGRIGDDPTRVKEKKRTRTIGAKNKRLLLHSEESMELRLTWEEAQDLLRPSPSVKPTIVVIEEQEIEEYDEPPVFGKRTIVTTKPSGEQERWATCDDCSKWRRLPVDALLSFKWTCIDNVWDVSRCSCSAPEESLKELENVLKVGREHKKRRTGESQAAKSQQEPCGLDALASAAVLGDTIGEPEVATTTRHPRHRAGCSCIVCIQPPSGKGRHKPTCGCTVCSTVKRRFKTLMMRRKKKQLERDVTAAEDKKKKDMELAESDKSKEEKEVNTARIDLNSDPYNKEDVEAVAVEKEESRKRAIGQCSGVVAQDASDVLGVTELEGEGKNVREEPRVSS

SEQ ID NO: 1791 - protein, 785 aa, Arabidopsis thaliana
  peptide (1)..(785): Ceres Seq. ID no. 12489475
  misc_feature (289)..(393): Pfam Name: Pfam Description:  B3 DNA binding domain
  misc_feature (391)..(735): NCBI GI NO: 34394741 NR Description: VP1/ABI3 family regulatory protein-like
  misc_feature (206)..(426): NCBI GI NO: 34394741 NR Description: VP1/ABI3 family regulatory protein-like
  misc_feature (1)..(91): NCBI GI NO: 34394741 NR Description: VP1/ABI3 family regulatory protein-like
  misc_feature (164)..(692): NCBI GI NO: 34898718 NR Description: similar to VP1/ABI3 family regulatory protein
  misc_feature (4)..(92): NCBI GI NO: 34898718 NR Description: similar to VP1/ABI3 family regulatory protein
  misc_feature (65)..(531): NCBI GI NO: 15236645 NR Description: similar to putative VP1/ABI3 family regulatory protein
  misc_feature (580)..(779): NCBI GI NO: 15236645 NR Description: similar to putative VP1/ABI3 family regulatory protein
  misc_feature (65)..(426): NCBI GI NO: 15234504 NR Description: VP1 like protein; protein id: At4g21550.1
  misc_feature (623)..(734): NCBI GI NO: 15234504 NR Description: VP1 like protein; protein id: At4g21550.1
  misc_feature (39)..(92): NCBI GI NO: 15234504 NR Description: VP1 like protein; protein id: At4g21550.1
MGSKMCMNASCGTTSTVEWKKGWPLRSGLLADLCYRCGSAYESSLFCEQFHKDQSGWRECYLCSKRLHCGCIASKVTIELMDYGGVGCSTCACCHQLNLNTRGENPGVFSRLPMKTLADRQHVNGESGGRNEGDLFSQPLVMGGDKREEFMPHRGFGKLMSPESTTTGHRLDAAGEMHESSPLQPSLNMGLAVNPFSPSFATEAVEGMKHISPSQSNMVHCSASNILQKPSRPAISTPPVASKSAQARIGRPPVEGRGRGHLLPRYWPKYTDKEVQQISGNLNLNIVPLFEKTLSASDAGRIGRLVLPKACAEAYFPPISQSEGIPLKIQDVRGREWTFQFRYWPNNNSRMYVLEGVTPCIQSMMLQAGDTVTFSRVDPGGKLIMGSRKAANAGDMQGCGLTNGTSTEDTSSSGVTENPPSINGSSCISLIPKELNGMPENLNSETNGGRIGDDPTRVKEKKRTRTIGAKNKRLLLHSEESMELRLTWEEAQDLLRPSPSVKPTIVVIEEQEIEEYDEPPVFGKRTIVTTKPSGEQERWATCDDCSKWRRLPVDALLSFKWTCIDNVWDVSRCSCSAPEESLKELENVLKVGREHKKRRTGESQAAKSQQEPCGLDALASAAVLGDTIGEPEVATTTRHPRHRAGCSCIVCIQPPSGKGRHKPTCGCTVCSTVKRRFKTLMMRRKKKQLERDVTAAEDKKKKDMELAESDKSKEEKEVNTARIDLNSDPYNKEDVEAVAVEKEESRKRAIGQCSGVVAQDASDVLGVTELEGEGKNVREEPRVSS

SEQ ID NO: 1792 - protein, 781 aa, Arabidopsis thaliana
  peptide (1)..(781): Ceres Seq. ID no. 12489476
  misc_feature (285)..(389): Pfam Name: Pfam Description:  B3 DNA binding domain
  misc_feature (387)..(731): NCBI GI NO: 34394741 NR Description: VP1/ABI3 family regulatory protein-like
  misc_feature (202)..(422): NCBI GI NO: 34394741 NR Description: VP1/ABI3 family regulatory protein-like
  misc_feature (1)..(87): NCBI GI NO: 34394741 NR Description: VP1/ABI3 family regulatory protein-like
  misc_feature (160)..(688): NCBI GI NO: 34898718 NR Description: similar to VP1/ABI3 family regulatory protein
  misc_feature (1)..(88): NCBI GI NO: 34898718 NR Description: similar to VP1/ABI3 family regulatory protein
  misc_feature (61)..(527): NCBI GI NO: 15236645 NR Description: similar to putative VP1/ABI3 family regulatory protein
  misc_feature (576)..(775): NCBI GI NO: 15236645 NR Description: similar to putative VP1/ABI3 family regulatory protein
  misc_feature (61)..(422): NCBI GI NO: 15234504 NR Description: VP1 like protein; protein id: At4g21550.1
  misc_feature (619)..(730): NCBI GI NO: 15234504 NR Description: VP1 like protein; protein id: At4g21550.1
  misc_feature (35)..(88): NCBI GI NO: 15234504 NR Description: VP1 like protein; protein id: At4g21550.1
MCMNASCGTTSTVEWKKGWPLRSGLLADLCYRCGSAYESSLFCEQFHKDQSGWRECYLCSKRLHCGCIASKVTIELMDYGGVGCSTCACCHQLNLNTRGENPGVFSRLPMKTLADRQHVNGESGGRNEGDLFSQPLVMGGDKREEFMPHRGFGKLMSPESTTTGHRLDAAGEMHESSPLQPSLNMGLAVNPFSPSFATEAVEGMKHISPSQSNMVHCSASNILQKPSRPAISTPPVASKSAQARIGRPPVEGRGRGHLLPRYWPKYTDKEVQQISGNLNLNIVPLFEKTLSASDAGRIGRLVLPKACAEAYFPPISQSEGIPLKIQDVRGREWTFQFRYWPNNNSRMYVLEGVTPCIQSMMLQAGDTVTFSRVDPGGKLIMGSRKAANAGDMQGCGLTNGTSTEDTSSSGVTENPPSINGSSCISLIPKELNGMPENLNSETNGGRIGDDPTRVKEKKRTRTIGAKNKRLLLHSEESMELRLTWEEAQDLLRPSPSVKPTIVVIEEQEIEEYDEPPVFGKRTIVTTKPSGEQERWATCDDCSKWRRLPVDALLSFKWTCIDNVWDVSRCSCSAPEESLKELENVLKVGREHKKRRTGESQAAKSQQEPCGLDALASAAVLGDTIGEPEVATTTRHPRHRAGCSCIVCIQPPSGKGRHKPTCGCTVCSTVKRRFKTLMMRRKKKQLERDVTAAEDKKKKDMELAESDKSKEEKEVNTARIDLNSDPYNKEDVEAVAVEKEESRKRAIGQCSGVVAQDASDVLGVTELEGEGKNVREEPRVSS

SEQ ID NO: 1793 - DNA, 1020 bp, Arabidopsis thaliana; identical to SEQ ID NO: 1194
  misc_feature (1)..(1020): Ceres Seq. ID no. 12562601

SEQ ID NO: 1794 - protein, 223 aa, Arabidopsis thaliana; identical to SEQ ID NO: 1195
  peptide (1)..(223): Ceres Seq. ID no. 12562602
  misc_feature (12)..(208): Pfam Name: Pfam Description:  Proteasome A-type and B-type
  misc_feature (1)..(223): NCBI GI NO: 600387 NR Description: proteosome subunit [Arabidopsis thaliana]
  misc_feature (1)..(223): NCBI GI NO: 15232965 NR Description: 20S proteasome beta subunit F1
  misc_feature (1)..(223): NCBI GI NO: 17380185 NR Description: Proteasome subunit beta type 1
  misc_feature (4)..(223): NCBI GI NO: 17380182 NR Description: Proteasome subunit beta type 1
  misc_feature (9)..(200): NCBI GI NO: 14594933 NR Description: putative beta6 proteasome subunit
  misc_feature (5)..(223): NCBI GI NO: 28829610 NR Description: similar to Petunia hybrida (Petunia)
  misc_feature (4)..(223): NCBI GI NO: 17380206 NR Description: Proteasome subunit beta type 1-B
  misc_feature (4)..(223): NCBI GI NO: 17380207 NR Description: Proteasome subunit beta type 1-A
  misc_feature (8)..(223): NCBI GI NO: 27694605 NR Description: Unknown (protein for MGC:52861) [Xenopus laevis]
  misc_feature (8)..(223): NCBI GI NO: 38174388 NR Description: Unknown (protein for MGC:75736)

SEQ ID NO: 1795 - protein, 189 aa, Arabidopsis thaliana; identical to SEQ ID NO: 1196
  peptide (1)..(189): Ceres Seq. ID no. 12562603
  misc_feature (1)..(174): Pfam Name: Pfam Description:  Proteasome A-type and B-type
  misc_feature (1)..(189): NCBI GI NO: 600387 NR Description: proteosome subunit [Arabidopsis thaliana]
  misc_feature (1)..(189): NCBI GI NO: 15232965 NR Description: 20S proteasome beta subunit F1
  misc_feature (1)..(189): NCBI GI NO: 17380185 NR Description: Proteasome subunit beta type 1
  misc_feature (1)..(189): NCBI GI NO: 17380182 NR Description: Proteasome subunit beta type 1
  misc_feature (1)..(166): NCBI GI NO: 14594933 NR Description: putative beta6 proteasome subunit
  misc_feature (1)..(189): NCBI GI NO: 28829610 NR Description: similar to Petunia hybrida (Petunia)
  misc_feature (1)..(189): NCBI GI NO: 17380206 NR Description: Proteasome subunit beta type 1-B
  misc_feature (1)..(189): NCBI GI NO: 17380207 NR Description: Proteasome subunit beta type 1-A
  misc_feature (1)..(189): NCBI GI NO: 27694605 NR Description: Unknown (protein for MGC:52861) [Xenopus laevis]
  misc_feature (1)..(189): NCBI GI NO: 38174388 NR Description: Unknown (protein for MGC:75736)

SEQ ID NO: 1796 - protein, 135 aa, Arabidopsis thaliana; identical to SEQ ID NO: 1197
  peptide (1)..(135): Ceres Seq. ID no. 12562604
  misc_feature (1)..(120): Pfam Name: Pfam Description:  Proteasome A-type and B-type
  misc_feature (1)..(135): NCBI GI NO: 600387 NR Description: proteosome subunit [Arabidopsis thaliana]
  misc_feature (1)..(135): NCBI GI NO: 15232965 NR Description: 20S proteasome beta subunit F1
  misc_feature (1)..(135): NCBI GI NO: 17380185 NR Description: Proteasome subunit beta type 1
  misc_feature (1)..(135): NCBI GI NO: 17380182 NR Description: Proteasome subunit beta type 1
  misc_feature (1)..(112): NCBI GI NO: 14594933 NR Description: putative beta6 proteasome subunit
  misc_feature (1)..(135): NCBI GI NO: 28829610 NR Description: similar to Petunia hybrida (Petunia)
  misc_feature (1)..(135): NCBI GI NO: 17380206 NR Description: Proteasome subunit beta type 1-B
  misc_feature (1)..(135): NCBI GI NO: 17380207 NR Description: Proteasome subunit beta type 1-A
  misc_feature (1)..(135): NCBI GI NO: 27694605 NR Description: Unknown (protein for MGC:52861) [Xenopus laevis]
  misc_feature (1)..(135): NCBI GI NO: 38174388 NR Description: Unknown (protein for MGC:75736)

SEQ ID NO: 1797 - DNA, 779 bp, Arabidopsis thaliana
  misc_feature (1)..(779): Ceres Seq. ID no. 12580269
aagaaattcgatttcgatgcgtataatctgtcttccgctttttttttttggttttgaaatcgacaaccttttttttgcttgttgggttaaattcgtatatcatcaattttgcgatgagttttcacttttccaatcgaaatagcaaatgggcattagctaatttcctgaattgtgagtttttgtgttacgctgtgtccttgattcatataagctattgcaaagaggataaatgataaagccttcagctttacaacataattcacttttactcactagagtttagaaattcaccttctttctctgtttcaggagttacaagacatcacaatgttttcgatatgtgttatttaaagttcattgtggatctcaggtttgacaagattggataaaagcagccatggcaagtctgataatgactacaccattctcaggttctgtcactacatgtaagaagacaaataacctgtctgttcagagagcctttaaggtgacttgtatgcagacagagaaaccattagaggagctatacaatgttaaagtggaacggaaagtttcacagaaacggttggaggaacttggggtttcgagatggtcagtttggaagacagggaaatgcaaattgccatgggattggcaggtggatcagttggtttacattgaacaaggagaggttcgagttgttcccgaaggaagcaagaggtatatgcagtttttagctggagatcttgttcggtatccgtacttcctctggttatatcttatataatgactttgattcc

SEQ ID NO: 1798 - protein, 122 aa, Arabidopsis thaliana
  peptide (1)..(122): Ceres Seq. ID no. 12580270
  misc_feature (54)..(117): Pfam Name: DUF861 Pfam Description: Protein of unknown function
  misc_feature (1)..(117): NCBI GI NO: 21592432 NR Description: unknown [Arabidopsis thaliana]
  misc_feature (1)..(117): NCBI GI NO: 15225202 NR Description: hypothetical protein; protein id: At2g32180.1
  misc_feature (1)..(117): NCBI GI NO: 18403036 NR Description: expressed protein; protein id: At2g32650
  misc_feature (6)..(57): NCBI GI NO: 26451964 NR Description: unknown protein [Arabidopsis thaliana]
  misc_feature (23)..(114): NCBI GI NO: 38344542 NR Description: OSJNBa0027P08.10
  misc_feature (24)..(114): NCBI GI NO: 21553516 NR Description: unknown [Arabidopsis thaliana]
  misc_feature (46)..(114): NCBI GI NO: 23127631 NR Description: hypothetical protein [Nostoc punctiforme]
  misc_feature (42)..(114): NCBI GI NO: 15235021 NR Description: putative protein; protein id: At4g10300
  misc_feature (20)..(114): NCBI GI NO: 15234988 NR Description: putative protein; protein id: At4g10280
  misc_feature (46)..(114): NCBI GI NO: 17229206 NR Description: hypothetical protein [Nostoc sp. PCC 7120]
MASLIMTTPFSGSVTTCKKTNNLSVQRAFKVTCMQTEKPLEELYNVKVERKVSQKRLEELGVSRWSVWKTGKCKLPWDWQVDQLVYIEQGEVRVVPEGSKRYMQFLAGDLVRYPYFLWLYLI

SEQ ID NO: 1799 - protein, 117 aa, Arabidopsis thaliana
  peptide (1)..(117): Ceres Seq. ID no. 12580271
  misc_feature (49)..(112): Pfam Name: DUF861 Pfam Description: Protein of unknown function
  misc_feature (1)..(112): NCBI GI NO: 21592432 NR Description: unknown [Arabidopsis thaliana]
  misc_feature (1)..(112): NCBI GI NO: 15225202 NR Description: hypothetical protein; protein id: At2g32180.1
  misc_feature (1)..(112): NCBI GI NO: 18403036 NR Description: expressed protein; protein id: At2g32650
  misc_feature (1)..(52): NCBI GI NO: 26451964 NR Description: unknown protein [Arabidopsis thaliana]
  misc_feature (18)..(109): NCBI GI NO: 38344542 NR Description: OSJNBa0027P08.10
  misc_feature (19)..(109): NCBI GI NO: 21553516 NR Description: unknown [Arabidopsis thaliana]
  misc_feature (41)..(109): NCBI GI NO: 23127631 NR Description: hypothetical protein [Nostoc punctiforme]
  misc_feature (37)..(109): NCBI GI NO: 15235021 NR Description: putative protein; protein id: At4g10300
  misc_feature (15)..(109): NCBI GI NO: 15234988 NR Description: putative protein; protein id: At4g10280
  misc_feature (41)..(109): NCBI GI NO: 17229206 NR Description: hypothetical protein [Nostoc sp. PCC 7120]
MTTPFSGSVTTCKKTNNLSVQRAFKVTCMQTEKPLEELYNVKVERKVSQKRLEELGVSRWSVWKTGKCKLPWDWQVDQLVYIEQGEVRVVPEGSKRYMQFLAGDLVRYPYFLWLYLI

SEQ ID NO: 1800 - protein, 89 aa, Arabidopsis thaliana
  peptide (1)..(89): Ceres Seq. ID no. 12580272
  misc_feature (21)..(84): Pfam Name: DUF861 Pfam Description: Protein of unknown function
  misc_feature (1)..(84): NCBI GI NO: 21592432 NR Description: unknown [Arabidopsis thaliana]
  misc_feature (1)..(84): NCBI GI NO: 15225202 NR Description: hypothetical protein; protein id: At2g32180.1
  misc_feature (1)..(84): NCBI GI NO: 18403036 NR Description: expressed protein; protein id: At2g32650
  misc_feature (1)..(24): NCBI GI NO: 26451964 NR Description: unknown protein [Arabidopsis thaliana]
  misc_feature (1)..(81): NCBI GI NO: 38344542 NR Description: OSJNBa0027P08.10
  misc_feature (1)..(81): NCBI GI NO: 21553516 NR Description: unknown [Arabidopsis thaliana]
  misc_feature (13)..(81): NCBI GI NO: 23127631 NR Description: hypothetical protein [Nostoc punctiforme]
  misc_feature (9)..(81): NCBI GI NO: 15235021 NR Description: putative protein; protein id: At4g10300
  misc_feature (1)..(81): NCBI GI NO: 15234988 NR Description: putative protein; protein id: At4g10280
  misc_feature (13)..(81): NCBI GI NO: 17229206 NR Description: hypothetical protein [Nostoc sp. PCC 7120]
MQTEKPLEELYNVKVERKVSQKRLEELGVSRWSVWKTGKCKLPWDWQVDQLVYIEQGEVRVVPEGSKRYMQFLAGDLVRYPYFLWLYLI

SEQ ID NO: 1801 - DNA, 1499 bp, Arabidopsis thaliana
  misc_feature (1)..(1499): Ceres Seq. ID no. 12340515
attagaagttcagaaatactgtttataaatacaaatccagagtcagagatccattcgatagcactttcctctctttctctcatcgtaaaaccgttcttcgttttttctatttctctcgtctctttcttctacccagatcactgatcaaccgtgaattttactctactctttcatcaattttactgtgtttaattcataaaacaaaacaaacgatcgatttttgtttttttttggggatgaagatcagaagcaaaagcaaaggctatcgtcaagagatcaaatcaacttgcaccgactccaacactctgttctcaaaagatgtggttgcaacttcggagcttttttcatctgtgatatcgtagcgtgtgaaagacggataattctacagagacaatgcatcatcccattcggtcagaagaaaataaagtcaaacaaaaatggcggagaaaaagagagtcaagtacttcattgttgatgcattcgctgaatctgccttcaaagggaatccagctgctgtttgctttctagaagacgataacgagagagacgacgcgtggcttcagtctcttgccaccgagttcaatatctccgagacttgtttcctcactccgatcatcggagacttgcctcgcttccgtctccgttggttcactccagtcgctgaggtttccgtgttttcttttggttttggaattcggaattgttcggttgacttgttatcattgacttgatagatcctgataactagaacttgtactcattcactggctcttgtgaatctctctttgctttgctgttattgtgcaggtggatttgtgtggtcatgcaactttagcatctgctcacgttctcttctcaactggtttggttggttcagagacagttgagttcgacacattatcagggattctaacagctaaacatctcaaaaatgatgatgatggagaagaatcaagtatcgaattggatttccctgttgttccaacatatgaagtcaactacattgatgatgatctctctttgttctccaaagccttgaatggagctaccattcttgatgtcaaagccacaaagaaagacctcctcgttgtgctttcatcttgggaagctgttattgatttgaagccaagattagatgagatatcgaaatgcccttgtgaaggaatgatggtgactgccgctgcttctgatggatctacttatgatttctgtagtcgctactttgccccgagattcggaatcaatgaggaccctgttactggaagtgctcattgtgctttagctcattactggagcctcaggatgaacaagtgtgatttcttcgcctaccaggcttcaagcagaggaggaacgttgaaggtgcacctggacaaagagaagcagagggttctactgagaggcaaagcagtcactgttatggaaggttatgtcttagtgtgattttggctatgatgaaaattcaggctcttgtaaacgatgaaattaataaaagattccat

SEQ ID NO: 1802 - protein, 97 aa, Arabidopsis thaliana
  peptide (1)..(97): Ceres Seq. ID no. 12340516
  misc_feature (1)..(79): NCBI GI NO: 15218739 NR Description: unknown protein; protein id: At1g03210
  misc_feature (1)..(79): NCBI GI NO: 15236203 NR Description: putative protein; protein id: At4g02860
  misc_feature (1)..(79): NCBI GI NO: 20466358 NR Description: putative protein [Arabidopsis thaliana]
  misc_feature (1)..(79): NCBI GI NO: 15236201 NR Description: putative protein; protein id: At4g02850.1
  misc_feature (4)..(79): NCBI GI NO: 34903112 NR Description: unnamed protein product
  misc_feature (12)..(79): NCBI GI NO: 32477020 NR Description: conserved hypothetical protein-putative phenazinebiosynthesis protein PhzF
  misc_feature (10)..(79): NCBI GI NO: 15612846 NR Description: BH0283~unknown conserved protein
  misc_feature (12)..(79): NCBI GI NO: 23028680 NR Description: hypothetical protein
  misc_feature (8)..(79): NCBI GI NO: 23017885 NR Description: hypothetical protein [Thermobifida fusca]
  misc_feature (4)..(83): NCBI GI NO: 27367280 NR Description: Predicted epimerase [Vibrio vulnificus CMCP6]
MAEKKRVKYFIVDAFAESAFKGNPAAVCFLEDDNERDDAWLQSLATEFNISETCFLTPIIGDLPRFRLRWFTPVAEVSVFSFGFGIRNCSVDLLSLT

SEQ ID NO: 1803 - protein, 91 aa, Arabidopsis thaliana
  peptide (1)..(91): Ceres Seq. ID no. 12340517
  misc_feature (1)..(91): NCBI GI NO: 15218739 NR Description: unknown protein; protein id: At1g03210
  misc_feature (1)..(91): NCBI GI NO: 15236203 NR Description: putative protein; protein id: At4g02860
  misc_feature (1)..(91): NCBI GI NO: 20466358 NR Description: putative protein [Arabidopsis thaliana]
  misc_feature (1)..(91): NCBI GI NO: 15236201 NR Description: putative protein; protein id: At4g02850.1
  misc_feature (1)..(90): NCBI GI NO: 34903112 NR Description: unnamed protein product
  misc_feature (1)..(90): NCBI GI NO: 32477020 NR Description: conserved hypothetical protein-putative phenazinebiosynthesis protein PhzF
  misc_feature (1)..(91): NCBI GI NO: 15612846 NR Description: BH0283~unknown conserved protein
  misc_feature (1)..(87): NCBI GI NO: 23028680 NR Description: hypothetical protein
  misc_feature (1)..(87): NCBI GI NO: 23017885 NR Description: hypothetical protein [Thermobifida fusca]
  misc_feature (1)..(91): NCBI GI NO: 27367280 NR Description: Predicted epimerase [Vibrio vulnificus CMCP6]
MMVTAAASDGSTYDFCSRYFAPRFGINEDPVTGSAHCALAHYWSLRMNKCDFFAYQASSRGGTLKVHLDKEKQRVLLRGKAVTVMEGYVLV

SEQ ID NO: 1804 - protein, 90 aa, Arabidopsis thaliana
  peptide (1)..(90): Ceres Seq. ID no. 12340518
  misc_feature (1)..(90): NCBI GI NO: 15218739 NR Description: unknown protein; protein id: At1g03210
  misc_feature (1)..(90): NCBI GI NO: 15236203 NR Description: putative protein; protein id: At4g02860
  misc_feature (1)..(90): NCBI GI NO: 20466358 NR Description: putative protein [Arabidopsis thaliana]
  misc_feature (1)..(90): NCBI GI NO: 15236201 NR Description: putative protein; protein id: At4g02850.1
  misc_feature (1)..(89): NCBI GI NO: 34903112 NR Description: unnamed protein product
  misc_feature (1)..(89): NCBI GI NO: 32477020 NR Description: conserved hypothetical protein-putative phenazinebiosynthesis protein PhzF
  misc_feature (1)..(90): NCBI GI NO: 15612846 NR Description: BH0283~unknown conserved protein
  misc_feature (1)..(86): NCBI GI NO: 23028680 NR Description: hypothetical protein
  misc_feature (1)..(86): NCBI GI NO: 23017885 NR Description: hypothetical protein [Thermobifida fusca]
  misc_feature (1)..(90): NCBI GI NO: 27367280 NR Description: Predicted epimerase [Vibrio vulnificus CMCP6]
MVTAAASDGSTYDFCSRYFAPRFGINEDPVTGSAHCALAHYWSLRMNKCDFFAYQASSRGGTLKVHLDKEKQRVLLRGKAVTVMEGYVLV

SEQ ID NO: 1805 - DNA, 1259 bp, Arabidopsis thaliana
  misc_feature (1)..(1259): Ceres Seq. ID no. 13489103
ttgagaagaagaagacgaagcagaggaatctagggtttatgctacattgaagcaaagatggttacgagcagcgatcaaatccaaaatggttctgaagagcaatcaaaaagatcagagatttacacatacgaagcaccatggcagatctacgcaatgaactggagcattcgtcgagacaagaagtatcggctcgcaatcacaagcctcatcgagcaatatccgaatcgcgtcgaaattgttcagcttgatgaatcaaatggtgagattcgttcagatccaaatctctgcttcgaacatccttacccaccaacgaaaaccagtttcatacccgataaagaatgtcaaagacccgatcttttagctacttctagtgatttccttcgtttatggcgaatctctgatgatgaatctcgtgttgagcttaagtcttgtcttagtagtgataagaatagtgagtttagtggtccaatcacttcatttgattggaatgaagctgagcctagacgaattggtacttctagtattgataccacttgtactatttgggatatagagcgtgaagttgttgatacccagcttattgctcatgataaagaggtttatgacattgcttggggtggtgttggtgtctttgcctctgtctcagaggatggttccgttagagtgtttgatctccgtgataaggagcattcgacgattatctacgagagtggtgagcctagtactcctttggtgcgacttagttggaacaagcaggatccgaggtatatggctactgttatcatgggcagtgctaaaattgttgtgttggatattcggtttccggctcttcctgtcgtggagcttcagcgacatcaggctagtgtcaatgctatagcttgggctcctcatagctcttcccatatctgctccgctggagatgattctcaggcgttgatttgggatatatcttccatgggacagcatgttgaaggtggtctggatccgattctagcttacacagccggcgctgaggttgagcagcttcagtggtcatcttctcagcctgattgggttgccattgccttctctaacaagctgcagattctccgggtctgattatgttttacagatttctgttggatacttggatgtaaaaactcgttgctattgttgattaatgatcttttgatctctgactctaagcctcattgagtttcctttcatagtatggtctgtgtaggaactatgtaccttcaaaattgtgaataactagcttt

SEQ ID NO: 1806 - protein, 346 aa, Arabidopsis thaliana
  peptide (1)..(346): Ceres Seq. ID no. 13489104
  misc_feature (1)..(346): NCBI GI NO: 15231593 NR Description: transducin / WD-40 repeat protein family
  misc_feature (1)..(346): NCBI GI NO: 28393624 NR Description: putative transcriptional regulator protein
  misc_feature (1)..(346): NCBI GI NO: 15222113 NR Description: flower pigmentation protein ATAN11
  misc_feature (1)..(346): NCBI GI NO: 2290528 NR Description: ATAN11 [Arabidopsis thaliana]
  misc_feature (1)..(346): NCBI GI NO: 21593264 NR Description: flower pigmentation protein ATAN11
  misc_feature (1)..(346): NCBI GI NO: 22324803 NR Description: WD-repeat protein GhTTG2 [Gossypium hirsutum]
  misc_feature (1)..(346): NCBI GI NO: 22324809 NR Description: WD-repeat protein GhTTG4 [Gossypium hirsutum]
  misc_feature (33)..(346): NCBI GI NO: 13346196 NR Description: WD1521 [Gossypium hirsutum]
  misc_feature (217)..(346): NCBI GI NO: 37719680 NR Description: WD40 repeat protein [Zea mays]
  misc_feature (11)..(116): NCBI GI NO: 37719680 NR Description: WD40 repeat protein [Zea mays]
MVTSSDQIQNGSEEQSKRSEIYTYEAPWQIYAMNWSIRRDKKYRLAITSLIEQYPNRVEIVQLDESNGEIRSDPNLCFEHPYPPTKTSFIPDKECQRPDLLATSSDFLRLWRISDDESRVELKSCLSSDKNSEFSGPITSFDWNEAEPRRIGTSSIDTTCTIWDIEREVVDTQLIAHDKEVYDIAWGGVGVFASVSEDGSVRVFDLRDKEHSTIIYESGEPSTPLVRLSWNKQDPRYMATVIMGSAKIVVLDIRFPALPVVELQRHQASVNAIAWAPHSSSHICSAGDDSQALIWDISSMGQHVEGGLDPILAYTAGAEVEQLQWSSSQPDWVAIAFSNKLQILRV

SEQ ID NO: 1807 - protein, 314 aa, Arabidopsis thaliana
  peptide (1)..(314): Ceres Seq. ID no. 13489105
  misc_feature (1)..(314): NCBI GI NO: 15231593 NR Description: transducin / WD-40 repeat protein family
  misc_feature (1)..(314): NCBI GI NO: 28393624 NR Description: putative transcriptional regulator protein
  misc_feature (1)..(314): NCBI GI NO: 15222113 NR Description: flower pigmentation protein ATAN11
  misc_feature (1)..(314): NCBI GI NO: 2290528 NR Description: ATAN11 [Arabidopsis thaliana]
  misc_feature (1)..(314): NCBI GI NO: 21593264 NR Description: flower pigmentation protein ATAN11
  misc_feature (1)..(314): NCBI GI NO: 22324803 NR Description: WD-repeat protein GhTTG2 [Gossypium hirsutum]
  misc_feature (1)..(314): NCBI GI NO: 22324809 NR Description: WD-repeat protein GhTTG4 [Gossypium hirsutum]
  misc_feature (1)..(314): NCBI GI NO: 13346196 NR Description: WD1521 [Gossypium hirsutum]
  misc_feature (185)..(314): NCBI GI NO: 37719680 NR Description: WD40 repeat protein [Zea mays]
  misc_feature (1)..(84): NCBI GI NO: 37719680 NR Description: WD40 repeat protein [Zea mays]
MNWSIRRDKKYRLAITSLIEQYPNRVEIVQLDESNGEIRSDPNLCFEHPYPPTKTSFIPDKECQRPDLLATSSDFLRLWRISDDESRVELKSCLSSDKNSEFSGPITSFDWNEAEPRRIGTSSIDTTCTIWDIEREVVDTQLIAHDKEVYDIAWGGVGVFASVSEDGSVRVFDLRDKEHSTIIYESGEPSTPLVRLSWNKQDPRYMATVIMGSAKIVVLDIRFPALPVVELQRHQASVNAIAWAPHSSSHICSAGDDSQALIWDISSMGQHVEGGLDPILAYTAGAEVEQLQWSSSQPDWVAIAFSNKLQILRV

SEQ ID NO: 1808 - DNA, 1386 bp, Arabidopsis thaliana
  misc_feature (1)..(1386): Ceres Seq. ID no. 12337134
actggtggtaatatcgctggcgtttcgcaagtatcaccgggaattgcaaagaagcagaggaccatgtacggagacgctacaaactggaatgaagatgagtatagagaatcaattttgaaggagcgagagatagagacacgcaccgtcttcagaaccgcctgggctcctccggcgagaatctctaatccagacgcatttgttgtagcctccagcgatggaactttagctttccattcactgaactcgcttgtgtctcaatcggcgagttttggctactcgaaaggtcaagatgttatggtggctgaacctgagagagtggttagggcacacgaaggtcctgcttatgatgttaagttctatggtgaagacgaagatgctttgctacttagttgtggtgatgatggtagagttaggggatggaaatggagagaatttgctgaatcagatgtgtctcttcatttgaaagagaatcatctgaagccattgcttgaactgattaatccacaacacaaaggtccttggggtgcgctttcaccgatgcctgagatcaatgccatgtctgttgatcctcagtcaggaagtgtatttacagcagctggtgattcttgcgcatattgttgggacgtggagagtggtaagattaaaatgacctttaaaggtcattcagactatttgcatactgtagtttctcgtagttctgcaagtcagatattgacgggttcagaggatgggactgcgagaatctgggattgcaaaacgggaaaatgtgttaaagtaattggttcccaggataaaaagtcccgccttcgcgttagttctatggcccttgatgggagtgaaagctggttggtttgtggacagggcaaaaatttagctttatggaatcttcccgcctcagaatgcgtacaaacaatacccatccctgcacatgtacaggatgtgatgtttgatgaaaagcaaattttgactgtaggagcagaaccacttctaagacgtttcgacttaaatggagctttgctttctcaaattcactgtgctccttgttcagtattttccatttccttgcatccagcaggagtagttgctgtgggaggttatggaggtattgttgatgtcatctctcaatttggaagccatctctgcacatttcgtagcagttcattgtaaaactccttacagtttcttgatttggctcgataccctaaagaggtaccgaaatgtgtcagtcagattattgcagaggttaagaaaccttttctttgtttttcttaggatcttgctcctgactaaagaccaattagttgtttggttaagtgtaattggtttgtggttccgtagttgctatcaaatttgaaccattaaaatgacattggaccggtttagtct

SEQ ID NO: 1809 - protein, 388 aa, Arabidopsis thaliana
  peptide (1)..(388): Ceres Seq. ID no. 12337135
  misc_feature (22)..(388): NCBI GI NO: 30680669 NR Description: transducin / WD-40 repeat protein family
  misc_feature (22)..(325): NCBI GI NO: 7486245 NR Description: probable WD-40 repeat protein
  misc_feature (114)..(377): NCBI GI NO: 13111899 NR Description: MGC2655 protein [Homo sapiens]
  misc_feature (114)..(377): NCBI GI NO: 31543164 NR Description: hypothetical protein MGC2655 [Homo sapiens]
  misc_feature (114)..(323): NCBI GI NO: 22761350 NR Description: unnamed protein product [Homo sapiens]
  misc_feature (111)..(376): NCBI GI NO: 21358289 NR Description: CG5632-PA [Drosophila melanogaster]
  misc_feature (60)..(376): NCBI GI NO: 31212983 NR Description: ENSANGP00000014160 [Anopheles gambiae]
  misc_feature (182)..(334): NCBI GI NO: 7023854 NR Description: unnamed protein product [Homo sapiens]
  misc_feature (182)..(334): NCBI GI NO: 23199987 NR Description: WD repeat domain 5B [Homo sapiens]
  misc_feature (197)..(365): NCBI GI NO: 17227525 NR Description: WD-40 repeat protein [Nostoc sp. PCC 7120]
TGGNIAGVSQVSPGIAKKQRTMYGDATNWNEDEYRESILKEREIETRTVFRTAWAPPARISNPDAFVVASSDGTLAFHSLNSLVSQSASFGYSKGQDVMVAEPERVVRAHEGPAYDVKFYGEDEDALLLSCGDDGRVRGWKWREFAESDVSLHLKENHLKPLLELINPQHKGPWGALSPMPEINAMSVDPQSGSVFTAAGDSCAYCWDVESGKIKMTFKGHSDYLHTVVSRSSASQILTGSEDGTARIWDCKTGKCVKVIGSQDKKSRLRVSSMALDGSESWLVCGQGKNLALWNLPASECVQTIPIPAHVQDVMFDEKQILTVGAEPLLRRFDLNGALLSQIHCAPCSVFSISLHPAGVVAVGGYGGIVDVISQFGSHLCTFRSSSL

SEQ ID NO: 1810 - protein, 367 aa, Arabidopsis thaliana
  peptide (1)..(367): Ceres Seq. ID no. 12337136
  misc_feature (1)..(367): NCBI GI NO: 30680669 NR Description: transducin / WD-40 repeat protein family
  misc_feature (1)..(304): NCBI GI NO: 7486245 NR Description: probable WD-40 repeat protein
  misc_feature (93)..(356): NCBI GI NO: 13111899 NR Description: MGC2655 protein [Homo sapiens]
  misc_feature (93)..(356): NCBI GI NO: 31543164 NR Description: hypothetical protein MGC2655 [Homo sapiens]
  misc_feature (93)..(302): NCBI GI NO: 22761350 NR Description: unnamed protein product [Homo sapiens]
  misc_feature (90)..(355): NCBI GI NO: 21358289 NR Description: CG5632-PA [Drosophila melanogaster]
  misc_feature (39)..(355): NCBI GI NO: 31212983 NR Description: ENSANGP00000014160 [Anopheles gambiae]
  misc_feature (161)..(313): NCBI GI NO: 7023854 NR Description: unnamed protein product [Homo sapiens]
  misc_feature (161)..(313): NCBI GI NO: 23199987 NR Description: WD repeat domain 5B [Homo sapiens]
  misc_feature (176)..(344): NCBI GI NO: 17227525 NR Description: WD-40 repeat protein [Nostoc sp. PCC 7120]
MYGDATNWNEDEYRESILKEREIETRTVFRTAWAPPARISNPDAFVVASSDGTLAFHSLNSLVSQSASFGYSKGQDVMVAEPERVVRAHEGPAYDVKFYGEDEDALLLSCGDDGRVRGWKWREFAESDVSLHLKENHLKPLLELINPQHKGPWGALSPMPEINAMSVDPQSGSVFTAAGDSCAYCWDVESGKIKMTFKGHSDYLHTVVSRSSASQILTGSEDGTARIWDCKTGKCVKVIGSQDKKSRLRVSSMALDGSESWLVCGQGKNLALWNLPASECVQTIPIPAHVQDVMFDEKQILTVGAEPLLRRFDLNGALLSQIHCAPCSVFSISLHPAGVVAVGGYGGIVDVISQFGSHLCTFRSSSL

SEQ ID NO: 1811 - protein, 290 aa, Arabidopsis thaliana
  peptide (1)..(290): Ceres Seq. ID no. 12337137
  misc_feature (1)..(290): NCBI GI NO: 30680669 NR Description: transducin / WD-40 repeat protein family
  misc_feature (1)..(227): NCBI GI NO: 7486245 NR Description: probable WD-40 repeat protein
  misc_feature (16)..(279): NCBI GI NO: 13111899 NR Description: MGC2655 protein [Homo sapiens]
  misc_feature (16)..(279): NCBI GI NO: 31543164 NR Description: hypothetical protein MGC2655 [Homo sapiens]
  misc_feature (16)..(225): NCBI GI NO: 22761350 NR Description: unnamed protein product [Homo sapiens]
  misc_feature (13)..(278): NCBI GI NO: 21358289 NR Description: CG5632-PA [Drosophila melanogaster]
  misc_feature (1)..(278): NCBI GI NO: 31212983 NR Description: ENSANGP00000014160 [Anopheles gambiae]
  misc_feature (84)..(236): NCBI GI NO: 7023854 NR Description: unnamed protein product [Homo sapiens]
  misc_feature (84)..(236): NCBI GI NO: 23199987 NR Description: WD repeat domain 5B [Homo sapiens]
  misc_feature (99)..(267): NCBI GI NO: 17227525 NR Description: WD-40 repeat protein [Nostoc sp. PCC 7120]
MVAEPERVVRAHEGPAYDVKFYGEDEDALLLSCGDDGRVRGWKWREFAESDVSLHLKENHLKPLLELINPQHKGPWGALSPMPEINAMSVDPQSGSVFTAAGDSCAYCWDVESGKIKMTFKGHSDYLHTVVSRSSASQILTGSEDGTARIWDCKTGKCVKVIGSQDKKSRLRVSSMALDGSESWLVCGQGKNLALWNLPASECVQTIPIPAHVQDVMFDEKQILTVGAEPLLRRFDLNGALLSQIHCAPCSVFSISLHPAGVVAVGGYGGIVDVISQFGSHLCTFRSSSL

SEQ ID NO: 1812 - DNA, 1592 bp, Arabidopsis thaliana
  misc_feature (1)..(1592): Ceres Seq. ID no. 12489485
aatttatagatttgcttgggatcaattagctcgcatgtggattttcatatatatacaataccatatgaagccaaatatattataaagaaagaaatcttttttagattttgagctctggaatggagaaaagtatcaatggatcatgcagactcatcaagagactcgtgattatactttcttgtctttcatattcctttgttcgatcagactttacagagagaacaaatatcaattatgtatcagctgtgggagatcccgggatgagaaacgataacttaagggtggctatagaagcttggaaccaatgcaacgaggtcggtgaagaagctacaaacatgggaagccctcgaatggcagattgcttcgatatcgataactctagctttcccgtgaagataatccacaaagtcgacgaaagagacaacaggcttggggtaggaaatggaacctacggaggaataagcgctggagacaacgcagatatctacgcagcgcaaaaggaggtatacttaggaaacaaatgtcaagttgtggacaagccaaatccatggcagttttggatgataatgctaaagaacggtaatacggatactttagccgcaatttgtcccgaaaacgggaaaaaggcgaaaccatttcctcctacggggaggtttccatgttttgggaaaggatgtatgaacatgccatcgatgcatcatgagtacacaagcttggttgataacgaagaaggacatatgagtgggagtttttatgggacttgggacttggataacgaccaaaaagatccggttggtaataattcgtattataaggtgaaatgggagaagaagattgggggaaatgagagttgggtttttcatcatttgttgaagacttcttctaagtatccatggttgatgctttatctacgcgctgatgcttctcgaggtttctctggtggttatcattacgacactagagggatgatgaagatgctagagattattaaaggaggcggttcagggagccaattttacctaatggacatgggaagttgctggaaaaacgacggaagagactgcgacggcgacgtcacaaccgacgttacaaggtacagcgaaatgataatcaacccgggggcaaccgccgtttgcacccgcaaccgcctaggcgcttgtccgccagagcatacttttccaaacgggactaaagttcacaggacggacaaggagaagttccctttcgaagcgtatcactattactgcgttccgggaaacgcgcgttttgcggaatctccgtacgaggtttgtgatccgtacagtaatccacaaccgcaggagattctgcagatcttgcctcatccagtgtgggaacagtttgggtatccgacaaagaaaggacaaggttggattggagatccaagaacttgggaacttgatgtcggaaaactctctcagtcactcttcttttaccaggatccagggacgaaaccggtggagagacattggtcgtcgatagatttaggaactgaaatatatatgagtaagaatcaaattgctgaatggactgtaactgatttcgacattgttataccaaatgccgatatttaa

SEQ ID NO: 1813 - protein, 490 aa, Arabidopsis thaliana
  peptide (1)..(490): Ceres Seq. ID no. 12489486
  misc_feature (1)..(490): NCBI GI NO: 30685122 NR Description: expressed protein [Arabidopsis thaliana]
  misc_feature (48)..(490): NCBI GI NO: 25335639 NR Description: F20D23.27 protein - Arabidopsis thaliana
  misc_feature (93)..(485): NCBI GI NO: 16612271 NR Description: At2g47010/F14M4.16 [Arabidopsis thaliana]
  misc_feature (93)..(444): NCBI GI NO: 18407231 NR Description: expressed protein; protein id: At2g47010
  misc_feature (93)..(436): NCBI GI NO: 7459476 NR Description: hypothetical protein At2g47010
  misc_feature (41)..(287): NCBI GI NO: 7459476 NR Description: hypothetical protein At2g47010
  misc_feature (387)..(485): NCBI GI NO: 7459476 NR Description: hypothetical protein At2g47010
  misc_feature (41)..(287): NCBI GI NO: 16612271 NR Description: At2g47010/F14M4.16 [Arabidopsis thaliana]
  misc_feature (41)..(287): NCBI GI NO: 18407231 NR Description: expressed protein; protein id: At2g47010
  misc_feature (419)..(485): NCBI GI NO: 22328547 NR Description: hypothetical protein; protein id: At4g09965.1
MEKSINGSCRLIKRLVIILSCLSYSFVRSDFTERTNINYVSAVGDPGMRNDNLRVAIEAWNQCNEVGEEATNMGSPRMADCFDIDNSSFPVKIIHKVDERDNRLGVGNGTYGGISAGDNADIYAAQKEVYLGNKCQVVDKPNPWQFWMIMLKNGNTDTLAAICPENGKKAKPFPPTGRFPCFGKGCMNMPSMHHEYTSLVDNEEGHMSGSFYGTWDLDNDQKDPVGNNSYYKVKWEKKIGGNESWVFHHLLKTSSKYPWLMLYLRADASRGFSGGYHYDTRGMMKMLEIIKGGGSGSQFYLMDMGSCWKNDGRDCDGDVTTDVTRYSEMIINPGATAVCTRNRLGACPPEHTFPNGTKVHRTDKEKFPFEAYHYYCVPGNARFAESPYEVCDPYSNPQPQEILQILPHPVWEQFGYPTKKGQGWIGDPRTWELDVGKLSQSLFFYQDPGTKPVERHWSSIDLGTEIYMSKNQIAEWTVTDFDIVIPNADI

SEQ ID NO: 1814 - protein, 443 aa, Arabidopsis thaliana
  peptide (1)..(443): Ceres Seq. ID no. 12489487
  misc_feature (1)..(443): NCBI GI NO: 30685122 NR Description: expressed protein [Arabidopsis thaliana]
  misc_feature (1)..(443): NCBI GI NO: 25335639 NR Description: F20D23.27 protein - Arabidopsis thaliana
  misc_feature (46)..(438): NCBI GI NO: 16612271 NR Description: At2g47010/F14M4.16 [Arabidopsis thaliana]
  misc_feature (46)..(397): NCBI GI NO: 18407231 NR Description: expressed protein; protein id: At2g47010
  misc_feature (46)..(389): NCBI GI NO: 7459476 NR Description: hypothetical protein At2g47010
  misc_feature (1)..(240): NCBI GI NO: 7459476 NR Description: hypothetical protein At2g47010
  misc_feature (340)..(438): NCBI GI NO: 7459476 NR Description: hypothetical protein At2g47010
  misc_feature (1)..(240): NCBI GI NO: 16612271 NR Description: At2g47010/F14M4.16 [Arabidopsis thaliana]
  misc_feature (1)..(240): NCBI GI NO: 18407231 NR Description: expressed protein; protein id: At2g47010
  misc_feature (372)..(438): NCBI GI NO: 22328547 NR Description: hypothetical protein; protein id: At4g09965.1
MRNDNLRVAIEAWNQCNEVGEEATNMGSPRMADCFDIDNSSFPVKIIHKVDERDNRLGVGNGTYGGISAGDNADIYAAQKEVYLGNKCQVVDKPNPWQFWMIMLKNGNTDTLAAICPENGKKAKPFPPTGRFPCFGKGCMNMPSMHHEYTSLVDNEEGHMSGSFYGTWDLDNDQKDPVGNNSYYKVKWEKKIGGNESWVFHHLLKTSSKYPWLMLYLRADASRGFSGGYHYDTRGMMKMLEIIKGGGSGSQFYLMDMGSCWKNDGRDCDGDVTTDVTRYSEMIINPGATAVCTRNRLGACPPEHTFPNGTKVHRTDKEKFPFEAYHYYCVPGNARFAESPYEVCDPYSNPQPQEILQILPHPVWEQFGYPTKKGQGWIGDPRTWELDVGKLSQSLFFYQDPGTKPVERHWSSIDLGTEIYMSKNQIAEWTVTDFDIVIPNADI

SEQ ID NO: 1815 - protein, 418 aa, Arabidopsis thaliana
  peptide (1)..(418): Ceres Seq. ID no. 12489488
  misc_feature (1)..(418): NCBI GI NO: 30685122 NR Description: expressed protein [Arabidopsis thaliana]
  misc_feature (1)..(418): NCBI GI NO: 25335639 NR Description: F20D23.27 protein - Arabidopsis thaliana
  misc_feature (21)..(413): NCBI GI NO: 16612271 NR Description: At2g47010/F14M4.16 [Arabidopsis thaliana]
  misc_feature (21)..(372): NCBI GI NO: 18407231 NR Description: expressed protein; protein id: At2g47010
  misc_feature (21)..(364): NCBI GI NO: 7459476 NR Description: hypothetical protein At2g47010
  misc_feature (1)..(215): NCBI GI NO: 7459476 NR Description: hypothetical protein At2g47010
  misc_feature (315)..(413): NCBI GI NO: 7459476 NR Description: hypothetical protein At2g47010
  misc_feature (1)..(215): NCBI GI NO: 16612271 NR Description: At2g47010/F14M4.16 [Arabidopsis thaliana]
  misc_feature (1)..(215): NCBI GI NO: 18407231 NR Description: expressed protein; protein id: At2g47010
  misc_feature (347)..(413): NCBI GI NO: 22328547 NR Description: hypothetical protein; protein id: At4g09965.1
MGSPRMADCFDIDNSSFPVKIIHKVDERDNRLGVGNGTYGGISAGDNADIYAAQKEVYLGNKCQVVDKPNPWQFWMIMLKNGNTDTLAAICPENGKKAKPFPPTGRFPCFGKGCMNMPSMHHEYTSLVDNEEGHMSGSFYGTWDLDNDQKDPVGNNSYYKVKWEKKIGGNESWVFHHLLKTSSKYPWLMLYLRADASRGFSGGYHYDTRGMMKMLEIIKGGGSGSQFYLMDMGSCWKNDGRDCDGDVTTDVTRYSEMIINPGATAVCTRNRLGACPPEHTFPNGTKVHRTDKEKFPFEAYHYYCVPGNARFAESPYEVCDPYSNPQPQEILQILPHPVWEQFGYPTKKGQGWIGDPRTWELDVGKLSQSLFFYQDPGTKPVERHWSSIDLGTEIYMSKNQIAEWTVTDFDIVIPNADI

SEQ ID NO: 1816 - DNA, 1213 bp, Arabidopsis thaliana
  misc_feature (1)..(1213): Ceres Seq. ID no. 12395310
aacaacatctttcacacaacaattcacacaatttctcgtttttttttgtttatcatcaaaagttttaatctaaattacgtatcaaattccgagcaagatgactattcttgttgaacattttgttcctgattcaagagtggatgaaaagaaagtgatagaggagagggataatgaattggtgttggatggaggttttgtggttccaaaatcaaaggaaactgatgcattcgatgctcctgatatgaatttcttgggccattccttcagggattatgagaatgatgaaagcgagagacaacaaggtgttgaggaattttacaggatgcaacacattcaccagacctatgactttgtgaagaagatgaggaaagagtatggaaaacttaacaagatggaaatgagtatatgggaatgttgtgagttattgaacaatgttgttgatgaaagcgatccggatcttgatgagcctcaaattcaacaccttctccaaaccgctgaagccattcgaagggactatcccgacgaagattggctccatctcactgccctaatccatgatcttggcaaggttctccttctgccagaattcggtggtcttccccagtgggctgtcgttggcgatacatttccagttggatgtaccttcgactcagccaatattcaccacaagtatttcaaaggaaaccatgatatcaacaacccaaagtacaacacaaaaaatggagtttacactgaaggatgtggtttagacaatgttctcatgtcatggggtcatgacgactacatgtatttggtggctaagaagaatggcacgacccttcctcacgctggtctcttcattattcgatatcattccttttatccattgcacaaggcaggagcctacacacacttgatgaacgatgaggacagagatgatctcaagtggctccatgtcttcaataaatatgacctatacagtaagagcaaagttctggtagatgtcgaacaagtgaagccttactacatttcactcatcaacaagtattttccggcgaaactaaaatggtgagataaagctacgagtcaattaattaactatcttttatgaggagaacgagatcgaaggttaacgagttttctattgtatacaacggaagataaatctatctaataaaaaagttggtgtgttcatttgtaattttttcccccatcagtttaaaagttatgttgt

SEQ ID NO: 1817 - protein, 317 aa, Arabidopsis thaliana
  peptide (1)..(317): Ceres Seq. ID no. 12395311
  misc_feature (62)..(317): Pfam Name: DUF706 Pfam Description: Family of unknown function
  misc_feature (1)..(317): NCBI GI NO: 21554393 NR Description: unknown [Arabidopsis thaliana]
  misc_feature (1)..(317): NCBI GI NO: 18399158 NR Description: expressed protein; protein id: At2g19800
  misc_feature (76)..(317): NCBI GI NO: 13877657 NR Description: Unknown protein [Arabidopsis thaliana]
  misc_feature (76)..(309): NCBI GI NO: 25411930 NR Description: hypothetical protein At2g19800
  misc_feature (1)..(317): NCBI GI NO: 7487428 NR Description: hypothetical protein T25K17
  misc_feature (1)..(317): NCBI GI NO: 30687167 NR Description: expressed protein [Arabidopsis thaliana]
  misc_feature (22)..(317): NCBI GI NO: 21536858 NR Description: unknown [Arabidopsis thaliana]
  misc_feature (22)..(317): NCBI GI NO: 15241891 NR Description: putative protein; protein id: At5g56640
  misc_feature (1)..(317): NCBI GI NO: 30683840 NR Description: expressed protein [Arabidopsis thaliana]
  misc_feature (1)..(317): NCBI GI NO: 26451656 NR Description: unknown protein [Arabidopsis thaliana]
MTILVEHFVPDSRVDEKKVIEERDNELVLDGGFVVPKSKETDAFDAPDMNFLGHSFRDYENDESERQQGVEEFYRMQHIHQTYDFVKKMRKEYGKLNKMEMSIWECCELLNNVVDESDPDLDEPQIQHLLQTAEAIRRDYPDEDWLHLTALIHDLGKVLLLPEFGGLPQWAVVGDTFPVGCTFDSANIHHKYFKGNHDINNPKYNTKNGVYTEGCGLDNVLMSWGHDDYMYLVAKKNGTTLPHAGLFIIRYHSFYPLHKAGAYTHLMNDEDRDDLKWLHVFNKYDLYSKSKVLVDVEQVKPYYISLINKYFPAKLKW

SEQ ID NO: 1818 - protein, 269 aa, Arabidopsis thaliana
  peptide (1)..(269): Ceres Seq. ID no. 12395312
  misc_feature (14)..(269): Pfam Name: DUF706 Pfam Description: Family of unknown function
  misc_feature (1)..(269): NCBI GI NO: 21554393 NR Description: unknown [Arabidopsis thaliana]
  misc_feature (1)..(269): NCBI GI NO: 18399158 NR Description: expressed protein; protein id: At2g19800
  misc_feature (28)..(269): NCBI GI NO: 13877657 NR Description: Unknown protein [Arabidopsis thaliana]
  misc_feature (28)..(261): NCBI GI NO: 25411930 NR Description: hypothetical protein At2g19800
  misc_feature (1)..(269): NCBI GI NO: 7487428 NR Description: hypothetical protein T25K17
  misc_feature (1)..(269): NCBI GI NO: 30687167 NR Description: expressed protein [Arabidopsis thaliana]
  misc_feature (1)..(269): NCBI GI NO: 21536858 NR Description: unknown [Arabidopsis thaliana]
  misc_feature (1)..(269): NCBI GI NO: 15241891 NR Description: putative protein; protein id: At5g56640
  misc_feature (1)..(269): NCBI GI NO: 30683840 NR Description: expressed protein [Arabidopsis thaliana]
  misc_feature (1)..(269): NCBI GI NO: 26451656 NR Description: unknown protein [Arabidopsis thaliana]
MNFLGHSFRDYENDESERQQGVEEFYRMQHIHQTYDFVKKMRKEYGKLNKMEMSIWECCELLNNVVDESDPDLDEPQIQHLLQTAEAIRRDYPDEDWLHLTALIHDLGKVLLLPEFGGLPQWAVVGDTFPVGCTFDSANIHHKYFKGNHDINNPKYNTKNGVYTEGCGLDNVLMSWGHDDYMYLVAKKNGTTLPHAGLFIIRYHSFYPLHKAGAYTHLMNDEDRDDLKWLHVFNKYDLYSKSKVLVDVEQVKPYYISLINKYFPAKLKW

SEQ ID NO: 1819 - protein, 242 aa, Arabidopsis thaliana
  peptide (1)..(242): Ceres Seq. ID no. 12395313
  misc_feature (1)..(242): Pfam Name: DUF706 Pfam Description: Family of unknown function
  misc_feature (1)..(242): NCBI GI NO: 21554393 NR Description: unknown [Arabidopsis thaliana]
  misc_feature (1)..(242): NCBI GI NO: 18399158 NR Description: expressed protein; protein id: At2g19800
  misc_feature (1)..(242): NCBI GI NO: 13877657 NR Description: Unknown protein [Arabidopsis thaliana]
  misc_feature (1)..(234): NCBI GI NO: 25411930 NR Description: hypothetical protein At2g19800
  misc_feature (1)..(242): NCBI GI NO: 7487428 NR Description: hypothetical protein T25K17
  misc_feature (1)..(242): NCBI GI NO: 30687167 NR Description: expressed protein [Arabidopsis thaliana]
  misc_feature (1)..(242): NCBI GI NO: 21536858 NR Description: unknown [Arabidopsis thaliana]
  misc_feature (1)..(242): NCBI GI NO: 15241891 NR Description: putative protein; protein id: At5g56640
  misc_feature (1)..(242): NCBI GI NO: 30683840 NR Description: expressed protein [Arabidopsis thaliana]
  misc_feature (1)..(242): NCBI GI NO: 26451656 NR Description: unknown protein [Arabidopsis thaliana]
MQHIHQTYDFVKKMRKEYGKLNKMEMSIWECCELLNNVVDESDPDLDEPQIQHLLQTAEAIRRDYPDEDWLHLTALIHDLGKVLLLPEFGGLPQWAVVGDTFPVGCTFDSANIHHKYFKGNHDINNPKYNTKNGVYTEGCGLDNVLMSWGHDDYMYLVAKKNGTTLPHAGLFIIRYHSFYPLHKAGAYTHLMNDEDRDDLKWLHVFNKYDLYSKSKVLVDVEQVKPYYISLINKYFPAKLKW

SEQ ID NO: 1820 - DNA, 1854 bp, Arabidopsis thaliana
  misc_feature (1)..(1854): Ceres Seq. ID no. 13491207
attaccgaagagaaccaatacaaattcaaggagtgatttagattaacgcctaaatgcatcatttgcgattacaaaatcaaattttgctccagatggattttaattacttttcgtcgcttttttactttagagtttagaccttgaaatcgatggaaagcaatcgaacccgaaattctctcatttctcaatcaaaactatcttctttcacttctgggcaagaagctctgttgtggaacatcggaaatcagaactgaaacagaaacagaaaccatggagaagagagaagacgaacaacaaaagcgcgacgattctagattcaatcaaacactcaagaacgtccaagggtttcttaaaggtagaagtattcctggtaaggtattgttgactaggagatcagatcctcctccatacccaatctctccaacatatcaacggagcttatctgagaatgacgccggaagaaatgagctattcgaaagtcctgttgaggtggaggatcacaattcaagcaagaaacatgataatacatatgctggtaagctacgatcaaactctagtgctgaaaggagtgtgaaagaagttcaaaacttgaagataggtgttcgatcaagtgactctgctagagttatgaagttcaacaaagtgctttcagaaacaactgtcatattagagaaactgcgcgagctagcatggaatggtgtaccacactatatgcggcctgatgtctggcggcttctcttgggatatgcaccacctaattcagatagaagggaggctgttctgagaagaaaacgtcttgaatatctggaatctgttggccaattttatgaccttccagattccgaacgttctgatgatgagatcaatatgcttcgccagattgctgttgactgtccgaggactgtaccagatgtcagtttctttcagcaagaacaggtgcagaaatcactggagcgtattctttacacgtgggccattagacatccagcaagcggatatgttcagggaataaatgacctggtcacgcccttcctagtgattttcttgtcagaatatctagatggcggtgtagacagttggtcaatggatgatctatctgctgaaaaagtctcagatgtagaagcggattgctactggtgcttaacaaagctccttgacggtatgcaagatcattacacgtttgctcaacctggaatccagagacttgtgtttaagctgaaggaactggtcaggcgtatcgatgaacctgtttcaagacacatggaagagcatgggctagagtttcttcaatttgctttccggtggtataattgtcttctgattcgtgagatcccattcaatctcatcaatcgactatgggacacttatcttgctgaaggagatgcgttgccagacttcctggtgtatatatatgctagctttctcttgacgtggtctgatgagctgaagaagctagattttcaagaaatggtaatgttcctgcaacaccttccgacacataactggtcagaccaagagctcgaaatggttttgtcaagagcttacatgtggcatagtatgttcaataattccccaaaccatttggctagctgaaatgacttttcctccatggtgcttgctgctgtttttccctttgttatattatcttcttcttcttgttgtctaaatcagctttcgttttgttttgggttatggtaaatgctaacattcttgtcttgttaattgttattagtttatgtatggtttcacttgttgaatctgtcaccagtttgtgtgtttgtaatatttgtagctttcactaatttggctctctcaatatttttttttttttgggaattcatgaaatttggggag

SEQ ID NO: 1821 - protein, 440 aa, Arabidopsis thaliana
  peptide (1)..(440): Ceres Seq. ID no. 13491208
  misc_feature (1)..(440): NCBI GI NO: 18402435 NR Description: expressed protein [Arabidopsis thaliana]
  misc_feature (127)..(440): NCBI GI NO: 25408101 NR Description: hypothetical protein At2g30710
  misc_feature (108)..(438): NCBI GI NO: 16944405 NR Description: related to GTPase activating protein
  misc_feature (51)..(438): NCBI GI NO: 19112106 NR Description: TBC domain protein. [Schizosaccharomyces pombe]
  misc_feature (115)..(437): NCBI GI NO: 40068063 NR Description: chromosome 6 open reading frame 197 [Homo sapiens]
  misc_feature (115)..(437): NCBI GI NO: 25008321 NR Description: TBC1 domain family protein C22orf4-like
  misc_feature (115)..(437): NCBI GI NO: 38348532 NR Description: Unknown (protein for MGC:61359) [Mus musculus]
  misc_feature (115)..(437): NCBI GI NO: 37181052 NR Description: TBC domain-containing protein [Rattus norvegicus]
  misc_feature (115)..(437): NCBI GI NO: 22507409 NR Description: chromosome 22 open reading frame 4
  misc_feature (115)..(437): NCBI GI NO: 37589908 NR Description: Chromosome 22 open reading frame 4 [Homo sapiens]
MEKREDEQQKRDDSRFNQTLKNVQGFLKGRSIPGKVLLTRRSDPPPYPISPTYQRSLSENDAGRNELFESPVEVEDHNSSKKHDNTYAGKLRSNSSAERSVKEVQNLKIGVRSSDSARVMKFNKVLSETTVILEKLRELAWNGVPHYMRPDVWRLLLGYAPPNSDRREAVLRRKRLEYLESVGQFYDLPDSERSDDEINMLRQIAVDCPRTVPDVSFFQQEQVQKSLERILYTWAIRHPASGYVQGINDLVTPFLVIFLSEYLDGGVDSWSMDDLSAEKVSDVEADCYWCLTKLLDGMQDHYTFAQPGIQRLVFKLKELVRRIDEPVSRHMEEHGLEFLQFAFRWYNCLLIREIPFNLINRLWDTYLAEGDALPDFLVYIYASFLLTWSDELKKLDFQEMVMFLQHLPTHNWSDQELEMVLSRAYMWHSMFNNSPNHLAS

SEQ ID NO: 1822 - protein, 321 aa, Arabidopsis thaliana
  peptide (1)..(321): Ceres Seq. ID no. 13491209
  misc_feature (1)..(321): NCBI GI NO: 18402435 NR Description: expressed protein [Arabidopsis thaliana]
  misc_feature (8)..(321): NCBI GI NO: 25408101 NR Description: hypothetical protein At2g30710
  misc_feature (1)..(319): NCBI GI NO: 16944405 NR Description: related to GTPase activating protein
  misc_feature (1)..(319): NCBI GI NO: 19112106 NR Description: TBC domain protein. [Schizosaccharomyces pombe]
  misc_feature (1)..(318): NCBI GI NO: 40068063 NR Description: chromosome 6 open reading frame 197 [Homo sapiens]
  misc_feature (1)..(318): NCBI GI NO: 25008321 NR Description: TBC1 domain family protein C22orf4-like
  misc_feature (1)..(318): NCBI GI NO: 38348532 NR Description: Unknown (protein for MGC:61359) [Mus musculus]
  misc_feature (1)..(318): NCBI GI NO: 37181052 NR Description: TBC domain-containing protein [Rattus norvegicus]
  misc_feature (1)..(318): NCBI GI NO: 22507409 NR Description: chromosome 22 open reading frame 4
  misc_feature (1)..(318): NCBI GI NO: 37589908 NR Description: Chromosome 22 open reading frame 4 [Homo sapiens]
MKFNKVLSETTVILEKLRELAWNGVPHYMRPDVWRLLLGYAPPNSDRREAVLRRKRLEYLESVGQFYDLPDSERSDDEINMLRQIAVDCPRTVPDVSFFQQEQVQKSLERILYTWAIRHPASGYVQGINDLVTPFLVIFLSEYLDGGVDSWSMDDLSAEKVSDVEADCYWCLTKLLDGMQDHYTFAQPGIQRLVFKLKELVRRIDEPVSRHMEEHGLEFLQFAFRWYNCLLIREIPFNLINRLWDTYLAEGDALPDFLVYIYASFLLTWSDELKKLDFQEMVMFLQHLPTHNWSDQELEMVLSRAYMWHSMFNNSPNHLAS

SEQ ID NO: 1823 - protein, 293 aa, Arabidopsis thaliana
  peptide (1)..(293): Ceres Seq. ID no. 13491210
  misc_feature (1)..(293): NCBI GI NO: 18402435 NR Description: expressed protein [Arabidopsis thaliana]
  misc_feature (1)..(293): NCBI GI NO: 25408101 NR Description: hypothetical protein At2g30710
  misc_feature (1)..(291): NCBI GI NO: 16944405 NR Description: related to GTPase activating protein
  misc_feature (1)..(291): NCBI GI NO: 19112106 NR Description: TBC domain protein. [Schizosaccharomyces pombe]
  misc_feature (1)..(290): NCBI GI NO: 40068063 NR Description: chromosome 6 open reading frame 197 [Homo sapiens]
  misc_feature (1)..(290): NCBI GI NO: 25008321 NR Description: TBC1 domain family protein C22orf4-like
  misc_feature (1)..(290): NCBI GI NO: 38348532 NR Description: Unknown (protein for MGC:61359) [Mus musculus]
  misc_feature (1)..(290): NCBI GI NO: 37181052 NR Description: TBC domain-containing protein [Rattus norvegicus]
  misc_feature (1)..(290): NCBI GI NO: 22507409 NR Description: chromosome 22 open reading frame 4
  misc_feature (1)..(290): NCBI GI NO: 37589908 NR Description: Chromosome 22 open reading frame 4 [Homo sapiens]
MRPDVWRLLLGYAPPNSDRREAVLRRKRLEYLESVGQFYDLPDSERSDDEINMLRQIAVDCPRTVPDVSFFQQEQVQKSLERILYTWAIRHPASGYVQGINDLVTPFLVIFLSEYLDGGVDSWSMDDLSAEKVSDVEADCYWCLTKLLDGMQDHYTFAQPGIQRLVFKLKELVRRIDEPVSRHMEEHGLEFLQFAFRWYNCLLIREIPFNLINRLWDTYLAEGDALPDFLVYIYASFLLTWSDELKKLDFQEMVMFLQHLPTHNWSDQELEMVLSRAYMWHSMFNNSPNHLAS

SEQ ID NO: 1824 - DNA, 1203 bp, Arabidopsis thaliana
  misc_feature (1)..(1203): Ceres Seq. ID no. 12421284
agcatgttgattaatcacacagcacaaataagagttagaaaaatgggagtgtacttaggtaagtattgttatataatgataataatgttagtgttggtgttgggaaaagaagtgagaagccagttgttaaaaaatggttattattcaacttcatgtccaaaagctgagtcgatagttagatccactgttgaatctcactttgattctgatcccacaatttcccctggcttgcttaggcttcatttccatgactgttttgttcagggttgtgatggttcggttttaatcaaagggaaatctgcggagcaagctgctctaccaaatcttggtctaagaggtttagaagtgatcgatgatgctaaagcccggcttgaggcggtgtgtccaggagttgtgtcatgtgcagatatacttgcacttgctgctcgtgactctgttgacttgagtgatgggccaagctggcgagtaccaacgggtcgtaaagacgggagaatctcgttggcaactgaagcatcgaatctaccttctccacttgactctgttgctgttcaaaagcaaaagtttcaagataaaggattggatactcatgatctagttactctactaggtgcacatacaattggacaaaccgactgtctcttcttccgttaccgtttatacaacttcacggtgaccggaaactccgatccaaccataagcccatcgtttcttacacagctcaagactctttgtcctcccaatggagacggttcgaaacgtgttgctcttgacattggtagcccctcaaaattcgatgaaagtttcttcaagaacttacgcgacggaaacgctattctagagtcggaccaacggctttggtcggacgccgagacaaatgccgtggtgaagaagtatgcgagtcgtcttagaggtttgttagggtttaggtttgattatgagtttggtaaagctatgattaagatgagttccattgatgtaaagactgacgttgatggcgaggttaggaaagtttgttccaaggtgaactagtttgaataaagacatatagtatatgtattcggtttctctatgtttcagatttctaatcactgaatgcatgttacgtaattgtcgtctttcaatatttatttttcagttttttatttctctagaaaaaatagtgagtttgttttggatggtaaaacagtatatgctaatctttat

SEQ ID NO: 1825 - protein, 342 aa, Arabidopsis thaliana
  peptide (1)..(342): Ceres Seq. ID no. 12421285
  misc_feature (2)..(342): NCBI GI NO: 7433068 NR Description: probable peroxidase (EC 1
  misc_feature (15)..(342): NCBI GI NO: 30688665 NR Description: peroxidase, putative [Arabidopsis thaliana]
  misc_feature (34)..(342): NCBI GI NO: 7433080 NR Description: probable peroxidase (EC 1
  misc_feature (25)..(342): NCBI GI NO: 19698452 NR Description: bacterial-induced gaiacol peroxidase
  misc_feature (25)..(342): NCBI GI NO: 34910234 NR Description: putative peroxidase
  misc_feature (25)..(342): NCBI GI NO: 7433065 NR Description: peroxidase (EC 1
  misc_feature (16)..(342): NCBI GI NO: 129808 NR Description: Cationic peroxidase 2 precursor (PNPC2)
  misc_feature (22)..(342): NCBI GI NO: 17066703 NR Description: peroxidase [Capsicum annuum]
  misc_feature (19)..(342): NCBI GI NO: 5381255 NR Description: peroxidase [Nicotiana tabacum]
  misc_feature (47)..(324): NCBI GI NO: 6573301 NR Description: peroxidase 4 precursor [Phaseolus vulgaris]
SMLINHTAQIRVRKMGVYLGKYCYIMIIMLVLVLGKEVRSQLLKNGYYSTSCPKAESIVRSTVESHFDSDPTISPGLLRLHFHDCFVQGCDGSVLIKGKSAEQAALPNLGLRGLEVIDDAKARLEAVCPGVVSCADILALAARDSVDLSDGPSWRVPTGRKDGRISLATEASNLPSPLDSVAVQKQKFQDKGLDTHDLVTLLGAHTIGQTDCLFFRYRLYNFTVTGNSDPTISPSFLTQLKTLCPPNGDGSKRVALDIGSPSKFDESFFKNLRDGNAILESDQRLWSDAETNAVVKKYASRLRGLLGFRFDYEFGKAMIKMSSIDVKTDVDGEVRKVCSKVN

SEQ ID NO: 1826 - protein, 341 aa, Arabidopsis thaliana
  peptide (1)..(341): Ceres Seq. ID no. 12421286
  misc_feature (1)..(341): NCBI GI NO: 7433068 NR Description: probable peroxidase (EC 1
  misc_feature (14)..(341): NCBI GI NO: 30688665 NR Description: peroxidase, putative [Arabidopsis thaliana]
  misc_feature (33)..(341): NCBI GI NO: 7433080 NR Description: probable peroxidase (EC 1
  misc_feature (24)..(341): NCBI GI NO: 19698452 NR Description: bacterial-induced gaiacol peroxidase
  misc_feature (24)..(341): NCBI GI NO: 34910234 NR Description: putative peroxidase
  misc_feature (24)..(341): NCBI GI NO: 7433065 NR Description: peroxidase (EC 1
  misc_feature (15)..(341): NCBI GI NO: 129808 NR Description: Cationic peroxidase 2 precursor (PNPC2)
  misc_feature (21)..(341): NCBI GI NO: 17066703 NR Description: peroxidase [Capsicum annuum]
  misc_feature (18)..(341): NCBI GI NO: 5381255 NR Description: peroxidase [Nicotiana tabacum]
  misc_feature (46)..(323): NCBI GI NO: 6573301 NR Description: peroxidase 4 precursor [Phaseolus vulgaris]
MLINHTAQIRVRKMGVYLGKYCYIMIIMLVLVLGKEVRSQLLKNGYYSTSCPKAESIVRSTVESHFDSDPTISPGLLRLHFHDCFVQGCDGSVLIKGKSAEQAALPNLGLRGLEVIDDAKARLEAVCPGVVSCADILALAARDSVDLSDGPSWRVPTGRKDGRISLATEASNLPSPLDSVAVQKQKFQDKGLDTHDLVTLLGAHTIGQTDCLFFRYRLYNFTVTGNSDPTISPSFLTQLKTLCPPNGDGSKRVALDIGSPSKFDESFFKNLRDGNAILESDQRLWSDAETNAVVKKYASRLRGLLGFRFDYEFGKAMIKMSSIDVKTDVDGEVRKVCSKVN

SEQ ID NO: 1827 - protein, 328 aa, Arabidopsis thaliana
  peptide (1)..(328): Ceres Seq. ID no. 12421287
  misc_feature (1)..(328): NCBI GI NO: 7433068 NR Description: probable peroxidase (EC 1
  misc_feature (1)..(328): NCBI GI NO: 30688665 NR Description: peroxidase, putative [Arabidopsis thaliana]
  misc_feature (20)..(328): NCBI GI NO: 7433080 NR Description: probable peroxidase (EC 1
  misc_feature (11)..(328): NCBI GI NO: 19698452 NR Description: bacterial-induced gaiacol peroxidase
  misc_feature (11)..(328): NCBI GI NO: 34910234 NR Description: putative peroxidase
  misc_feature (11)..(328): NCBI GI NO: 7433065 NR Description: peroxidase (EC 1
  misc_feature (2)..(328): NCBI GI NO: 129808 NR Description: Cationic peroxidase 2 precursor (PNPC2)
  misc_feature (8)..(328): NCBI GI NO: 17066703 NR Description: peroxidase [Capsicum annuum]
  misc_feature (5)..(328): NCBI GI NO: 5381255 NR Description: peroxidase [Nicotiana tabacum]
  misc_feature (33)..(310): NCBI GI NO: 6573301 NR Description: peroxidase 4 precursor [Phaseolus vulgaris]
MGVYLGKYCYIMIIMLVLVLGKEVRSQLLKNGYYSTSCPKAESIVRSTVESHFDSDPTISPGLLRLHFHDCFVQGCDGSVLIKGKSAEQAALPNLGLRGLEVIDDAKARLEAVCPGVVSCADILALAARDSVDLSDGPSWRVPTGRKDGRISLATEASNLPSPLDSVAVQKQKFQDKGLDTHDLVTLLGAHTIGQTDCLFFRYRLYNFTVTGNSDPTISPSFLTQLKTLCPPNGDGSKRVALDIGSPSKFDESFFKNLRDGNAILESDQRLWSDAETNAVVKKYASRLRGLLGFRFDYEFGKAMIKMSSIDVKTDVDGEVRKVCSKVN

SEQ ID NO: 1828 - DNA, 1193 bp, Arabidopsis thaliana
  misc_feature (1)..(1193): Ceres Seq. ID no. 12337554
ataaatttcgtaacaaaagaaaaaacagaacacagaatcttgttctcccaccgatcaccaccggagatatggaatcgccgattactcaaccccaaatgtttagattgcagtttcttcgtcttcttcatagtcgacgatcaccccaagttccattaatagccgattcttcaaatcctatcgagaatcctctctttcaagctgatgttccttctaccacagcaatagagtcttgtccaaaagaaaacattggattcagagcaagggaaattacctttgcttattttaagcttgaaagagagaagtgaagaaaaaaggccagcgattgtgtttatgcatggcacaaacacaaacaaagaatggttaaggccatggcttgaagcatatgcttcgcggggatatgtagccatcggtttagactctcgttaccacggtgaacgtgctgattgcaaaactgcatatcgagatgctcttatatcatcttggagaaatggaaacactatgccttttatctttgatactgtatgggatttgatcaaactagctgaatatcttactcagagggatgatatagacccgaaaaagataggaatcaccggtatttcgctaggagggatgcatgcttggtttgctgctgcagctgacactcgctattccgtggttgtcccattaatcggtgttcagggttttagatgggcaatagagaatgatgagtgggaagcaagagtcaacagtatcaaacctttatttgaagaagcaaggattgatctcggaaagaacataatcgacaaagaactagtcgagaaggtgtggaacagaatagctcctggcctagcttcgaagtttgattcaccgtactcattaccagtgattgctccacggcctctttacatccttaacggcgcaaatgatcctcgatgtcctcttggcggactagaacttgcgttaaagagagctgaaaaggcgtataaggaaacagcttctcctggaaacttcaagttcaaagcagaagatggagttggacacgaagcgacgagtttcatgatcaaagaatcatcagactggtttgacaaattccttaaacaagaagatatgacaacttgacagattgtaatattgtgaactaataaagaagaatcatcttcttctcgttaataatgtattcactctcgcaaatcaatatcattacaaatttc

SEQ ID NO: 1829 - protein, 256 aa, Arabidopsis thaliana
  peptide (1)..(256): Ceres Seq. ID no. 12337555
  misc_feature (1)..(256): NCBI GI NO: 30689997 NR Description: expressed protein [Arabidopsis thaliana]
  misc_feature (39)..(249): NCBI GI NO: 34898368 NR Description: ESTs C19441
  misc_feature (1)..(20): NCBI GI NO: 34898368 NR Description: ESTs C19441
MHGTNTNKEWLRPWLEAYASRGYVAIGLDSRYHGERADCKTAYRDALISSWRNGNTMPFIFDTVWDLIKLAEYLTQRDDIDPKKIGITGISLGGMHAWFAAAADTRYSVVVPLIGVQGFRWAIENDEWEARVNSIKPLFEEARIDLGKNIIDKELVEKVWNRIAPGLASKFDSPYSLPVIAPRPLYILNGANDPRCPLGGLELALKRAEKAYKETASPGNFKFKAEDGVGHEATSFMIKESSDWFDKFLKQEDMTT

SEQ ID NO: 1830 - protein, 200 aa, Arabidopsis thaliana
  peptide (1)..(200): Ceres Seq. ID no. 12337556
  misc_feature (1)..(200): NCBI GI NO: 30689997 NR Description: expressed protein [Arabidopsis thaliana]
  misc_feature (1)..(193): NCBI GI NO: 34898368 NR Description: ESTs C19441
MPFIFDTVWDLIKLAEYLTQRDDIDPKKIGITGISLGGMHAWFAAAADTRYSVVVPLIGVQGFRWAIENDEWEARVNSIKPLFEEARIDLGKNIIDKELVEKVWNRIAPGLASKFDSPYSLPVIAPRPLYILNGANDPRCPLGGLELALKRAEKAYKETASPGNFKFKAEDGVGHEATSFMIKESSDWFDKFLKQEDMTT

SEQ ID NO: 1831 - protein, 162 aa, Arabidopsis thaliana
  peptide (1)..(162): Ceres Seq. ID no. 12337557
  misc_feature (1)..(162): NCBI GI NO: 30689997 NR Description: expressed protein [Arabidopsis thaliana]
  misc_feature (1)..(155): NCBI GI NO: 34898368 NR Description: ESTs C19441
MHAWFAAAADTRYSVVVPLIGVQGFRWAIENDEWEARVNSIKPLFEEARIDLGKNIIDKELVEKVWNRIAPGLASKFDSPYSLPVIAPRPLYILNGANDPRCPLGGLELALKRAEKAYKETASPGNFKFKAEDGVGHEATSFMIKESSDWFDKFLKQEDMTT

SEQ ID NO: 1832 - DNA, 1654 bp, Arabidopsis thaliana
  misc_feature (1)..(1654): Ceres Seq. ID no. 12337569
ccacaaaacatatttacgtatatatcatctcatgatgttcacttgattaaaaattaacatcacgaatttaacagaatatattattaaataatccagcaggtaacaaagttataaatggcacacgtgtgggctcatacccagataagctctcgttcctcatactcttaacgctcacaacaaacaatctcacctttcttcttcttcttcttctctctgtttctcaagtttcttaatgcctaggaatatagaaccattggatcttggaatccaaataccatatcatttcagatgtccaatatcactcgaacttatgcaagacccagtcaccgtctgcaccggccaaacctacgaccgagccagcatcgagtcatgggtctccatcggtaacaacacgacatgtccagtcacacgagctcctctctccgacttcacactcatccctaaccacactctccgtcgtctcatccaagaatggtgcgtcgctaaccgctccaatggagtcgaacgtatccctactcctaaacaaccagctgatccaacctctgttcgtgctcttctcagtcaagcctctgctataacaggaacccacgtctctgttcgttcacgcgccgccgctctccgccgtttacgtggtttcgctcgtgattctgataaaaatcgcgttttgatcgcagctcataacgctacagagattttgattaagattctgttctctgaaacgacgtcgtcggagttagtctctgagtctttagctctacttgttatgttaccgataacggagccgaaccagtttgtttcgatatcgtcggatccgggtcgggtcgagtttttgacccggttgttattcgattcgtcgattgaaacacgcgttaacgccgccgcgttgatcgagattgtttcgacgggaaccaaatcggcggacctgaaaggttcgatttcgaattcagaatctgtattcgaaggagttctcgatcttctgagaaatccgatttcgtcacgacgagctctcaaaatcggaatcaaaactctgttcgcgctctgttcagtgaaatcgacgcgacacatcgcgatcacagccggtgcgccggagattctaatagacagactcgcggcggatttcgatagatgcgatacggagcgagccttagcgacggtggagctactctgccgaacgccggaaggatgcgcggcgttcggtgagcacgctttaacggtgccgttgttagttaaaacgatattgagagtttcggatcgcgcgacggagtatgcggcgggggcgttgttagcgctttgtacggcggaggaaaggtggagggaggaagcggcgggggcgggagtggtggtacagttgttgttgatggtgcagagtgagtgtacggagagagcgaagaagaaagcacagaagttattgaagcttctgagagattcatggcctgactacaattccttcgctaactccgatgactttggttgcagcagccaagtggtccctttttgatttctcgatttttttttttcaaaacattgttttttcacagtaattattaaaaaaatgttttttttttaattagaaggaaaaataatggtcattttttgtgtgtatttgatggaaagatgtgaagaagaaaagataatatacagaagctttttgatg

SEQ ID NO: 1833 - protein, 421 aa, Arabidopsis thaliana
  peptide (1)..(421): Ceres Seq. ID no. 12337570
  misc_feature (13)..(88): Pfam Name: Pfam Description:  U-box domain
  misc_feature (1)..(421): NCBI GI NO: 18402223 NR Description: expressed protein; protein id: At3g19380
  misc_feature (1)..(421): NCBI GI NO: 15222819 NR Description: hypothetical protein; protein id: At1g49780.1
  misc_feature (1)..(421): NCBI GI NO: 26451730 NR Description: unknown protein [Arabidopsis thaliana]
  misc_feature (8)..(402): NCBI GI NO: 25408431 NR Description: hypothetical protein At2g35930
  misc_feature (8)..(402): NCBI GI NO: 30686609 NR Description: expressed protein [Arabidopsis thaliana]
  misc_feature (9)..(396): NCBI GI NO: 14582200 NR Description: immediate-early fungal elicitor protein CMPG1
  misc_feature (6)..(400): NCBI GI NO: 21741126 NR Description: OSJNBa0070M12.4
  misc_feature (9)..(396): NCBI GI NO: 30013683 NR Description: Avr9/Cf-9 rapidly elicited protein 74
  misc_feature (1)..(362): NCBI GI NO: 37530696 NR Description: hypothetical protein
  misc_feature (13)..(400): NCBI GI NO: 34908566 NR Description: P0505D12.10
MPRNIEPLDLGIQIPYHFRCPISLELMQDPVTVCTGQTYDRASIESWVSIGNNTTCPVTRAPLSDFTLIPNHTLRRLIQEWCVANRSNGVERIPTPKQPADPTSVRALLSQASAITGTHVSVRSRAAALRRLRGFARDSDKNRVLIAAHNATEILIKILFSETTSSELVSESLALLVMLPITEPNQFVSISSDPGRVEFLTRLLFDSSIETRVNAAALIEIVSTGTKSADLKGSISNSESVFEGVLDLLRNPISSRRALKIGIKTLFALCSVKSTRHIAITAGAPEILIDRLAADFDRCDTERALATVELLCRTPEGCAAFGEHALTVPLLVKTILRVSDRATEYAAGALLALCTAEERWREEAAGAGVVVQLLLMVQSECTERAKKKAQKLLKLLRDSWPDYNSFANSDDFGCSSQVVPF

SEQ ID NO: 1834 - protein, 395 aa, Arabidopsis thaliana
  peptide (1)..(395): Ceres Seq. ID no. 12337571
  misc_feature (1)..(62): Pfam Name: Pfam Description:  U-box domain
  misc_feature (1)..(395): NCBI GI NO: 18402223 NR Description: expressed protein; protein id: At3g19380
  misc_feature (1)..(395): NCBI GI NO: 15222819 NR Description: hypothetical protein; protein id: At1g49780.1
  misc_feature (1)..(395): NCBI GI NO: 26451730 NR Description: unknown protein [Arabidopsis thaliana]
  misc_feature (1)..(376): NCBI GI NO: 25408431 NR Description: hypothetical protein At2g35930
  misc_feature (1)..(376): NCBI GI NO: 30686609 NR Description: expressed protein [Arabidopsis thaliana]
  misc_feature (1)..(370): NCBI GI NO: 14582200 NR Description: immediate-early fungal elicitor protein CMPG1
  misc_feature (1)..(374): NCBI GI NO: 21741126 NR Description: OSJNBa0070M12.4
  misc_feature (1)..(370): NCBI GI NO: 30013683 NR Description: Avr9/Cf-9 rapidly elicited protein 74
  misc_feature (1)..(336): NCBI GI NO: 37530696 NR Description: hypothetical protein
  misc_feature (1)..(374): NCBI GI NO: 34908566 NR Description: P0505D12.10
MQDPVTVCTGQTYDRASIESWVSIGNNTTCPVTRAPLSDFTLIPNHTLRRLIQEWCVANRSNGVERIPTPKQPADPTSVRALLSQASAITGTHVSVRSRAAALRRLRGFARDSDKNRVLIAAHNATEILIKILFSETTSSELVSESLALLVMLPITEPNQFVSISSDPGRVEFLTRLLFDSSIETRVNAAALIEIVSTGTKSADLKGSISNSESVFEGVLDLLRNPISSRRALKIGIKTLFALCSVKSTRHIAITAGAPEILIDRLAADFDRCDTERALATVELLCRTPEGCAAFGEHALTVPLLVKTILRVSDRATEYAAGALLALCTAEERWREEAAGAGVVVQLLLMVQSECTERAKKKAQKLLKLLRDSWPDYNSFANSDDFGCSSQVVPF

SEQ ID NO: 1835 - protein, 244 aa, Arabidopsis thaliana
  peptide (1)..(244): Ceres Seq. ID no. 12337572
  misc_feature (1)..(244): NCBI GI NO: 18402223 NR Description: expressed protein; protein id: At3g19380
  misc_feature (1)..(244): NCBI GI NO: 15222819 NR Description: hypothetical protein; protein id: At1g49780.1
  misc_feature (1)..(244): NCBI GI NO: 26451730 NR Description: unknown protein [Arabidopsis thaliana]
  misc_feature (1)..(225): NCBI GI NO: 25408431 NR Description: hypothetical protein At2g35930
  misc_feature (1)..(225): NCBI GI NO: 30686609 NR Description: expressed protein [Arabidopsis thaliana]
  misc_feature (1)..(219): NCBI GI NO: 14582200 NR Description: immediate-early fungal elicitor protein CMPG1
  misc_feature (1)..(223): NCBI GI NO: 21741126 NR Description: OSJNBa0070M12.4
  misc_feature (1)..(219): NCBI GI NO: 30013683 NR Description: Avr9/Cf-9 rapidly elicited protein 74
  misc_feature (1)..(185): NCBI GI NO: 37530696 NR Description: hypothetical protein
  misc_feature (1)..(223): NCBI GI NO: 34908566 NR Description: P0505D12.10
MLPITEPNQFVSISSDPGRVEFLTRLLFDSSIETRVNAAALIEIVSTGTKSADLKGSISNSESVFEGVLDLLRNPISSRRALKIGIKTLFALCSVKSTRHIAITAGAPEILIDRLAADFDRCDTERALATVELLCRTPEGCAAFGEHALTVPLLVKTILRVSDRATEYAAGALLALCTAEERWREEAAGAGVVVQLLLMVQSECTERAKKKAQKLLKLLRDSWPDYNSFANSDDFGCSSQVVPF

SEQ ID NO: 1836 - DNA, 1367 bp, Arabidopsis thaliana
  misc_feature (1)..(1367): Ceres Seq. ID no. 12580251
ccaattctaaaccaaacaacagattctcataatcatctcttcttttttcctctttacgaaaagaagaaagatcaaaccttccaagtaatcattttctttctctctctcacacacacacattcactagttttagcttcacaaaatgtgatctaacttcatttacctatatgcaggtttacacaaaaagaaaaaagaacgatggctcttgtcaccttcttgtttattgctacccttggagcaatgacgtcacatgtcaatggttacgccggaggaggttgggtcaacgcacacgccacattctacggtggtggtgatgcttccggcacaatgggaggtgcttgtggatacggaaacctatatagccaaggctatggaaccaacacggcggcgctaagcacggctctattcaataatggtctaagttgtggtgcttgcttcgagataagatgtcaaaacgatggaaaatggtgtcttcctggctcaattgtcgtcacagccacaaacttttgccctcctaacaacgccttaccgaacaacgcaggaggttggtgtaaccctcctcagcagcattttgatctctctcagcccgtatttcaacgcatcgctcaatacagagccggcattgtccccgtcgcttaccgaagagtgccgtgcgtgagaagaggaggaataaggtttacgataaacggacactcttacttcaacctagttctgatcactaacgtcggaggagccggagatgttcactcagcgatggttaaaggttcaagaactggatggcaagcgatgtcaagaaactggggacagaactggcagagtaactcttaccttaacggacaatctctctcattcaaagttacaacaagcgatggccaaaccattgtctctaacaacgttgctaacgcaggctggtctttcggccagaccttcacaggtgcgcagctacgttaggaagagtgattcggtgaaaattcatctcattgatcgtgtggtattgacgtgttgtagtagaagcagttagagagaggggcatgatagtaatttggtcctttctttcaattgaggtttacctaaaaagaagtggtgcttcgagtgcttgattttgcacgaggccttgatgatgtcatcttttgggaaccttttcttatctttcttcatttttattggtaaggttttatgttatactgatgcagaggtggtattgagttgaagtaccacccgctagtagtagtagtctctcatgtcatttgtatcccttctcgaagcgagagggagagttttagatttttattaatctcgttaaagtcatttgtatgttgtaaatttttcaatttctacaagtaagaaatattggagatttgtttgtt

SEQ ID NO: 1837 - protein, 250 aa, Arabidopsis thaliana
  peptide (1)..(250): Ceres Seq. ID no. 12580252
  misc_feature (158)..(235): Pfam Name: Pfam Description:  Pollen allergen
  misc_feature (1)..(250): NCBI GI NO: 30697882 NR Description: expansin, putative (EXP1) [Arabidopsis thaliana]
  misc_feature (1)..(250): NCBI GI NO: 15222356 NR Description: expansin (At-EXP1); protein id: At1g69530
  misc_feature (19)..(250): NCBI GI NO: 11281293 NR Description: expansin EXP1
  misc_feature (1)..(250): NCBI GI NO: 38046730 NR Description: alpha-expansin 3
  misc_feature (1)..(250): NCBI GI NO: 15223347 NR Description: expansin, putative; protein id: At1g26770
  misc_feature (1)..(250): NCBI GI NO: 29467507 NR Description: expansin [Pyrus communis]
  misc_feature (1)..(250): NCBI GI NO: 17484121 NR Description: alpha-expansin [Prunus cerasus]
  misc_feature (1)..(250): NCBI GI NO: 29466641 NR Description: expansin [Prunus persica]
  misc_feature (1)..(250): NCBI GI NO: 10180019 NR Description: expansin 2 [Prunus avium]
  misc_feature (1)..(250): NCBI GI NO: 21553381 NR Description: alpha-expansin 10 precursor
MALVTFLFIATLGAMTSHVNGYAGGGWVNAHATFYGGGDASGTMGGACGYGNLYSQGYGTNTAALSTALFNNGLSCGACFEIRCQNDGKWCLPGSIVVTATNFCPPNNALPNNAGGWCNPPQQHFDLSQPVFQRIAQYRAGIVPVAYRRVPCVRRGGIRFTINGHSYFNLVLITNVGGAGDVHSAMVKGSRTGWQAMSRNWGQNWQSNSYLNGQSLSFKVTTSDGQTIVSNNVANAGWSFGQTFTGAQLR

SEQ ID NO: 1838 - protein, 236 aa, Arabidopsis thaliana
  peptide (1)..(236): Ceres Seq. ID no. 12580253
  misc_feature (144)..(221): Pfam Name: Pfam Description:  Pollen allergen
  misc_feature (1)..(236): NCBI GI NO: 30697882 NR Description: expansin, putative (EXP1) [Arabidopsis thaliana]
  misc_feature (1)..(236): NCBI GI NO: 15222356 NR Description: expansin (At-EXP1); protein id: At1g69530
  misc_feature (5)..(236): NCBI GI NO: 11281293 NR Description: expansin EXP1
  misc_feature (1)..(236): NCBI GI NO: 38046730 NR Description: alpha-expansin 3
  misc_feature (1)..(236): NCBI GI NO: 15223347 NR Description: expansin, putative; protein id: At1g26770
  misc_feature (1)..(236): NCBI GI NO: 29467507 NR Description: expansin [Pyrus communis]
  misc_feature (1)..(236): NCBI GI NO: 17484121 NR Description: alpha-expansin [Prunus cerasus]
  misc_feature (1)..(236): NCBI GI NO: 29466641 NR Description: expansin [Prunus persica]
  misc_feature (1)..(236): NCBI GI NO: 10180019 NR Description: expansin 2 [Prunus avium]
  misc_feature (1)..(236): NCBI GI NO: 21553381 NR Description: alpha-expansin 10 precursor
MTSHVNGYAGGGWVNAHATFYGGGDASGTMGGACGYGNLYSQGYGTNTAALSTALFNNGLSCGACFEIRCQNDGKWCLPGSIVVTATNFCPPNNALPNNAGGWCNPPQQHFDLSQPVFQRIAQYRAGIVPVAYRRVPCVRRGGIRFTINGHSYFNLVLITNVGGAGDVHSAMVKGSRTGWQAMSRNWGQNWQSNSYLNGQSLSFKVTTSDGQTIVSNNVANAGWSFGQTFTGAQLR

SEQ ID NO: 1839 - protein, 207 aa, Arabidopsis thaliana
  peptide (1)..(207): Ceres Seq. ID no. 12580254
  misc_feature (115)..(192): Pfam Name: Pfam Description:  Pollen allergen
  misc_feature (1)..(207): NCBI GI NO: 30697882 NR Description: expansin, putative (EXP1) [Arabidopsis thaliana]
  misc_feature (1)..(207): NCBI GI NO: 15222356 NR Description: expansin (At-EXP1); protein id: At1g69530
  misc_feature (1)..(207): NCBI GI NO: 11281293 NR Description: expansin EXP1
  misc_feature (1)..(207): NCBI GI NO: 38046730 NR Description: alpha-expansin 3
  misc_feature (1)..(207): NCBI GI NO: 15223347 NR Description: expansin, putative; protein id: At1g26770
  misc_feature (1)..(207): NCBI GI NO: 29467507 NR Description: expansin [Pyrus communis]
  misc_feature (1)..(207): NCBI GI NO: 17484121 NR Description: alpha-expansin [Prunus cerasus]
  misc_feature (1)..(207): NCBI GI NO: 29466641 NR Description: expansin [Prunus persica]
  misc_feature (1)..(207): NCBI GI NO: 10180019 NR Description: expansin 2 [Prunus avium]
  misc_feature (1)..(207): NCBI GI NO: 21553381 NR Description: alpha-expansin 10 precursor
MGGACGYGNLYSQGYGTNTAALSTALFNNGLSCGACFEIRCQNDGKWCLPGSIVVTATNFCPPNNALPNNAGGWCNPPQQHFDLSQPVFQRIAQYRAGIVPVAYRRVPCVRRGGIRFTINGHSYFNLVLITNVGGAGDVHSAMVKGSRTGWQAMSRNWGQNWQSNSYLNGQSLSFKVTTSDGQTIVSNNVANAGWSFGQTFTGAQLR

SEQ ID NO: 1840 - DNA, 927 bp, Arabidopsis thaliana
  misc_feature (1)..(927): Ceres Seq. ID no. 13501390
aatcttcatctccgtcgatctccattgatctctaacactaaaattctactactcttcactttctacagcttaggaagagttctcgacaagctgattcttcgagttctcgacaagtttcagtgtttttgtttccgggtcacagagaacaaaggcaatttacaataatggcagagactaaacaaccactgatcggtcttaaatgggaaccaaagcttccaggcttatccttagacttgaaaactggttcaaccagaagcaaaacagctgagagttctaagtcagagcttgttgatggtctttgtcttccacctaatgatccaaggaagattaacaagatgattagaaaacaactcaaagacactactggttctaactggtttgatatgcctgctccaacaatgactcctgagttgaaaagagatcttcagttgcttaagttgagaactgtaatggatcctgctctacactacaagaaatctgtgtcacggtctaaactagctgaaaaatatttccagattggtacagtaattgaaccagctgaagagttttatgggagattgacaaagaagaatagaaaagcaactcttgctgatgagttggtttcagatcctaaaactgctctctacaggaagcgtaaagttagggagattgaggagaagagtagagctgttacgaataagaaatggaataaaaagggaaaccagtctaagaacacaaagccaagaaggaactgaattatttttgttaagagtatgatcatagttttgggacacattttttctatttttaatagaatatggtcatagtattggatacactttcttgcggtgatataggttgtaatgactcttgttgtttatggcctttgtttaaaggattttgtgttattggttacacctttgataactgtaataactcttgttgttt

SEQ ID NO: 1841 - protein, 189 aa, Arabidopsis thaliana
  peptide (1)..(189): Ceres Seq. ID no. 13501391
  misc_feature (1)..(189): NCBI GI NO: 15221891 NR Description: expressed protein [Arabidopsis thaliana]
  misc_feature (1)..(189): NCBI GI NO: 30692242 NR Description: expressed protein [Arabidopsis thaliana]
  misc_feature (1)..(189): NCBI GI NO: 25405768 NR Description: T22H22.18 [imported] - Arabidopsis thaliana
  misc_feature (60)..(186): NCBI GI NO: 19114999 NR Description: hypothetical protein [Schizosaccharomyces pombe]
  misc_feature (46)..(177): NCBI GI NO: 8218113 NR Description: dJ561L24.2 (acidic 82 kDa protein) [Homo sapiens]
  misc_feature (46)..(177): NCBI GI NO: 34859943 NR Description: similar to expressed sequence AA408582
  misc_feature (46)..(177): NCBI GI NO: 24418931 NR Description: expressed sequence AA408582 [Mus musculus]
  misc_feature (57)..(189): NCBI GI NO: 17537287 NR Description: Acidic protein mRNA (29.6 kD)
  misc_feature (60)..(188): NCBI GI NO: 39580393 NR Description: Hypothetical protein CBG17763
  misc_feature (24)..(185): NCBI GI NO: 6323080 NR Description: Protein required for cell viability; Ylr051cp
MAETKQPLIGLKWEPKLPGLSLDLKTGSTRSKTAESSKSELVDGLCLPPNDPRKINKMIRKQLKDTTGSNWFDMPAPTMTPELKRDLQLLKLRTVMDPALHYKKSVSRSKLAEKYFQIGTVIEPAEEFYGRLTKKNRKATLADELVSDPKTALYRKRKVREIEEKSRAVTNKKWNKKGNQSKNTKPRRN

SEQ ID NO: 1842 - protein, 132 aa, Arabidopsis thaliana
  peptide (1)..(132): Ceres Seq. ID no. 13501392
  misc_feature (1)..(132): NCBI GI NO: 15221891 NR Description: expressed protein [Arabidopsis thaliana]
  misc_feature (1)..(132): NCBI GI NO: 30692242 NR Description: expressed protein [Arabidopsis thaliana]
  misc_feature (1)..(132): NCBI GI NO: 25405768 NR Description: T22H22.18 [imported] - Arabidopsis thaliana
  misc_feature (3)..(129): NCBI GI NO: 19114999 NR Description: hypothetical protein [Schizosaccharomyces pombe]
  misc_feature (1)..(120): NCBI GI NO: 8218113 NR Description: dJ561L24.2 (acidic 82 kDa protein) [Homo sapiens]
  misc_feature (1)..(120): NCBI GI NO: 34859943 NR Description: similar to expressed sequence AA408582
  misc_feature (1)..(120): NCBI GI NO: 24418931 NR Description: expressed sequence AA408582 [Mus musculus]
  misc_feature (1)..(132): NCBI GI NO: 17537287 NR Description: Acidic protein mRNA (29.6 kD)
  misc_feature (3)..(131): NCBI GI NO: 39580393 NR Description: Hypothetical protein CBG17763
  misc_feature (1)..(128): NCBI GI NO: 6323080 NR Description: Protein required for cell viability; Ylr051cp
MIRKQLKDTTGSNWFDMPAPTMTPELKRDLQLLKLRTVMDPALHYKKSVSRSKLAEKYFQIGTVIEPAEEFYGRLTKKNRKATLADELVSDPKTALYRKRKVREIEEKSRAVTNKKWNKKGNQSKNTKPRRN

SEQ ID NO: 1843 - protein, 116 aa, Arabidopsis thaliana
  peptide (1)..(116): Ceres Seq. ID no. 13501393
  misc_feature (1)..(116): NCBI GI NO: 15221891 NR Description: expressed protein [Arabidopsis thaliana]
  misc_feature (1)..(116): NCBI GI NO: 30692242 NR Description: expressed protein [Arabidopsis thaliana]
  misc_feature (1)..(116): NCBI GI NO: 25405768 NR Description: T22H22.18 [imported] - Arabidopsis thaliana
  misc_feature (1)..(113): NCBI GI NO: 19114999 NR Description: hypothetical protein [Schizosaccharomyces pombe]
  misc_feature (1)..(104): NCBI GI NO: 8218113 NR Description: dJ561L24.2 (acidic 82 kDa protein) [Homo sapiens]
  misc_feature (1)..(104): NCBI GI NO: 34859943 NR Description: similar to expressed sequence AA408582
  misc_feature (1)..(104): NCBI GI NO: 24418931 NR Description: expressed sequence AA408582 [Mus musculus]
  misc_feature (1)..(116): NCBI GI NO: 17537287 NR Description: Acidic protein mRNA (29.6 kD)
  misc_feature (1)..(115): NCBI GI NO: 39580393 NR Description: Hypothetical protein CBG17763
  misc_feature (1)..(112): NCBI GI NO: 6323080 NR Description: Protein required for cell viability; Ylr051cp
MPAPTMTPELKRDLQLLKLRTVMDPALHYKKSVSRSKLAEKYFQIGTVIEPAEEFYGRLTKKNRKATLADELVSDPKTALYRKRKVREIEEKSRAVTNKKWNKKGNQSKNTKPRRN

SEQ ID NO: 1844 - DNA, 646 bp, Arabidopsis thaliana
  misc_feature (1)..(646): Ceres Seq. ID no. 13496920
atccgattttatttgtttgataagttcgtgtcgtcttcgtctctctaacccaattctgtggtgtctgaagaaagcagaatcaaatcctttctttcagaggacttagcaggccaaatgcaatatctggaatgggtgttgcagatgagagcaaaaccacatttctagagcttcaaaggaaaaaaactcatcgctatgtggtcttcaagattgatgaatccaaaaaagaagttgttgttgagaaaactggaaatcctacagagagctacgatgatttcttagcttcacttcctgataatgactgcagatacgctgtttatgactttgatttcgttacttctgagaattgtcaaaagagcaaaatcttcttctttgcttggtctccttcgacctctggaattcgagccaaggtgctttactcgacttctaaagaccagttaagtagggagcttcaagggattcactatgagattcaagctactgatcctactgaggttgatcttgaagtgttacgcgaacgagcgaactgagagcaagcaagattgctatgtctattcaaaacttatggtaatgtaatgaataattcgtattctctgtggattgatttgtgtaaacacagtttcatgttctatgtcaaactgtataaccg

SEQ ID NO: 1845 - protein, 132 aa, Arabidopsis thaliana
  peptide (1)..(132): Ceres Seq. ID no. 13496921
  misc_feature (5)..(132): Pfam Name: Pfam Description:  Cofilin/tropomyosin-type actin-binding protein
  misc_feature (1)..(132): NCBI GI NO: 18402587 NR Description: actin depolymerizing factor 6
  misc_feature (1)..(132): NCBI GI NO: 21554405 NR Description: Actin-depolymerizing factor ADF-6
  misc_feature (1)..(132): NCBI GI NO: 25295741 NR Description: actin depolymerizing factor 6
  misc_feature (1)..(132): NCBI GI NO: 4566614 NR Description: actin depolymerizing factor [Populus x canescens]
  misc_feature (1)..(131): NCBI GI NO: 24745620 NR Description: actin depolymerizing factor 6 [Solanum tuberosum]
  misc_feature (1)..(131): NCBI GI NO: 7330254 NR Description: actin depolymerizing factor [Elaeis guineensis]
  misc_feature (1)..(132): NCBI GI NO: 34897072 NR Description: putative actin-depolymerizing factor
  misc_feature (1)..(132): NCBI GI NO: 17366768 NR Description: Actin-depolymerizing factor 1 (ADF 1)
  misc_feature (1)..(132): NCBI GI NO: 30697300 NR Description: actin depolymerizing factor 4 - like protein
  misc_feature (3)..(132): NCBI GI NO: 37536154 NR Description: putative actin depolymerizing factor
MGVADESKTTFLELQRKKTHRYVVFKIDESKKEVVVEKTGNPTESYDDFLASLPDNDCRYAVYDFDFVTSENCQKSKIFFFAWSPSTSGIRAKVLYSTSKDQLSRELQGIHYEIQATDPTEVDLEVLRERAN

SEQ ID NO: 1846 - DNA, 1674 bp, Arabidopsis thaliana
  misc_feature (1)..(1674): Ceres Seq. ID no. 12482626
agatgtaatttgtataattttagtaactcttcagtttttttttgttttaaaaatatattttctctctctctgtcttcctgcaatctatcgccggccgattcaataatttcgctttactctgccaaaaaagtttgttcttttgttttctgggattatccaaagagaagaaacagaggaaatcagtctcttttttagtttcagaccctaaatcctaggttttgaagttttgtttctttagtaattttgtcaggttttgtgtctggtgttgggatttttcggagcttggtttcttgaaccagctccattttctaaaaattccttctttaaatccccattgttgtaagtcttaaagaaaaaagaagatgacttgttgtttctcttgtttgaatcctcgaaccaaggacataagagtcgacattgataacgctcgatgcaactctcgttaccaaaccgattcatcagttcatggaagtgatacaacaggaacagagtcgatttcgggtatcttagtaaatggtaaagtgaatagtccgatacctggtggtggagctcggagcttcacgttcaaggagttagctgcagctacaagaaacttccgggaagttaatttgctcggagaaggaggttttggcagagtttataagggacgtttagattcaggacaagtagtggctattaagcaattgaatccagatgggcttcaagggaaccgagagtttatagtagaagttcttatgcttagcttattgcatcatcccaatctcgttacattgatcggttactgtacttctggtgatcaaagacttcttgtctatgaatacatgccaatgggaagcttagaagatcacctttttgatcttgagtctaatcaagaaccattaagctggaatactcgaatgaaaatcgcggttggtgcagctcgaggaatagagtatcttcactgcacagctaacccgccagtgatttaccgtgatttgaaatccgcaaacatattgttagataaagagttcagtccaaaactctcggatttcggattggcgaaactcggtccagttggtgatcgaactcatgtatcgactcgtgtcatgggaacttacggttactgtgctcctgaatacgcaatgagcgggaaattaactgttaaatcggatatctactgcttcggtgtagtgttgcttgagctgattactgggagaaaagctattgatttaggtcaaaagcaaggcgagcagaatcttgttacttggtcacgtccatacctcaaggatcagaagaagtttggacatttagtggatccgtctctacgaggaaaatacccaagacggtgtttaaactatgcgattgcgattattgcaatgtgtcttaatgaagaagctcattatcgaccgttcataggtgacatagttgtggcactagagtacttagccgcacagagcagatctcatgaagctcgaaacgtctcatcaccgtcaccagagatttcaagaacgccgcgacgagacttgtaaaaactcaaaaacagcttttaagaatttcagtttggtgttgtgtaaaaatggtttttttgtttctttctcagaaaacaatatatgtttggtaaatgtttcgttattagtctcttttacttgatgtatatggcaattatggaaacaattaaagttcttttatatgtgt

SEQ ID NO: 1847 - protein, 381 aa, Arabidopsis thaliana
  peptide (1)..(381): Ceres Seq. ID no. 12482627
  misc_feature (1)..(381): NCBI GI NO: 8778594 NR Description: F5M15.3 [Arabidopsis thaliana]
  misc_feature (33)..(381): NCBI GI NO: 15217992 NR Description: protein kinase, putative; protein id: At1g20650.1
  misc_feature (4)..(378): NCBI GI NO: 15223033 NR Description: putative protein kinase; protein id: At1g76370.1
  misc_feature (12)..(381): NCBI GI NO: 34907210 NR Description: putative serine/threonine kinase PBS1 protein
  misc_feature (1)..(381): NCBI GI NO: 15238886 NR Description: protein kinase -like protein
  misc_feature (4)..(376): NCBI GI NO: 34395193 NR Description: putative protein serine/threonine kinase
  misc_feature (4)..(358): NCBI GI NO: 15240038 NR Description: protein kinase-like; protein id: At5g13160
  misc_feature (1)..(370): NCBI GI NO: 34394036 NR Description: putative protein serine/threonine kinase BNK1
  misc_feature (61)..(376): NCBI GI NO: 34899302 NR Description: putative protein serine/threonine kinase
  misc_feature (63)..(357): NCBI GI NO: 11259782 NR Description: protein kinase-like - Arabidopsis thaliana
MTCCFSCLNPRTKDIRVDIDNARCNSRYQTDSSVHGSDTTGTESISGILVNGKVNSPIPGGGARSFTFKELAAATRNFREVNLLGEGGFGRVYKGRLDSGQVVAIKQLNPDGLQGNREFIVEVLMLSLLHHPNLVTLIGYCTSGDQRLLVYEYMPMGSLEDHLFDLESNQEPLSWNTRMKIAVGAARGIEYLHCTANPPVIYRDLKSANILLDKEFSPKLSDFGLAKLGPVGDRTHVSTRVMGTYGYCAPEYAMSGKLTVKSDIYCFGVVLLELITGRKAIDLGQKQGEQNLVTWSRPYLKDQKKFGHLVDPSLRGKYPRRCLNYAIAIIAMCLNEEAHYRPFIGDIVVALEYLAAQSRSHEARNVSSPSPEISRTPRRDL

SEQ ID NO: 1848 - protein, 257 aa, Arabidopsis thaliana
  peptide (1)..(257): Ceres Seq. ID no. 12482628
  misc_feature (1)..(257): NCBI GI NO: 8778594 NR Description: F5M15.3 [Arabidopsis thaliana]
  misc_feature (1)..(257): NCBI GI NO: 15217992 NR Description: protein kinase, putative; protein id: At1g20650.1
  misc_feature (1)..(254): NCBI GI NO: 15223033 NR Description: putative protein kinase; protein id: At1g76370.1
  misc_feature (1)..(257): NCBI GI NO: 34907210 NR Description: putative serine/threonine kinase PBS1 protein
  misc_feature (1)..(257): NCBI GI NO: 15238886 NR Description: protein kinase -like protein
  misc_feature (1)..(252): NCBI GI NO: 34395193 NR Description: putative protein serine/threonine kinase
  misc_feature (1)..(234): NCBI GI NO: 15240038 NR Description: protein kinase-like; protein id: At5g13160
  misc_feature (1)..(246): NCBI GI NO: 34394036 NR Description: putative protein serine/threonine kinase BNK1
  misc_feature (1)..(252): NCBI GI NO: 34899302 NR Description: putative protein serine/threonine kinase
  misc_feature (1)..(233): NCBI GI NO: 11259782 NR Description: protein kinase-like - Arabidopsis thaliana
MLSLLHHPNLVTLIGYCTSGDQRLLVYEYMPMGSLEDHLFDLESNQEPLSWNTRMKIAVGAARGIEYLHCTANPPVIYRDLKSANILLDKEFSPKLSDFGLAKLGPVGDRTHVSTRVMGTYGYCAPEYAMSGKLTVKSDIYCFGVVLLELITGRKAIDLGQKQGEQNLVTWSRPYLKDQKKFGHLVDPSLRGKYPRRCLNYAIAIIAMCLNEEAHYRPFIGDIVVALEYLAAQSRSHEARNVSSPSPEISRTPRRDL

SEQ ID NO: 1849 - protein, 228 aa, Arabidopsis thaliana
  peptide (1)..(228): Ceres Seq. ID no. 12482629
  misc_feature (1)..(228): NCBI GI NO: 8778594 NR Description: F5M15.3 [Arabidopsis thaliana]
  misc_feature (1)..(228): NCBI GI NO: 15217992 NR Description: protein kinase, putative; protein id: At1g20650.1
  misc_feature (1)..(225): NCBI GI NO: 15223033 NR Description: putative protein kinase; protein id: At1g76370.1
  misc_feature (1)..(228): NCBI GI NO: 34907210 NR Description: putative serine/threonine kinase PBS1 protein
  misc_feature (1)..(228): NCBI GI NO: 15238886 NR Description: protein kinase -like protein
  misc_feature (1)..(223): NCBI GI NO: 34395193 NR Description: putative protein serine/threonine kinase
  misc_feature (1)..(205): NCBI GI NO: 15240038 NR Description: protein kinase-like; protein id: At5g13160
  misc_feature (1)..(217): NCBI GI NO: 34394036 NR Description: putative protein serine/threonine kinase BNK1
  misc_feature (1)..(223): NCBI GI NO: 34899302 NR Description: putative protein serine/threonine kinase
  misc_feature (1)..(204): NCBI GI NO: 11259782 NR Description: protein kinase-like - Arabidopsis thaliana
MPMGSLEDHLFDLESNQEPLSWNTRMKIAVGAARGIEYLHCTANPPVIYRDLKSANILLDKEFSPKLSDFGLAKLGPVGDRTHVSTRVMGTYGYCAPEYAMSGKLTVKSDIYCFGVVLLELITGRKAIDLGQKQGEQNLVTWSRPYLKDQKKFGHLVDPSLRGKYPRRCLNYAIAIIAMCLNEEAHYRPFIGDIVVALEYLAAQSRSHEARNVSSPSPEISRTPRRDL

SEQ ID NO: 1850 - DNA, 1690 bp, Arabidopsis thaliana
  misc_feature (1)..(1690): Ceres Seq. ID no. 12421376
atcaataaacacaaaaacaaaagaagaagagaataaacaaaagaagaaaaaaaactaataaaacaaaatcaataaaaagagaataaaaaatggtgggttctcacaaagcaagcggagtgcttcttgtgctactagtggttatggccaccacaatagcaaacgggacaccggttgtcgataaagcaaaaaatgcagctacagcagttgaagatacagcaaaaaatgcagctacagcagttggcggtgcagctgcatcagttggtgctaaagtatcaggtgccaaaccaggcgcagcagttgatgttaaagcatcaggagccaaaggagacagcaaaactgatgatagtgcggcatttgcggctgcatggaaagaagcttgtgcagcagggagcacaattacagtgccaaaaggtgagtatatggtagagagcctagagttcaaaggtccatgcaaaggtccagtcactttggaattgaatggcaatttcaaggctccggctacggtcaagaccactaagccacatgccggatggattgatttcgaaaatatagctgatttcactttgaatggaaacaaagctatttttgacggtcaagggtccctcgcttggaaggccaatgattgtgccaaaactggcaaatgcaactctctccctatcaacatccgattcactggtctaacaaactcaaagattaatagtattacatcaacaaacagcaaacttttccacatgaacatccttaactgcaagaacattactctttcggatattggtattgatgcacctccggagagtctcaacaccgatggtatccacatcggaaggtccaatggagtcaacttaattggggcaaagatcaaaaccggagatgactgcgtttccattggagatggtaccgaaaatctcattgttgagaacgtagaatgtggaccaggacacggaatttccattggaagtcttggaagataccctaatgagcaaccagtaaaaggagtcaccgtgaggaaatgcctcatcaagaacactgacaatggtgttcgcatcaagacatggccaggatctccccccggcatcgcctccaacattcttttcgaagatatcacaatggacaatgttagccttcccgttctcatcgaccaagagtactgtccttatggccactgcaaagctggggtaccatcgcaagtgaagttgtcagacgtgactatcaagggcattaagggtacatcagcaacaaaggtggctgtgaagctaatgtgcagcaaaggagtgccttgcaccaatattgctctctctgacatcaacttggtccacaacggcaaagagggaccagctgtctcggcatgttctaacatcaagcctattctcagcggaaagttggttccagcggcttgcactgaagttgctaaaccgggtccataaattaaagtcgcttgtccaccataaatccatccaatctggtgaagacgctttgattagggtgcgatgaaaaaattttgcaatatttttttgacatataaattatatggatattttatagataagacggagtccattcaggattggagtttataacctgaagagtgactcgtgaattgggtagtaattgttgtgtggattcgcatttatgcgagaatgttttaataattattcgaaaagtaataatatcattgaaattttgaagtttt

SEQ ID NO: 1851 - protein, 444 aa, Arabidopsis thaliana
  peptide (1)..(444): Ceres Seq. ID no. 12421377
  misc_feature (97)..(436): Pfam Name: Pfam Description:  Glycosyl hydrolases family 28
  misc_feature (1)..(444): NCBI GI NO: 15231880 NR Description: exopolygalacturonase; protein id: At3g07850
  misc_feature (1)..(444): NCBI GI NO: 421832 NR Description: polygalacturonase (EC 3.2.1.15)
  misc_feature (1)..(444): NCBI GI NO: 15231771 NR Description: exopolygalacturonase; protein id: At3g14040
  misc_feature (1)..(444): NCBI GI NO: 3004442 NR Description: polygalacturonase [Arabidopsis thaliana]
  misc_feature (1)..(444): NCBI GI NO: 421833 NR Description: polygalacturonase (EC 3.2.1.15)
  misc_feature (1)..(444): NCBI GI NO: 17064742 NR Description: polygalacturonase; pectinase
  misc_feature (61)..(437): NCBI GI NO: 3024386 NR Description: POLYGALACTURONASE PRECURSOR (PG) (PECTINASE)
  misc_feature (69)..(437): NCBI GI NO: 3024385 NR Description: POLYGALACTURONASE PRECURSOR (PG) (PECTINASE)
  misc_feature (78)..(436): NCBI GI NO: 6714530 NR Description: polygalacturonase [Salix gilgiana]
  misc_feature (84)..(437): NCBI GI NO: 129941 NR Description: EXOPOLYGALACTURONASE
MVGSHKASGVLLVLLVVMATTIANGTPVVDKAKNAATAVEDTAKNAATAVGGAAASVGAKVSGAKPGAAVDVKASGAKGDSKTDDSAAFAAAWKEACAAGSTITVPKGEYMVESLEFKGPCKGPVTLELNGNFKAPATVKTTKPHAGWIDFENIADFTLNGNKAIFDGQGSLAWKANDCAKTGKCNSLPINIRFTGLTNSKINSITSTNSKLFHMNILNCKNITLSDIGIDAPPESLNTDGIHIGRSNGVNLIGAKIKTGDDCVSIGDGTENLIVENVECGPGHGISIGSLGRYPNEQPVKGVTVRKCLIKNTDNGVRIKTWPGSPPGIASNILFEDITMDNVSLPVLIDQEYCPYGHCKAGVPSQVKLSDVTIKGIKGTSATKVAVKLMCSKGVPCTNIALSDINLVHNGKEGPAVSACSNIKPILSGKLVPAACTEVAKPGP

SEQ ID NO: 1852 - protein, 427 aa, Arabidopsis thaliana
  peptide (1)..(427): Ceres Seq. ID no. 12421378
  misc_feature (80)..(419): Pfam Name: Pfam Description:  Glycosyl hydrolases family 28
  misc_feature (1)..(427): NCBI GI NO: 15231880 NR Description: exopolygalacturonase; protein id: At3g07850
  misc_feature (1)..(427): NCBI GI NO: 421832 NR Description: polygalacturonase (EC 3.2.1.15)
  misc_feature (1)..(427): NCBI GI NO: 15231771 NR Description: exopolygalacturonase; protein id: At3g14040
  misc_feature (1)..(427): NCBI GI NO: 3004442 NR Description: polygalacturonase [Arabidopsis thaliana]
  misc_feature (1)..(427): NCBI GI NO: 421833 NR Description: polygalacturonase (EC 3.2.1.15)
  misc_feature (1)..(427): NCBI GI NO: 17064742 NR Description: polygalacturonase; pectinase
  misc_feature (44)..(420): NCBI GI NO: 3024386 NR Description: POLYGALACTURONASE PRECURSOR (PG) (PECTINASE)
  misc_feature (52)..(420): NCBI GI NO: 3024385 NR Description: POLYGALACTURONASE PRECURSOR (PG) (PECTINASE)
  misc_feature (61)..(419): NCBI GI NO: 6714530 NR Description: polygalacturonase [Salix gilgiana]
  misc_feature (67)..(420): NCBI GI NO: 129941 NR Description: EXOPOLYGALACTURONASE
MATTIANGTPVVDKAKNAATAVEDTAKNAATAVGGAAASVGAKVSGAKPGAAVDVKASGAKGDSKTDDSAAFAAAWKEACAAGSTITVPKGEYMVESLEFKGPCKGPVTLELNGNFKAPATVKTTKPHAGWIDFENIADFTLNGNKAIFDGQGSLAWKANDCAKTGKCNSLPINIRFTGLTNSKINSITSTNSKLFHMNILNCKNITLSDIGIDAPPESLNTDGIHIGRSNGVNLIGAKIKTGDDCVSIGDGTENLIVENVECGPGHGISIGSLGRYPNEQPVKGVTVRKCLIKNTDNGVRIKTWPGSPPGIASNILFEDITMDNVSLPVLIDQEYCPYGHCKAGVPSQVKLSDVTIKGIKGTSATKVAVKLMCSKGVPCTNIALSDINLVHNGKEGPAVSACSNIKPILSGKLVPAACTEVAKPGP

SEQ ID NO: 1853 - protein, 334 aa, Arabidopsis thaliana
  peptide (1)..(334): Ceres Seq. ID no. 12421379
  misc_feature (1)..(326): Pfam Name: Pfam Description:  Glycosyl hydrolases family 28
  misc_feature (1)..(334): NCBI GI NO: 15231880 NR Description: exopolygalacturonase; protein id: At3g07850
  misc_feature (1)..(334): NCBI GI NO: 421832 NR Description: polygalacturonase (EC 3.2.1.15)
  misc_feature (1)..(334): NCBI GI NO: 15231771 NR Description: exopolygalacturonase; protein id: At3g14040
  misc_feature (1)..(334): NCBI GI NO: 3004442 NR Description: polygalacturonase [Arabidopsis thaliana]
  misc_feature (1)..(334): NCBI GI NO: 421833 NR Description: polygalacturonase (EC 3.2.1.15)
  misc_feature (1)..(334): NCBI GI NO: 17064742 NR Description: polygalacturonase; pectinase
  misc_feature (1)..(327): NCBI GI NO: 3024386 NR Description: POLYGALACTURONASE PRECURSOR (PG) (PECTINASE)
  misc_feature (1)..(327): NCBI GI NO: 3024385 NR Description: POLYGALACTURONASE PRECURSOR (PG) (PECTINASE)
  misc_feature (1)..(326): NCBI GI NO: 6714530 NR Description: polygalacturonase [Salix gilgiana]
  misc_feature (1)..(327): NCBI GI NO: 129941 NR Description: EXOPOLYGALACTURONASE
MVESLEFKGPCKGPVTLELNGNFKAPATVKTTKPHAGWIDFENIADFTLNGNKAIFDGQGSLAWKANDCAKTGKCNSLPINIRFTGLTNSKINSITSTNSKLFHMNILNCKNITLSDIGIDAPPESLNTDGIHIGRSNGVNLIGAKIKTGDDCVSIGDGTENLIVENVECGPGHGISIGSLGRYPNEQPVKGVTVRKCLIKNTDNGVRIKTWPGSPPGIASNILFEDITMDNVSLPVLIDQEYCPYGHCKAGVPSQVKLSDVTIKGIKGTSATKVAVKLMCSKGVPCTNIALSDINLVHNGKEGPAVSACSNIKPILSGKLVPAACTEVAKPGP

SEQ ID NO: 1854 - DNA, 1396 bp, Arabidopsis thaliana
  misc_feature (1)..(1396): Ceres Seq. ID no. 12336379
aatgtattaagacttgacaacttgtctttctcacaccaaacccctctcctctgtttcataacatcttctctttttttttttcctaagcccctaatgacaaaccataatgccttaatctctgatgctaaaggcagcatcggagttgcggttagagttccaaaccaatctctgttttctcccggaggtggccgatacatcagcattccccggaagaaactcgtgcagaagctagaggccgacccgagtcaaacccgtatccacacttggatcgaagccatgagggcttcttccccaacccgtacccgaccggggaacatatctcccctcacggagtccgatgaggaggatgaatactcttcttggatggctcaacacccgtcagctttaaccatgtttgaagagatagctgaagcttcaaaagggaaacaaatcgtgatgtttctcgactatgacggtacattatcccccattgttgaaaaccctgatcgagcttacatgtctgaagagatgagagaggcagtgaaaggcgtggctagatatttcccgaccgcgattgtcactggaagatgccgtgataaggttcgtagatttgtgaaacttcccggactttactatgcaggtagccatggaatggacatcaaaggaccttccaaaagaaacaaacataataagaacaataaaggagttcttttccaagcggcgaatgagtttttgcctatgattgacaaggtctctaagtgtctagtagagaaaatgagagacatagaaggagcaaacgtcgagaacaacaagttttgtgtctccgtacattaccgttgtgttgatcaaaaggactggggattggtagcggaacacgtgacatcgatattgagtgagtatccgaaactgagtttgacacaaggaagaaaagtcttagagattcgaccaaccatcaaatgggataaaggcaaagctctcgagttcttgctcgaatccttaggattcgctaactctaacgatgttttgcccatctatataggagatgatcgtacggacgaggatgctttcaaggttttgagaaacaaaggacaaggctttggtatacttgtgtccaaaattccaaaggaaacgagtgctacatattctctacaagaaccttccgaggtaggagagtttttgcagcgactcgtggaatggaaacaaatgtcactaagaggaagatagccaatttcctgacataaatttattttcaattaataaatgaattagttttcactatgcaacaaaaattgttgtatatatgatcaatgtttttttaattattttactcttcatgaacaaatgtaagtttataggaactttcttaaccaagaaaaaaagtaagtttgctatataatattttcatcattctcttttt

SEQ ID NO: 1855 - protein, 400 aa, Arabidopsis thaliana
  peptide (1)..(400): Ceres Seq. ID no. 12336380
  misc_feature (147)..(380): Pfam Name: Pfam Description:  Trehalose-phosphatase
  misc_feature (32)..(400): NCBI GI NO: 21554408 NR Description: trehalose-phosphatase, putative
  misc_feature (32)..(400): NCBI GI NO: 18399940 NR Description: trehalose-phosphatase, putative
  misc_feature (32)..(400): NCBI GI NO: 25354597 NR Description: probable trehalose-phosphatase
  misc_feature (32)..(397): NCBI GI NO: 25354595 NR Description: trehalose-phosphatase (EC 3.1.3.12) B
  misc_feature (32)..(397): NCBI GI NO: 15218205 NR Description: trehalose-6-phosphate phosphatase
  misc_feature (32)..(390): NCBI GI NO: 15238360 NR Description: trehalose-6-phosphate phosphatase
  misc_feature (66)..(398): NCBI GI NO: 30683008 NR Description: trehalose-6-phosphate phosphatase, putative
  misc_feature (66)..(395): NCBI GI NO: 30692524 NR Description: trehalose-6-phosphate phosphatase, putative
  misc_feature (66)..(386): NCBI GI NO: 11282598 NR Description: trehalose-6-phosphate phosphatase-like protein -Arabidopsis thaliana
  misc_feature (85)..(397): NCBI GI NO: 15219843 NR Description: trehalose-6-phosphate phosphatase, putative
NVLRLDNLSFSHQTPLLCFITSSLFFFPKPLMTNHNALISDAKGSIGVAVRVPNQSLFSPGGGRYISIPRKKLVQKLEADPSQTRIHTWIEAMRASSPTRTRPGNISPLTESDEEDEYSSWMAQHPSALTMFEEIAEASKGKQIVMFLDYDGTLSPIVENPDRAYMSEEMREAVKGVARYFPTAIVTGRCRDKVRRFVKLPGLYYAGSHGMDIKGPSKRNKHNKNNKGVLFQAANEFLPMIDKVSKCLVEKMRDIEGANVENNKFCVSVHYRCVDQKDWGLVAEHVTSILSEYPKLSLTQGRKVLEIRPTIKWDKGKALEFLLESLGFANSNDVLPIYIGDDRTDEDAFKVLRNKGQGFGILVSKIPKETSATYSLQEPSEVGEFLQRLVEWKQMSLRGR

SEQ ID NO: 1856 - protein, 369 aa, Arabidopsis thaliana
  peptide (1)..(369): Ceres Seq. ID no. 12336381
  misc_feature (116)..(349): Pfam Name: Pfam Description:  Trehalose-phosphatase
  misc_feature (1)..(369): NCBI GI NO: 21554408 NR Description: trehalose-phosphatase, putative
  misc_feature (1)..(369): NCBI GI NO: 18399940 NR Description: trehalose-phosphatase, putative
  misc_feature (1)..(369): NCBI GI NO: 25354597 NR Description: probable trehalose-phosphatase
  misc_feature (1)..(366): NCBI GI NO: 25354595 NR Description: trehalose-phosphatase (EC 3.1.3.12) B
  misc_feature (1)..(366): NCBI GI NO: 15218205 NR Description: trehalose-6-phosphate phosphatase
  misc_feature (1)..(359): NCBI GI NO: 15238360 NR Description: trehalose-6-phosphate phosphatase
  misc_feature (35)..(367): NCBI GI NO: 30683008 NR Description: trehalose-6-phosphate phosphatase, putative
  misc_feature (35)..(364): NCBI GI NO: 30692524 NR Description: trehalose-6-phosphate phosphatase, putative
  misc_feature (35)..(355): NCBI GI NO: 11282598 NR Description: trehalose-6-phosphate phosphatase-like protein -Arabidopsis thaliana
  misc_feature (54)..(366): NCBI GI NO: 15219843 NR Description: trehalose-6-phosphate phosphatase, putative
MTNHNALISDAKGSIGVAVRVPNQSLFSPGGGRYISIPRKKLVQKLEADPSQTRIHTWIEAMRASSPTRTRPGNISPLTESDEEDEYSSWMAQHPSALTMFEEIAEASKGKQIVMFLDYDGTLSPIVENPDRAYMSEEMREAVKGVARYFPTAIVTGRCRDKVRRFVKLPGLYYAGSHGMDIKGPSKRNKHNKNNKGVLFQAANEFLPMIDKVSKCLVEKMRDIEGANVENNKFCVSVHYRCVDQKDWGLVAEHVTSILSEYPKLSLTQGRKVLEIRPTIKWDKGKALEFLLESLGFANSNDVLPIYIGDDRTDEDAFKVLRNKGQGFGILVSKIPKETSATYSLQEPSEVGEFLQRLVEWKQMSLRGR

SEQ ID NO: 1857 - protein, 308 aa, Arabidopsis thaliana
  peptide (1)..(308): Ceres Seq. ID no. 12336382
  misc_feature (55)..(288): Pfam Name: Pfam Description:  Trehalose-phosphatase
  misc_feature (1)..(308): NCBI GI NO: 21554408 NR Description: trehalose-phosphatase, putative
  misc_feature (1)..(308): NCBI GI NO: 18399940 NR Description: trehalose-phosphatase, putative
  misc_feature (1)..(308): NCBI GI NO: 25354597 NR Description: probable trehalose-phosphatase
  misc_feature (1)..(305): NCBI GI NO: 25354595 NR Description: trehalose-phosphatase (EC 3.1.3.12) B
  misc_feature (1)..(305): NCBI GI NO: 15218205 NR Description: trehalose-6-phosphate phosphatase
  misc_feature (1)..(298): NCBI GI NO: 15238360 NR Description: trehalose-6-phosphate phosphatase
  misc_feature (1)..(306): NCBI GI NO: 30683008 NR Description: trehalose-6-phosphate phosphatase, putative
  misc_feature (1)..(303): NCBI GI NO: 30692524 NR Description: trehalose-6-phosphate phosphatase, putative
  misc_feature (1)..(294): NCBI GI NO: 11282598 NR Description: trehalose-6-phosphate phosphatase-like protein -Arabidopsis thaliana
  misc_feature (1)..(305): NCBI GI NO: 15219843 NR Description: trehalose-6-phosphate phosphatase, putative
MRASSPTRTRPGNISPLTESDEEDEYSSWMAQHPSALTMFEEIAEASKGKQIVMFLDYDGTLSPIVENPDRAYMSEEMREAVKGVARYFPTAIVTGRCRDKVRRFVKLPGLYYAGSHGMDIKGPSKRNKHNKNNKGVLFQAANEFLPMIDKVSKCLVEKMRDIEGANVENNKFCVSVHYRCVDQKDWGLVAEHVTSILSEYPKLSLTQGRKVLEIRPTIKWDKGKALEFLLESLGFANSNDVLPIYIGDDRTDEDAFKVLRNKGQGFGILVSKIPKETSATYSLQEPSEVGEFLQRLVEWKQMSLRGR

SEQ ID NO: 1858 - DNA, 1622 bp, Arabidopsis thaliana
  misc_feature (1)..(1622): Ceres Seq. ID no. 13504804
agaaaacagaacaaaaaaaaacacaagaacagggcaaggaaaatgtcggttttcctctgtttcctcgtcctcttacccctgatcttaatcttcttgaacgttttgaaaccttcgaaatataagcttcctccgggtccaaagaagcttcccatcatcggaaacttacaccaacgcaggacactacatccgaggaatcgccgtaatctcgccgaaatgtatggaccagtggcgcttctccaatacggattcgtccccgtggtcgcgatctcttcgaaagaagcagcagaggaagtgctaaagatcaacgatcttgagtgttgtagtcgaccagaggcggccggaatgagagcaactttttacaacttcaaagacatcgggatggcacccttcggtgacgagtggagtctgatgcggaagctctcggtggtcgagctcttcagcgtgaaaaagcttcaatctttcaagtatatcatagaggaagagaataacttgtgtgtcaagaaactctctgagtttgctacgagacaatctccggtgaatcttgagagagccattttcactttagtcggaaatatagtgtgtcgtatcgggtacgggataaatctctatgagtgtgatttctttgaagctgatagagtcgtggatcttgtgctaaaggctgaagcggtcataagagaaactgtgttctctgatttctttcccggaagaatcggtaggttcatcgactgtatctccggtcagaacaggagattgaagaataatttctcggtagtagacactttctttcagaatgttcttaacgagcatcttaagcctggaagagagagctctactattgttgacttgatgatcgatatgaagaagaagcaagagaacgatggagatgctctcaagttcaccactgatcatctcaaaggaatgatctcggacatatttgtagcagggattggtggagtcgctggcataacactatggggaatgaccgagctgatcagaaacccaagagtgatgaagaaagtgcaagacgagattcggacaacacttggggacaagaaggagagaatcaaagaagaagatctaaaccaacttcactactttaagctcgtggtcaaggagacattaaggttacatccaacaactccactcttgctcccaagacagacaatgtctcatatcaagattcaaggctacgatgttcctgcgaaaacacagatcttagtcaacgtttatgcgatgggtcgtgatccaaaactctgggaaaacgcagatgagtttaaccctgacaggtttctcgacagttccgttgattttaaaggaaaaaactacgagtttataccgtttggatctggtaggagaatatgtccagggatgacaatgggtaccatacttgttgagatggcattgttgaatttgctttacttcttcgattggggattggcgaagcaggaggaagccaaagagatcatcaatggggaagaaaattttctagccttctttcaagttcttcaccactgaatatatggtttggttcctatcaaaaaaaatatatatatatggttttgttatgtacactagtttctaagataataaatgaaaattgtatctgcttttgatttagtttc

SEQ ID NO: 1859 - protein, 504 aa, Arabidopsis thaliana
  peptide (1)..(504): Ceres Seq. ID no. 13504805
  misc_feature (15)..(504): NCBI GI NO: 15231632 NR Description: cytochrome P450 71B15 [Arabidopsis thaliana]
  misc_feature (15)..(504): NCBI GI NO: 15222177 NR Description: cytochrome P450 71B28 [Arabidopsis thaliana]
  misc_feature (15)..(504): NCBI GI NO: 21618278 NR Description: putative cytochrome P450 monooxygenase
  misc_feature (15)..(504): NCBI GI NO: 15222180 NR Description: cytochrome P450 71B29 [Arabidopsis thaliana]
  misc_feature (15)..(493): NCBI GI NO: 15222182 NR Description: cytochrome P450 71B7 [Arabidopsis thaliana]
  misc_feature (15)..(493): NCBI GI NO: 15231526 NR Description: cytochrome P450 71B23 [Arabidopsis thaliana]
  misc_feature (15)..(504): NCBI GI NO: 15231524 NR Description: cytochrome P450 71B21 [Arabidopsis thaliana]
  misc_feature (15)..(488): NCBI GI NO: 15231525 NR Description: cytochrome P450 71B22 [Arabidopsis thaliana]
  misc_feature (15)..(495): NCBI GI NO: 30923413 NR Description: Cytochrome P450 71B38
  misc_feature (15)..(495): NCBI GI NO: 15229913 NR Description: cytochrome P450 family [Arabidopsis thaliana]
RKQNKKKHKNRARKMSVFLCFLVLLPLILIFLNVLKPSKYKLPPGPKKLPIIGNLHQRRTLHPRNRRNLAEMYGPVALLQYGFVPVVAISSKEAAEEVLKINDLECCSRPEAAGMRATFYNFKDIGMAPFGDEWSLMRKLSVVELFSVKKLQSFKYIIEEENNLCVKKLSEFATRQSPVNLERAIFTLVGNIVCRIGYGINLYECDFFEADRVVDLVLKAEAVIRETVFSDFFPGRIGRFIDCISGQNRRLKNNFSVVDTFFQNVLNEHLKPGRESSTIVDLMIDMKKKQENDGDALKFTTDHLKGMISDIFVAGIGGVAGITLWGMTELIRNPRVMKKVQDEIRTTLGDKKERIKEEDLNQLHYFKLVVKETLRLHPTTPLLLPRQTMSHIKIQGYDVPAKTQILVNVYAMGRDPKLWENADEFNPDRFLDSSVDFKGKNYEFIPFGSGRRICPGMTMGTILVEMALLNLLYFFDWGLAKQEEAKEIINGEENFLAFFQVLHH

SEQ ID NO: 1860 - protein, 490 aa, Arabidopsis thaliana
  peptide (1)..(490): Ceres Seq. ID no. 13504806
  misc_feature (1)..(490): NCBI GI NO: 15231632 NR Description: cytochrome P450 71B15 [Arabidopsis thaliana]
  misc_feature (1)..(490): NCBI GI NO: 15222177 NR Description: cytochrome P450 71B28 [Arabidopsis thaliana]
  misc_feature (1)..(490): NCBI GI NO: 21618278 NR Description: putative cytochrome P450 monooxygenase
  misc_feature (1)..(490): NCBI GI NO: 15222180 NR Description: cytochrome P450 71B29 [Arabidopsis thaliana]
  misc_feature (1)..(479): NCBI GI NO: 15222182 NR Description: cytochrome P450 71B7 [Arabidopsis thaliana]
  misc_feature (1)..(479): NCBI GI NO: 15231526 NR Description: cytochrome P450 71B23 [Arabidopsis thaliana]
  misc_feature (1)..(490): NCBI GI NO: 15231524 NR Description: cytochrome P450 71B21 [Arabidopsis thaliana]
  misc_feature (1)..(474): NCBI GI NO: 15231525 NR Description: cytochrome P450 71B22 [Arabidopsis thaliana]
  misc_feature (1)..(481): NCBI GI NO: 30923413 NR Description: Cytochrome P450 71B38
  misc_feature (1)..(481): NCBI GI NO: 15229913 NR Description: cytochrome P450 family [Arabidopsis thaliana]
MSVFLCFLVLLPLILIFLNVLKPSKYKLPPGPKKLPIIGNLHQRRTLHPRNRRNLAEMYGPVALLQYGFVPVVAISSKEAAEEVLKINDLECCSRPEAAGMRATFYNFKDIGMAPFGDEWSLMRKLSVVELFSVKKLQSFKYIIEEENNLCVKKLSEFATRQSPVNLERAIFTLVGNIVCRIGYGINLYECDFFEADRVVDLVLKAEAVIRETVFSDFFPGRIGRFIDCISGQNRRLKNNFSVVDTFFQNVLNEHLKPGRESSTIVDLMIDMKKKQENDGDALKFTTDHLKGMISDIFVAGIGGVAGITLWGMTELIRNPRVMKKVQDEIRTTLGDKKERIKEEDLNQLHYFKLVVKETLRLHPTTPLLLPRQTMSHIKIQGYDVPAKTQILVNVYAMGRDPKLWENADEFNPDRFLDSSVDFKGKNYEFIPFGSGRRICPGMTMGTILVEMALLNLLYFFDWGLAKQEEAKEIINGEENFLAFFQVLHH

SEQ ID NO: 1861 - protein, 433 aa, Arabidopsis thaliana
  peptide (1)..(433): Ceres Seq. ID no. 13504807
  misc_feature (1)..(433): NCBI GI NO: 15231632 NR Description: cytochrome P450 71B15 [Arabidopsis thaliana]
  misc_feature (1)..(433): NCBI GI NO: 15222177 NR Description: cytochrome P450 71B28 [Arabidopsis thaliana]
  misc_feature (1)..(433): NCBI GI NO: 21618278 NR Description: putative cytochrome P450 monooxygenase
  misc_feature (1)..(433): NCBI GI NO: 15222180 NR Description: cytochrome P450 71B29 [Arabidopsis thaliana]
  misc_feature (1)..(422): NCBI GI NO: 15222182 NR Description: cytochrome P450 71B7 [Arabidopsis thaliana]
  misc_feature (1)..(422): NCBI GI NO: 15231526 NR Description: cytochrome P450 71B23 [Arabidopsis thaliana]
  misc_feature (1)..(433): NCBI GI NO: 15231524 NR Description: cytochrome P450 71B21 [Arabidopsis thaliana]
  misc_feature (1)..(417): NCBI GI NO: 15231525 NR Description: cytochrome P450 71B22 [Arabidopsis thaliana]
  misc_feature (1)..(424): NCBI GI NO: 30923413 NR Description: Cytochrome P450 71B38
  misc_feature (1)..(424): NCBI GI NO: 15229913 NR Description: cytochrome P450 family [Arabidopsis thaliana]
MYGPVALLQYGFVPVVAISSKEAAEEVLKINDLECCSRPEAAGMRATFYNFKDIGMAPFGDEWSLMRKLSVVELFSVKKLQSFKYIIEEENNLCVKKLSEFATRQSPVNLERAIFTLVGNIVCRIGYGINLYECDFFEADRVVDLVLKAEAVIRETVFSDFFPGRIGRFIDCISGQNRRLKNNFSVVDTFFQNVLNEHLKPGRESSTIVDLMIDMKKKQENDGDALKFTTDHLKGMISDIFVAGIGGVAGITLWGMTELIRNPRVMKKVQDEIRTTLGDKKERIKEEDLNQLHYFKLVVKETLRLHPTTPLLLPRQTMSHIKIQGYDVPAKTQILVNVYAMGRDPKLWENADEFNPDRFLDSSVDFKGKNYEFIPFGSGRRICPGMTMGTILVEMALLNLLYFFDWGLAKQEEAKEIINGEENFLAFFQVLHH

SEQ ID NO: 1862 - DNA, 1463 bp, Arabidopsis thaliana
  misc_feature (1)..(1463): Ceres Seq. ID no. 12560077
ataattctagccaaatctttttagggtttcacaagttcacttaaaaagttgaaaagagtctttcttcttcaactattgtaaatgcgaaatggatcgaagagatgcaatgggattatccgggtcaggttcttactatatccatagaggattatccgggtcgggtcctccaacgtttcatggatcaccacagcaacagcaaggtcttcgtcacttacctaatcaaaactctccattcgggtcaggctccactggtttcggatctccttctttacacggtgatccttctctggcaacagcagccggaggagccggagctcttcctcatcatatcggcgttaatatgattgctcctcctccacctcccagtgaaactccgatgaaacgaaagagaggacggcctagaaaatacggtcaagacggctctgtttctttggctctgtcgtcttcctctgtttcgaccattactcccaacaactctaacaaacgcggccgtggtcgacctccgggctccggcaagaaacagagaatggcttccgttggtgaactgatgccttcatcttctggaatgagcttcacgccacatgttatcgcggtttcaataggagaagatattgcatcaaaggttatagctttctctcaacaaggtccgagagccatttgcgttttatctgcaagtggtgcagtctctactgcaacacttattcaaccatcagcatctcccggagccattaaatacgagggccggtttgaaatcctagcgttatcaacatcttatatagtggcaactgatggaagcttccgtaaccgaactggaaacttatcggtttcgcttgctagccccgatgggcgtgtgattggcggtgccattggtgggcctttaatagctgcaagtcctgttcaggttattgtagggagctttatatgggcagctccaaagatcaagagcaagaaacgagaagaagaagcttctgaagttgttcaagaaactgatgatcaccacgttctggacaataataacaacacgatttcgcctgtccctcagcagcagccaaaccaaaacctgatttggtcaacaggttcaaggcaaatggatatgcgtcatgctcatgctgatattgatttaatgcgcggttgatgatagcgagaaagaactctgtgtatataaagcatggaatctaggaagaagaagaaggaatataagctaacctctgaacaaaagtatgtggaaatgttagggaaaaagattatgtggaaatgttagggaaaaagattaactctattagtgtacctctcatatctctaagcttgtttggttttactgtttctgtgactctgaagatttgcagagttcctttctttctctgttttagattgttcagtctttatgtaatttgcttgcaattctgattctacagcttagattcagtacattgtgtagaagtttacatgggaacctgaaaatt

SEQ ID NO: 1863 - protein, 348 aa, Arabidopsis thaliana
  peptide (1)..(348): Ceres Seq. ID no. 12560078
  misc_feature (1)..(348): NCBI GI NO: 15225902 NR Description: putative AT-hook DNA-binding protein
  misc_feature (1)..(348): NCBI GI NO: 30695388 NR Description: DNA-binding protein -related
  misc_feature (7)..(348): NCBI GI NO: 11281387 NR Description: probable DNA-binding protein - Arabidopsis thaliana
  misc_feature (1)..(348): NCBI GI NO: 7488825 NR Description: probable DNA-binding protein - garden pea
  misc_feature (1)..(337): NCBI GI NO: 2213534 NR Description: DNA-binding PD1-like protein [Pisum sativum]
  misc_feature (1)..(348): NCBI GI NO: 30696854 NR Description: DNA-binding protein -related
  misc_feature (1)..(321): NCBI GI NO: 6633838 NR Description: F2K11.15 [Arabidopsis thaliana]
  misc_feature (1)..(348): NCBI GI NO: 22330402 NR Description: DNA-binding protein, putative
  misc_feature (1)..(317): NCBI GI NO: 6633838 NR Description: F2K11.15 [Arabidopsis thaliana]
  misc_feature (89)..(348): NCBI GI NO: 6633838 NR Description: F2K11.15 [Arabidopsis thaliana]
MDRRDAMGLSGSGSYYIHRGLSGSGPPTFHGSPQQQQGLRHLPNQNSPFGSGSTGFGSPSLHGDPSLATAAGGAGALPHHIGVNMIAPPPPPSETPMKRKRGRPRKYGQDGSVSLALSSSSVSTITPNNSNKRGRGRPPGSGKKQRMASVGELMPSSSGMSFTPHVIAVSIGEDIASKVIAFSQQGPRAICVLSASGAVSTATLIQPSASPGAIKYEGRFEILALSTSYIVATDGSFRNRTGNLSVSLASPDGRVIGGAIGGPLIAASPVQVIVGSFIWAAPKIKSKKREEEASEVVQETDDHHVLDNNNNTISPVPQQQPNQNLIWSTGSRQMDMRHAHADIDLMRG

SEQ ID NO: 1864 - protein, 342 aa, Arabidopsis thaliana
  peptide (1)..(342): Ceres Seq. ID no. 12560079
  misc_feature (1)..(342): NCBI GI NO: 15225902 NR Description: putative AT-hook DNA-binding protein
  misc_feature (1)..(342): NCBI GI NO: 30695388 NR Description: DNA-binding protein -related
  misc_feature (1)..(342): NCBI GI NO: 11281387 NR Description: probable DNA-binding protein - Arabidopsis thaliana
  misc_feature (1)..(342): NCBI GI NO: 7488825 NR Description: probable DNA-binding protein - garden pea
  misc_feature (1)..(331): NCBI GI NO: 2213534 NR Description: DNA-binding PD1-like protein [Pisum sativum]
  misc_feature (1)..(342): NCBI GI NO: 30696854 NR Description: DNA-binding protein -related
  misc_feature (1)..(315): NCBI GI NO: 6633838 NR Description: F2K11.15 [Arabidopsis thaliana]
  misc_feature (1)..(342): NCBI GI NO: 22330402 NR Description: DNA-binding protein, putative
  misc_feature (1)..(311): NCBI GI NO: 6633838 NR Description: F2K11.15 [Arabidopsis thaliana]
  misc_feature (83)..(342): NCBI GI NO: 6633838 NR Description: F2K11.15 [Arabidopsis thaliana]
MGLSGSGSYYIHRGLSGSGPPTFHGSPQQQQGLRHLPNQNSPFGSGSTGFGSPSLHGDPSLATAAGGAGALPHHIGVNMIAPPPPPSETPMKRKRGRPRKYGQDGSVSLALSSSSVSTITPNNSNKRGRGRPPGSGKKQRMASVGELMPSSSGMSFTPHVIAVSIGEDIASKVIAFSQQGPRAICVLSASGAVSTATLIQPSASPGAIKYEGRFEILALSTSYIVATDGSFRNRTGNLSVSLASPDGRVIGGAIGGPLIAASPVQVIVGSFIWAAPKIKSKKREEEASEVVQETDDHHVLDNNNNTISPVPQQQPNQNLIWSTGSRQMDMRHAHADIDLMRG

SEQ ID NO: 1865 - protein, 264 aa, Arabidopsis thaliana
  peptide (1)..(264): Ceres Seq. ID no. 12560080
  misc_feature (1)..(264): NCBI GI NO: 15225902 NR Description: putative AT-hook DNA-binding protein
  misc_feature (1)..(264): NCBI GI NO: 30695388 NR Description: DNA-binding protein -related
  misc_feature (1)..(264): NCBI GI NO: 11281387 NR Description: probable DNA-binding protein - Arabidopsis thaliana
  misc_feature (1)..(264): NCBI GI NO: 7488825 NR Description: probable DNA-binding protein - garden pea
  misc_feature (1)..(253): NCBI GI NO: 2213534 NR Description: DNA-binding PD1-like protein [Pisum sativum]
  misc_feature (1)..(264): NCBI GI NO: 30696854 NR Description: DNA-binding protein -related
  misc_feature (1)..(237): NCBI GI NO: 6633838 NR Description: F2K11.15 [Arabidopsis thaliana]
  misc_feature (1)..(264): NCBI GI NO: 22330402 NR Description: DNA-binding protein, putative
  misc_feature (1)..(233): NCBI GI NO: 6633838 NR Description: F2K11.15 [Arabidopsis thaliana]
  misc_feature (5)..(264): NCBI GI NO: 6633838 NR Description: F2K11.15 [Arabidopsis thaliana]
MIAPPPPPSETPMKRKRGRPRKYGQDGSVSLALSSSSVSTITPNNSNKRGRGRPPGSGKKQRMASVGELMPSSSGMSFTPHVIAVSIGEDIASKVIAFSQQGPRAICVLSASGAVSTATLIQPSASPGAIKYEGRFEILALSTSYIVATDGSFRNRTGNLSVSLASPDGRVIGGAIGGPLIAASPVQVIVGSFIWAAPKIKSKKREEEASEVVQETDDHHVLDNNNNTISPVPQQQPNQNLIWSTGSRQMDMRHAHADIDLMRG

SEQ ID NO: 1866 - DNA, 1539 bp, Arabidopsis thaliana
  misc_feature (1)..(1539): Ceres Seq. ID no. 13501397
atgacaagttggttttttttttttttttttaattttttcatcttcttgggtttggttgggtcactcttcaggtcaggtgtgtaaaaaagaaagaaagaaaagagagattgttgtgttgtaacccctttgactaaaatctaatgaacttttttaacacaacaaaactccttcagatctgaaagggttcttcttctctcttagtctctttgtccttttattctccgtcgtcgtttcatgatctgactctctggtcttctcttcttcttcttcttcttctattttttcttacttcgtcactgttgtgtctgaacatgccacgccctttcttccataagttgattttctcatccactatccaagaaaaacgtctgagggtcccagataagtttgtgagtaaattcaaggatgagctttcggttgctgttgcactcacagtacctgatggtcatgtttggcgtgtaggactaaggaaagctgacaacaaaatttggtttcaagatggttggcaagagtttgttgaccgttactccattcgcattggttatcttttgatttttagatatgaaggaaactctgccttcagcgtctacattttcaatttatcccactctgagatcaattaccattccaccggtctcatggattccgctcacaaccacttcaaacgcgcccgtttgtttgaagaccttgaagatgaagatgccgaggtcatctttccttcttctgtgtacccatcaccacttcctgagtctacagtaccagccaacaaagggtatgctagttcagccatccaaaccttgttcactggaccagttaaagctgaagagccaacgccaaccccaaaaatacctaaaaagagagggaggaagaagaaaaatgctgatcctgaggaaataaactcatcagctccgcgagatgatgatccagagaaccgttcaaagttctacgagagtgcttctgcgagaaagagaaccgtgactgcagaagaaagagagagagccatcaatgcagccaaaacgttcgaaccaacaaaccctttcttcagagtggttctgcgaccatcctatctatacagaggttgcatcatgtatcttccttctgggtttgctgagaagtacctaagtgggatctccgggttcatcaaagtccagcttgcggagaaacaatggcctgttcgatgtctctacaaagccgggagagccaaattcagtcaaggatggtacgaattcactctagagaacaacttaggagaaggagacgtctgtgtgtttgagctgctcagaaccagagatttcgttttgaaagtgacagcctttcgagtcaacgagtacgtctgaacaaagcattatggtgtgatcattctggatttgcaagtacaatgtcgtgtaggagtatcttaatttaaaaacaactaaaaaactctcttctggtctgtgtcattattgcgtcagtgtctcgttttttctctcgggtttactttgtgttatcgatgtggataagttgtttttacctcattatatataacctcttgagtggaac

SEQ ID NO: 1867 - protein, 341 aa, Arabidopsis thaliana
  peptide (1)..(341): Ceres Seq. ID no. 13501398
  misc_feature (243)..(340): Pfam Name: Pfam Description:  B3 DNA binding domain
  misc_feature (1)..(341): NCBI GI NO: 30685150 NR Description: transcriptional factor B3 family
  misc_feature (1)..(341): NCBI GI NO: 40806799 NR Description: reduced vernalization response 1 [Brassica rapa]
  misc_feature (1)..(341): NCBI GI NO: 33943517 NR Description: reduced vernalization response 1 [Brassica rapa]
  misc_feature (110)..(341): NCBI GI NO: 9280316 NR Description: gb|AAD43153
  misc_feature (110)..(341): NCBI GI NO: 18402653 NR Description: transcriptional factor B3 family
  misc_feature (110)..(341): NCBI GI NO: 14596161 NR Description: Unknown protein [Arabidopsis thaliana]
  misc_feature (212)..(339): NCBI GI NO: 34910734 NR Description: P0022F10.13
  misc_feature (3)..(101): NCBI GI NO: 34910734 NR Description: P0022F10.13
  misc_feature (6)..(104): NCBI GI NO: 15234250 NR Description: transcriptional factor B3 family
  misc_feature (185)..(336): NCBI GI NO: 28201561 NR Description: putative auxin response factor
MPRPFFHKLIFSSTIQEKRLRVPDKFVSKFKDELSVAVALTVPDGHVWRVGLRKADNKIWFQDGWQEFVDRYSIRIGYLLIFRYEGNSAFSVYIFNLSHSEINYHSTGLMDSAHNHFKRARLFEDLEDEDAEVIFPSSVYPSPLPESTVPANKGYASSAIQTLFTGPVKAEEPTPTPKIPKKRGRKKKNADPEEINSSAPRDDDPENRSKFYESASARKRTVTAEERERAINAAKTFEPTNPFFRVVLRPSYLYRGCIMYLPSGFAEKYLSGISGFIKVQLAEKQWPVRCLYKAGRAKFSQGWYEFTLENNLGEGDVCVFELLRTRDFVLKVTAFRVNEYV

SEQ ID NO: 1868 - protein, 232 aa, Arabidopsis thaliana
  peptide (1)..(232): Ceres Seq. ID no. 13501399
  misc_feature (134)..(231): Pfam Name: Pfam Description:  B3 DNA binding domain
  misc_feature (1)..(232): NCBI GI NO: 30685150 NR Description: transcriptional factor B3 family
  misc_feature (1)..(232): NCBI GI NO: 40806799 NR Description: reduced vernalization response 1 [Brassica rapa]
  misc_feature (1)..(232): NCBI GI NO: 33943517 NR Description: reduced vernalization response 1 [Brassica rapa]
  misc_feature (1)..(232): NCBI GI NO: 9280316 NR Description: gb|AAD43153
  misc_feature (1)..(232): NCBI GI NO: 18402653 NR Description: transcriptional factor B3 family
  misc_feature (1)..(232): NCBI GI NO: 14596161 NR Description: Unknown protein [Arabidopsis thaliana]
  misc_feature (103)..(230): NCBI GI NO: 34910734 NR Description: P0022F10.13
  misc_feature (76)..(227): NCBI GI NO: 28201561 NR Description: putative auxin response factor
  misc_feature (58)..(223): NCBI GI NO: 28201553 NR Description: putative auxin response factor
  misc_feature (1)..(213): NCBI GI NO: 28201564 NR Description: putative auxin response factor
MDSAHNHFKRARLFEDLEDEDAEVIFPSSVYPSPLPESTVPANKGYASSAIQTLFTGPVKAEEPTPTPKIPKKRGRKKKNADPEEINSSAPRDDDPENRSKFYESASARKRTVTAEERERAINAAKTFEPTNPFFRVVLRPSYLYRGCIMYLPSGFAEKYLSGISGFIKVQLAEKQWPVRCLYKAGRAKFSQGWYEFTLENNLGEGDVCVFELLRTRDFVLKVTAFRVNEYV

SEQ ID NO: 1869 - DNA, 796 bp, Arabidopsis thaliana
  misc_feature (1)..(796): Ceres Seq. ID no. 12420942
ttgtcaaaagctgattcttcgccttatggcatcgattttgcaccttcgaacggccaacccacgggaagattcactaatggtcgaaccatttccgatattgtgggtgaagccttaggagcaaaatcaccaccaccaccatatcttgaaccaaacactgaggctaacacaattctcaatggaatcaactatgcttctggtgctgctggaatcttggacgacactggacttctggttcatcggggcgagttccgctgagagaacaagtgagtaattttgagaagagtagagaatatatggtaagcgtgattggtgaaaatggtacaaaagagatgttgaagaatgcaatgttcacaatcacaattggatcaaatgatattttgaattatattcaaccatcaatacctttcttctctcaagacaagctccccactgatgtcctacaagattccatggtcctccatttaaccacacatcttaagcgattgcatcagctaggaggtaggaagttcgtggtggttggagtagggccactcggttgcataccctttgctcgagcgttgaatttaataccagccggaaaatgctccgaacaagtcaaccaagtagtccgaggttataacatgaagcttatacactctcttaagacattgaacaatgagttaagatccgaagattacaacactacatttgtctacgccaactcttacgacctattcttgaaactagttttgaactatcaactatttggcttgaagaacgcagacaagccgtgttgtggcggctactttccaccgtt

SEQ ID NO: 1870 - protein, 167 aa, Arabidopsis thaliana
  peptide (1)..(167): Ceres Seq. ID no. 12420943
  misc_feature (1)..(166): Pfam Name: Pfam Description:  GDSL-like Lipase/Acylhydrolase
  misc_feature (1)..(166): NCBI GI NO: 15238210 NR Description: GDSL-motif lipase/hydrolase-like protein
  misc_feature (1)..(166): NCBI GI NO: 38345537 NR Description: OSJNBa0020J04.12
  misc_feature (1)..(161): NCBI GI NO: 15229742 NR Description: putative protein; protein id: At3g50400.1
  misc_feature (1)..(162): NCBI GI NO: 15227849 NR Description: putative GDSL-motif lipase/hydrolase
  misc_feature (1)..(162): NCBI GI NO: 34899288 NR Description: similar to GDSL-motif lipase/hydrolase
  misc_feature (1)..(162): NCBI GI NO: 15241626 NR Description: GDSL-motif lipase acylhydrolase-like protein
  misc_feature (1)..(162): NCBI GI NO: 18409881 NR Description: hypothetical protein; protein id: At1g71691.1
  misc_feature (1)..(164): NCBI GI NO: 15221260 NR Description: putative lipase/acylhydrolase
  misc_feature (1)..(162): NCBI GI NO: 11280578 NR Description: hypothetical protein F14F8_100 - Arabidopsis thaliana
  misc_feature (1)..(162): NCBI GI NO: 15220512 NR Description: lipase/hydrolase, putative; protein id: At1g29660
MVSVIGENGTKEMLKNAMFTITIGSNDILNYIQPSIPFFSQDKLPTDVLQDSMVLHLTTHLKRLHQLGGRKFVVVGVGPLGCIPFARALNLIPAGKCSEQVNQVVRGYNMKLIHSLKTLNNELRSEDYNTTFVYANSYDLFLKLVLNYQLFGLKNADKPCCGGYFPP

SEQ ID NO: 1871 - protein, 155 aa, Arabidopsis thaliana
  peptide (1)..(155): Ceres Seq. ID no. 12420944
  misc_feature (1)..(154): Pfam Name: Pfam Description:  GDSL-like Lipase/Acylhydrolase
  misc_feature (1)..(154): NCBI GI NO: 15238210 NR Description: GDSL-motif lipase/hydrolase-like protein
  misc_feature (1)..(154): NCBI GI NO: 38345537 NR Description: OSJNBa0020J04.12
  misc_feature (1)..(149): NCBI GI NO: 15229742 NR Description: putative protein; protein id: At3g50400.1
  misc_feature (1)..(150): NCBI GI NO: 15227849 NR Description: putative GDSL-motif lipase/hydrolase
  misc_feature (1)..(150): NCBI GI NO: 34899288 NR Description: similar to GDSL-motif lipase/hydrolase
  misc_feature (1)..(150): NCBI GI NO: 15241626 NR Description: GDSL-motif lipase acylhydrolase-like protein
  misc_feature (1)..(150): NCBI GI NO: 18409881 NR Description: hypothetical protein; protein id: At1g71691.1
  misc_feature (1)..(152): NCBI GI NO: 15221260 NR Description: putative lipase/acylhydrolase
  misc_feature (1)..(150): NCBI GI NO: 11280578 NR Description: hypothetical protein F14F8_100 - Arabidopsis thaliana
  misc_feature (1)..(150): NCBI GI NO: 15220512 NR Description: lipase/hydrolase, putative; protein id: At1g29660
MLKNAMFTITIGSNDILNYIQPSIPFFSQDKLPTDVLQDSMVLHLTTHLKRLHQLGGRKFVVVGVGPLGCIPFARALNLIPAGKCSEQVNQVVRGYNMKLIHSLKTLNNELRSEDYNTTFVYANSYDLFLKLVLNYQLFGLKNADKPCCGGYFPP

SEQ ID NO: 1872 - protein, 150 aa, Arabidopsis thaliana
  peptide (1)..(150): Ceres Seq. ID no. 12420945
  misc_feature (1)..(149): Pfam Name: Pfam Description:  GDSL-like Lipase/Acylhydrolase
  misc_feature (1)..(149): NCBI GI NO: 15238210 NR Description: GDSL-motif lipase/hydrolase-like protein
  misc_feature (1)..(149): NCBI GI NO: 38345537 NR Description: OSJNBa0020J04.12
  misc_feature (1)..(144): NCBI GI NO: 15229742 NR Description: putative protein; protein id: At3g50400.1
  misc_feature (1)..(145): NCBI GI NO: 15227849 NR Description: putative GDSL-motif lipase/hydrolase
  misc_feature (1)..(145): NCBI GI NO: 34899288 NR Description: similar to GDSL-motif lipase/hydrolase
  misc_feature (1)..(145): NCBI GI NO: 15241626 NR Description: GDSL-motif lipase acylhydrolase-like protein
  misc_feature (1)..(145): NCBI GI NO: 18409881 NR Description: hypothetical protein; protein id: At1g71691.1
  misc_feature (1)..(147): NCBI GI NO: 15221260 NR Description: putative lipase/acylhydrolase
  misc_feature (1)..(145): NCBI GI NO: 11280578 NR Description: hypothetical protein F14F8_100 - Arabidopsis thaliana
  misc_feature (1)..(145): NCBI GI NO: 15220512 NR Description: lipase/hydrolase, putative; protein id: At1g29660
MFTITIGSNDILNYIQPSIPFFSQDKLPTDVLQDSMVLHLTTHLKRLHQLGGRKFVVVGVGPLGCIPFARALNLIPAGKCSEQVNQVVRGYNMKLIHSLKTLNNELRSEDYNTTFVYANSYDLFLKLVLNYQLFGLKNADKPCCGGYFPP

SEQ ID NO: 1873 - DNA, 611 bp, Arabidopsis thaliana
  misc_feature (1)..(611): Ceres Seq. ID no. 12393994
aataataatattcgagtagaagaagaaagatccagacaaaagcttaagcaagacctctctgtcttcgtctctctctctctctctttgtctccgccatgacaagctcttcatctcctgcacgcaaggcgttaagcaagatcgcgtgtaataggttacaaaaggagttatcagagtggcaagtaaatccaccgactgggtttaagcacagagttactgataatcttcaaaaatgggtaattgaggtaacaggagcacctggtacgctttacgctaatgaaacttataatcttcaggttgagtttcctcaacattatcctatggaagctcctcaggtgatttttgttccaccagctccgttacatcctcatatttacagcaatggacatatttgtttagatattctgtatgactcatggtctccagcaatgacagtgagttcagtctgtatcagcattctctcgatgctatcaagttcacccgaaaagcaacgccccacttttttttctgtaacggatcattatgtataaatgacatctgaaatgtttcagtgtctgaattaacaccttgtgcttttgtcctttctgaagtgaaaaaccatggagattttaggc

SEQ ID NO: 1874 - protein, 143 aa, Arabidopsis thaliana
  peptide (1)..(143): Ceres Seq. ID no. 12393995
  misc_feature (1)..(143): NCBI GI NO: 18422281 NR Description: E2, ubiquitin-conjugating enzyme 18
  misc_feature (1)..(143): NCBI GI NO: 18401461 NR Description: E2, ubiquitin-conjugating enzyme 15
  misc_feature (1)..(143): NCBI GI NO: 481811 NR Description: ubiquitin-conjugating enzyme UBC2-1
  misc_feature (1)..(143): NCBI GI NO: 18410856 NR Description: E2, ubiquitin-conjugating enzyme 16
  misc_feature (1)..(130): NCBI GI NO: 34897008 NR Description: putative ubiquitin-conjugating enzyme E2
  misc_feature (1)..(143): NCBI GI NO: 2801444 NR Description: ubiquitin-conjugating enzyme 16
  misc_feature (1)..(143): NCBI GI NO: 18419831 NR Description: E2, ubiquitin-conjugating enzyme 17
  misc_feature (1)..(133): NCBI GI NO: 4090259 NR Description: ubiquitin-conjugating enzyme E2
  misc_feature (1)..(102): NCBI GI NO: 25293672 NR Description: protein F27F5.13 [imported] - Arabidopsis thaliana
  misc_feature (65)..(143): NCBI GI NO: 25293670 NR Description: ubiquitin-conjugating enzyme 18
MTSSSSPARKALSKIACNRLQKELSEWQVNPPTGFKHRVTDNLQKWVIEVTGAPGTLYANETYNLQVEFPQHYPMEAPQVIFVPPAPLHPHIYSNGHICLDILYDSWSPAMTVSSVCISILSMLSSSPEKQRPTFFSVTDHYV

SEQ ID NO: 1875 - DNA, 529 bp, Arabidopsis thaliana
  misc_feature (1)..(529): Ceres Seq. ID no. 13491786
  misc_feature (504)..(504): n is a, c, t, g, unknown, or other
  misc_feature (491)..(491): n is a, c, t, g, unknown, or other
ataacacaaatacaccaaaaaaaaaaaaacagaaagtaacatgagatctctcttattagccgtgtgcctggttcttgctttacactgcggtgaagcagccgtgtcttgcaacacggtgattgcggatctttacccttgcttatcctacgtgactcagggcggaccggtcccaaccctctgctgcaacggtctcacaacactcaagagtcaggctcaaacttctgtggaccgtcagggggtctgtcgttgcatcaaatctgctattggaggactcactctctctcctagaaccatccaaaatgctttggaattgccttctaaatgtggtgtcgatctcccttacaagttcagcccttccactgactgcgacagtatccagtgagacaagcagaaaatcttaaaggaagctactacaagaactataataacctaataattaataaatgagggcattggtttgctagttgctaaattgatcagtgatgtattgncattttgaatgtnctaatctcagcaggcacttatctcc

SEQ ID NO: 1876 - protein, 113 aa, Arabidopsis thaliana; identical to SEQ ID NO: 1247
  peptide (1)..(113): Ceres Seq. ID no. 13491787
  misc_feature (23)..(109): Pfam Name: Pfam Description:  Protease inhibitor/seed storage/LTP family
  misc_feature (1)..(113): NCBI GI NO: 15231964 NR Description: lipid transfer protein 6 (ltp6)
  misc_feature (1)..(113): NCBI GI NO: 15241086 NR Description: lipid transfer protein, putative
  misc_feature (8)..(113): NCBI GI NO: 16903206 NR Description: lipid transfer protein precursor
  misc_feature (3)..(113): NCBI GI NO: 6782436 NR Description: lipid-transfer protein [Nicotiana glauca]
  misc_feature (4)..(113): NCBI GI NO: 2497753 NR Description: NONSPECIFIC LIPID-TRANSFER PROTEIN 3 PRECURSOR
  misc_feature (9)..(113): NCBI GI NO: 6093512 NR Description: NONSPECIFIC LIPID-TRANSFER PROTEIN PRECURSOR
  misc_feature (5)..(113): NCBI GI NO: 16930759 NR Description: lipid transfer protein-like protein
  misc_feature (9)..(113): NCBI GI NO: 7438274 NR Description: lipid transfer protein SDi-9
  misc_feature (3)..(113): NCBI GI NO: 18477856 NR Description: lipid transfer protein [Fragaria x ananassa]
  misc_feature (5)..(113): NCBI GI NO: 11095210 NR Description: lipid transfer protein 3 precursor

SEQ ID NO: 1877 - DNA, 610 bp, Arabidopsis thaliana
  misc_feature (1)..(610): Ceres Seq. ID no. 12420784
ctcacttttgttctctgttgcatcatcttccaaactcccgaagaagaagaaaataactacaatgagtcaacaacctcctgctgttggtgttcctccttctcatgcttatccggcggaaggaccacccaaggacgcttatccacctccgggacaaccctatcctcagcaaggatatcctcctccgcagggatatcctcaacaaggttatcctcctcaaggttatcctccgcaggggtaccctgcaacaaggatatcctcaacaaggttacccacctcagcaacaacagcaacagaaacacagtcctggtatgcttgaaggatgtattgctgctctgtgctgttgctgtgtcttggacgcttgcttctgagtggaggtctccgcttgaagctgcaaaattggtttataccgatgatctcatctcattctctttcgtttctctacagacttgactctcttctaagcattttatcttagttactattagattatttggattttgccaaatgggaatgtaaatggttgggtgacccaattcatgttgcacattattggcttttaccctctgctttttcttcctagcttcatctaatgattgcaccctatttattt

SEQ ID NO: 1878 - protein, 149 aa, Arabidopsis thaliana
  peptide (1)..(149): Ceres Seq. ID no. 12420785
  misc_feature (82)..(149): NCBI GI NO: 30694583 NR Description: expressed protein [Arabidopsis thaliana]
LTFVLCCIIFQTPEEEENNYNESTTSCCWCSSFSCLSGGRTTQGRLSTSGTTLSSARISSSAGISSTRLSSSRLSSAGVPCNKDILNKVTHLSNNSNRNTVLVCLKDVLLLCAVAVSWTLASEWRSPLEAAKLVYTDDLISFSFVSLQT

SEQ ID NO: 1879 - protein, 104 aa, Arabidopsis thaliana
  peptide (1)..(104): Ceres Seq. ID no. 12420786
  misc_feature (9)..(79): Pfam Name: Pfam Description:  Extensin-like region
  misc_feature (21)..(80): NCBI GI NO: 21554421 NR Description: unknown [Arabidopsis thaliana]
  misc_feature (23)..(76): NCBI GI NO: 34393718 NR Description: adhesive/proline-rich protein homolog-like protein
  misc_feature (48)..(81): NCBI GI NO: 21618167 NR Description: adhesive/proline-rich protein homolog
  misc_feature (14)..(80): NCBI GI NO: 15229624 NR Description: putative protein; protein id: At3g49840.1
  misc_feature (50)..(80): NCBI GI NO: 34393718 NR Description: adhesive/proline-rich protein homolog-like protein
  misc_feature (21)..(80): NCBI GI NO: 15227350 NR Description: unknown protein; protein id: At2g41420.1
  misc_feature (23)..(80): NCBI GI NO: 40538901 NR Description: expressed protein
  misc_feature (25)..(81): NCBI GI NO: 40746240 NR Description: hypothetical protein AN0754.2
  misc_feature (23)..(80): NCBI GI NO: 6469591 NR Description: unknown [Eufolliculina uhligi]
  misc_feature (21)..(80): NCBI GI NO: 40746240 NR Description: hypothetical protein AN0754.2
SLLFSVASSSKLPKKKKITTMSQQPPAVGVPPSHAYPAEGPPKDAYPPPGQPYPQQGYPPPQGYPQQGYPPQGYPPQGYPATRISSTRLPTSATTATETQSWYA

SEQ ID NO: 1880 - protein, 88 aa, Arabidopsis thaliana
  peptide (1)..(88): Ceres Seq. ID no. 12420787
  misc_feature (44)..(88): NCBI GI NO: 21554421 NR Description: unknown [Arabidopsis thaliana]
  misc_feature (1)..(49): NCBI GI NO: 30694583 NR Description: expressed protein [Arabidopsis thaliana]
  misc_feature (48)..(88): NCBI GI NO: 34393718 NR Description: adhesive/proline-rich protein homolog-like protein
  misc_feature (49)..(88): NCBI GI NO: 21618167 NR Description: adhesive/proline-rich protein homolog
  misc_feature (49)..(88): NCBI GI NO: 15229624 NR Description: putative protein; protein id: At3g49840.1
  misc_feature (50)..(88): NCBI GI NO: 40746240 NR Description: hypothetical protein AN0754.2
  misc_feature (69)..(87): NCBI GI NO: 38175539 NR Description: proline-rich protein family-like
  misc_feature (43)..(88): NCBI GI NO: 6319490 NR Description: Hypothetical ORF; Ybr016wp
  misc_feature (44)..(88): NCBI GI NO: 15227350 NR Description: unknown protein; protein id: At2g41420.1
  misc_feature (48)..(88): NCBI GI NO: 40538901 NR Description: expressed protein
MLIRRKDHPRTLIHLRDNPILSKDILLRRDILNKVILLKVILRRGTLQQGYPQQGYPPQQQQQQKHSPGMLEGCIAALCCCCVLDACF

SEQ ID NO: 1881 - protein, 84 aa, Arabidopsis thaliana
  peptide (1)..(84): Ceres Seq. ID no. 12420788
  misc_feature (1)..(59): Pfam Name: Pfam Description:  Extensin-like region
  misc_feature (1)..(60): NCBI GI NO: 21554421 NR Description: unknown [Arabidopsis thaliana]
  misc_feature (3)..(56): NCBI GI NO: 34393718 NR Description: adhesive/proline-rich protein homolog-like protein
  misc_feature (28)..(61): NCBI GI NO: 21618167 NR Description: adhesive/proline-rich protein homolog
  misc_feature (1)..(60): NCBI GI NO: 15229624 NR Description: putative protein; protein id: At3g49840.1
  misc_feature (30)..(60): NCBI GI NO: 34393718 NR Description: adhesive/proline-rich protein homolog-like protein
  misc_feature (1)..(60): NCBI GI NO: 15227350 NR Description: unknown protein; protein id: At2g41420.1
  misc_feature (3)..(60): NCBI GI NO: 40538901 NR Description: expressed protein
  misc_feature (5)..(61): NCBI GI NO: 40746240 NR Description: hypothetical protein AN0754.2
  misc_feature (3)..(60): NCBI GI NO: 6469591 NR Description: unknown [Eufolliculina uhligi]
  misc_feature (1)..(60): NCBI GI NO: 40746240 NR Description: hypothetical protein AN0754.2
MSQQPPAVGVPPSHAYPAEGPPKDAYPPPGQPYPQQGYPPPQGYPQQGYPPQGYPPQGYPATRISSTRLPTSATTATETQSWYA

(The sequence listing continues in the following parts.)

1. An isolated nucleic acid molecule comprising:
a) a nucleic acid having a nucleotide sequence which encodes a full length amino acid sequence exhibiting at least 90% sequence identity to an amino acid sequence encoded by
(1) a nucleotide sequence described in Tables 1 and/or 2; or
(2) a full complement of a nucleotide sequence shown in Tables 1 and/or 2;
b) a nucleic acid that hybridizes to a nucleic acid having a sequence selected from the group consisting of:
a nucleotide sequence which is shown in Tables 1 and/or 2; and a nucleotide sequence which is fully complementary to a nucleotide sequence shown in Tables 1 and/or 2, under conditions that permit formation of a nucleic acid duplex at a temperature from about 5° C. and 10° C. below the melting temperature of the nucleic acid duplex.

2. An isolated nucleic acid molecule comprising a nucleic acid comprising an open reading frame and having a nucleotide sequence which exhibits at least 85% sequence identity to
a) a nucleotide sequence shown in Tables 1 and/or 2 or a fragment thereof; or
b) a full complement of a nucleotide sequence described in Tables 1 and/or 2.

3. (canceled)

4. The isolated nucleic acid molecule of claim 1, wherein said nucleic acid functions as a promoter, a 3′ end termination sequence, an untranslated region (UTR), or as a regulatory sequence.

5. The isolated nucleic acid molecule of claim 4, wherein (a) when said nucleic acid is a promoter it comprises a sequence selected from the group consisting of a TATA box sequence, a CAAT box sequence, a motif of GCAATCG or any transcription-factor binding sequence, and any combination thereof; and (b) when said nucleic acid sequence is a regulatory sequence it is capable of promoting seed-specific expression, embryo-specific expression, ovule-specific expression, tapetum-specific expression or root-specific expression of a sequence or any combination thereof.

6. A vector construct comprising:
a) a first nucleic acid having a regulatory sequence that causes transcription and/or translation; and
b) a second nucleic acid having the sequence of the isolated nucleic acid molecule according to claim 1;
wherein said first and second nucleic acids are operably linked and
wherein said second nucleic acid is heterologous to any element in said vector construct.

7. The vector construct according to claim 6, wherein said first nucleic acid is native to said second nucleic acid.

8. The vector construct according to claim 6, wherein said first nucleic acid is heterologous to said second nucleic acid.

9. A host cell comprising an isolated nucleic acid molecule according to claim 1, wherein said nucleic acid molecule is flanked by at least one exogenous sequence.

10. A host cell comprising a vector construct of claim 6.

11. An isolated polypeptide comprising an amino acid sequence
a) exhibiting at least sequence identity to an amino acid sequence encoded by a sequence shown in Tables 1 and/or 2; and
b) that exhibits at least one of the biological activities of the polypeptide encoded by said nucleotide sequence shown in Tables 1 and/or 2.

12. An antibody capable of binding the isolated polypeptide of claim 11.

13. A method of introducing an isolated nucleic acid into a host cell comprising:
a) providing an isolated nucleic acid molecule according to claim 1; and
b) contacting said isolated nucleic acid with said host cell under conditions that permit insertion of said nucleic acid into said host cell.

14. A method of transforming a host cell which comprises contacting a host cell with a vector construct according to claim 6.

15. A method of modulating transcription and/or translation of a nucleic acid in a host cell comprising:
a) providing the host cell of claim 9; and
b) culturing said host cell under conditions that permit transcription or translation.

16. A method for detecting a nucleic acid in a sample which comprises:
a) providing an isolated nucleic acid molecule according to claim 1;
b) contacting said isolated nucleic acid molecule with a sample under conditions which permit a comparison of the sequence of said isolated nucleic acid molecule with the sequence of DNA in said sample; and
c) analyzing the result of said comparison to identify said nucleic acid in said sample.

17. A plant or cell of a plant which comprises a nucleic acid molecule according to claim 1 which is exogenous or heterologous to said plant or plant cell.

18. A plant or cell of a plant which comprises a vector construct according to claim 6.

19. A plant which has been regenerated from a plant cell according to claim 17.

20. A plant which has been regenerated from a plant cell according to claim 18.
